United States Patent Application Publication US 2004/0123343 A1 - sequence listing, part 3

SEQ ID NO: 5758 - DNA, 1652 bp, Oryza sativa
  unsure (1)..(1652): unsure at all n locations
  Clone ID: PAT_MRT4530_12513C.1
cacgagggttggtagtgaggggggagtggtccaaagaaagtgtggttaggaggaaaacaagagagagatgatatggggcaaatggacggcggcgacggcggcggcggcggccacccctaccactaccaggctctcctggccgccgtccaccagcagaccgtcccctttcccaatcccttccccgccccctcctccggagccgagcccccccacccgcacaaccacaaccacaaccacaatcacaaccacaatattcacaattctcacaatcacaaccacaatcacaatgctgctcctcacccttgtcacactcccactcccactcccactcccagaggtttcgccgactggagcgcctccaccagcgccttcacctcccttgccgcgcactcttctactgcccccagcaatgccgttcactacagcttctccccctgctatgccttctggacacattacatgctcaacaagaacgcctaccccacctccttccctgcgccacacgacgaccacctgcgccttgccaacaacaatcatcctagagacgcaccaggtcctgcatccagctacggggtcgagtcttttacttcaccgtccatggcaccgaatatttgcacccacatgcctcccatagaaggacccatatctgccaaggaagataagaaaccagagattttgcctagagtggttaagagcagtgatgaattggaaaccagaaacagcaatgttgaatttcactctgagacagttggtactctccctgagtcgaagcaaggccatgacagtcgtgctactaaactactcaactcgggagaataccaagtcattctgcgcaaggagctgacaaagagtgatgttggaaatgttggaagaattgtgctacccaagaaggatgcagaggctagtcttccacctttgttgcaaagggatcctttgatactgcacatggacgacatggtgctcccagtgacatggaagtttaagtacaggtactggccaaataacaaaagcagaatgtacatcggatttcgcaggtgaatttctgaagacacatggtcttcaggctggggatgtccatncattnatcctacaaaaaaccttggcctcctggccaaattttattattcccgaggaggagaaggcccattncatccagccagaccacaaatccctagatgcatttggggttaattgcaacagtgttagttgatgccatttgaagggataggtacgtggacttaccataagttggctatccaggagaagttgaaagtgtcatcgatttttatatcactggtggccaccatcacatggacaaagattaaagcgcatgcagcttggacctgtttaactctgaatgaatgaggacgaaaaaaagacaagattggtagagtattggaagtgttggcaatgggcttctacagcttatcttgggttgagaaaagcacttgtcagtttatttaattcagttatgttggggagcttgacttgtagttttcagaacaatatatttgcagcttctgtaaatatgttttggatctataagataaaagagagtggtgtgtgattttgcttttggatggtcatccatctatttctcatactaatgcccggaatgtctgttcattgtccaaaaaaaaaaaaaaaaaaaa

SEQ ID NO: 5759 - DNA, 302 bp, Oryza sativa
  Clone ID: PAT_MRT4530_12514C.1
cggaagcacccgggccttcttcttccgccacctgttccctagcaaggcggaaggcatcccggcgtggttggatcctgtgaacttgccatcggggaactcgcgttgctgcggcttctgcggcgagcccctgcagttcgtcctccagatatatgcaccgattgaggacaatgcggcatcatttcaccgcactttgttcatgttcatcgtgaaggttttccggtgccagcttccccgtagtaatgccttctactcaagtgaaccaccaaagcacaatgattctgacaagccactatgtccaggag

SEQ ID NO: 5760 - DNA, 432 bp, Oryza sativa
  Clone ID: PAT_MRT4530_12515C.1
atggagaggagcacggtgatgcccctggactggcagtgcttgatcaatgtcggcaccgacggcggcaagcgggtggccggatatgtcgagcgagtagcggccgtagccgaagacgttgtagaaggtgatgatgacggtggtgtagtggccggtgtcgcaggcctttctcagggagccttcctccttgtggcggccccagtagacgacgaggcccgggtcgtcggccgtcgctggcggcggcgtagcgaggagcagctcctgctaaggggaggagtgcatgcacgaggcccatgtggcttgaaggagaacagcaagatggcaatgatctcaaattctcaggtcatttgcgttaacgtcggcggcggcactccggctgagcgagccgacgaggcgcgccacctcctcgcggccgacatggcggagccggtctag

SEQ ID NO: 5761 - DNA, 1492 bp, Oryza sativa
  unsure (1)..(1492): unsure at all n locations
  Clone ID: PAT_MRT4530_12516C.1
tgcgagtcgccgaacacgcacgcatttttgcccccacgccgccgccgaggatggagtccaacgccgagaagcttcgtggtctcaccatcacctcgctggatgaggaagacgacgagcccgaactgccccaccgatccccacccgccagcggcggcggcggaggcggcggcgcgggctacgaggacgacgatgaggaggaggaggaagaggcggaggtgacgcttggttttctggagaagccgaagcacccgggcctcctcctccgccacctgttccctagcaaggccggaggcatcccggcgtggttggatcctgtgaacttgccatcggggaactcgcgttgctgcggcttctgcggcgagcccctgcagttcgtcctccagatatatgcaccgattgaggacaatgcggcatcatttcaccgcactttgttcatgttcatgtgcccgtcaatggcatgcttactccgagaccagcacgaccagtggaaacatagacaaggcaatccgtgtagaagcgtgaaggttttccggtgccagcttccccgtagtaatgccttctactcaagtgaaccaccaaagcacaatgattctgacaagccactatgtccaggagctcctgtctgccattggtgcggtacatggaaaggtgataaactctgtagtagctgcaagaaagcacgctactgctctgagaagcatcagacactgcactggcgctctggccataagagtgattgcctacagttaatcagttcttctgaagcttcaagctctatttttcctgctgtaggaaaagttcctgctagcaaatcttggccagaatatgagattgcaatcgactatgagggtgctttcaattctgacagttgtgatgagagtaactcaaagtccttggtgatgcaaagacctggtaaaccagatgatatgatgcagtcatggatggatcaatttgaggctgatgctgacaacaaatgctgggcgtcttttcaagagcgggtctcaagagcaccaaagcaagtattgagatactgtcgagaagagaatgccaaacctctatgggcgttatcggctggttgtccatcaaatgccgatatcccatcatgtagctactgtagaggtccactatgctatgaatttcagataatgccacagctgctttattactttggtgtgaaaaatgagccagactctcttgattgggcaacaattgttgtgtacacatgtaaaggatcatgcgatcaaaatgtcagctacaaggaggaatttgcatgggttcagttataccctacaacaaccacaaggtcatgataatgtttatggtttatttgcccccncagaantaagctttgtnatggcctacaggganctggctgaaatcatctncactcntttttgacttgaantccggagctcnctgatccanacnaaatanatttgttttcccccnctgggggatttttttantgggggtgttggtttccaanaatccc

SEQ ID NO: 5762 - DNA, 459 bp, Oryza sativa
  Clone ID: PAT_MRT4530_12517C.1
atgaaggaagggccgacaacgaggttcggccgtggacgacaactggcagatgaagatgttcggccgaggatggggaagcggccggcggcggtggacggtgccagcggtggagcgctagctcgcgcgcacgaggtggagcttccgcacggtggacggtggcgccggtggtggagcggtggagcggcggcggcggcggcggagcggtggagcggcggcagaggcggtcggtggagctcggcgatggagcgggcggcggcggcgggagcgggcggcggtggagctggatcgacggccagcggcgcggtggagcgcgcggccgacgcgagctcgaaggccggcggcgtgcagaggacgacggtcggcggcggcggaggacgacggtcggagggtgaaggtcgcaggcgggcagcggcggaggacggcggaggcatgcggcggcgaaaaaatttggcagcctga

SEQ ID NO: 5763 - DNA, 294 bp, Oryza sativa
  Clone ID: PAT_MRT4530_12518C.1
ctccctgcttcctatttcatttaatcccgatggaaagcaacaagcagttcaaaccccataaccaaagcgaactcaattcagggtaacataacggacgaaaaacccctaacactggatggatggaaagagggcttttcgactggagagagccactggacaccataacgacccggctcgaggataaaaacattttgccccggatggttaaggataactggccagaagggcccccaccaaacagttccttccagtccccgccggagtccccgccgtaaccgccgccacggttgccac

SEQ ID NO: 5764 - DNA, 1272 bp, Oryza sativa
  Clone ID: PAT_MRT4530_12519C.1
atggatcgcaagcgcccgcgccctccccagccgtcgccgccgccgccggtggcctcctccgccgcctcctcctcctcctcctcggtgctcgacgacggggacctcctccgcgagatcctcctccgcctcgcccaccccaccttcctcgtccgcgccgcgctcgtctgcaggcgctggctccgccacgcctccgaccgggccttcctccgccgcttcgccgtcctccacccgccccgcctcctcggcttttacgtcgacagcgccagcctcccgcgcccgcgcttcgtgcccctcccccacccgcccgagctcgccgccgtcgtccgccgcggcagcttcgacctgggcaccgccgccgacctccacttccacctcggcacggggatctactgctgccggaacgcccgcctcctcgtgtgccacaggggcggcggcgagtccacgctccagctccgccgcccgctccatccggcgagcgacggggcggtcatctccaccttccgcacgccgcctcgccctctcccgcccaaccagcgccacacgcggtatatcctcctccccgaggacggtggcgatggcgatggcgatgccgtggcgtgcaccgtggtgaccctggtgagcagcgagcgggaggtcttcgccaaggtggagaagatcttgcgagctggggtctgggacgtcgcgcaaacctcggcgcccattgagctaccggcgcactggaggagatcattgagccggggttttcttgtcaatggcaagctgtatatgttgggcacaacagggtacattcttggattggaattggtgtccatgagcttgttcttcatcgaggtccccgatgccgtgcgagatgactgccctgaaagctttcagctgagcgttaagctgtcgcaagcggagaaatctgggctttatctgatccatgtggaggggtttaagatccatgtttggcttcacggaacagatggaaacagctctgccgattggaatctagtaaatactatttgtttgcgcgaggtgtttggtcatcttgtgaagcctagttgggagtcaggggattcacgcattagtctgcctgggtctggggacaacgctgagtttgtgttcttggaggtggatggtgaggtcttttgcatggatattatcagcaggacagtggagaaggtgtatgagatggcaatgaaggatgattttctatttgagatataccccttcatgatggtttggccaccaatcttcccagcattgatcaaaacacatgaaccagagtga

SEQ ID NO: 5765 - DNA, 264 bp, Oryza sativa
  Clone ID: PAT_MRT4530_1251C.1
gggtcggtgcgggggaatatccacggcatcgcgggaagaggtgcgcctctgccgcgccacgctgcaccgtgtacgtggccgcgcgcgcggccgcccgaccgacaccgtggcgtactgtcgtctcgggccgtcacgcgcacggccggcacgggcaatggatgggccgcgcggcacgtgaaggttcaccgtttccgtaggccgccgccttctcgcggcacacggagatgggcaaagcagcggaccgttctagccggcgtcgcctag

SEQ ID NO: 5766 - DNA, 410 bp, Oryza sativa
  Clone ID: PAT_MRT4530_12520C.1
cagctaactgaactaaaacaaacatttcgaatagaaaaaatggagacacgagtcacatgactgacaaatacagagtacacattttatcgagagcaaagtgctcatatccaagtgctcctaactggctaacttttgtcttcattctttagattagactgatgctgttggtttttacttgtactatttggtttcgataaatttgtgagcttgaaatgttttatccttccctttgccatcatcctctgttggcacttggcaccgcagttttaatatatctagctgccaattatctcattttgctgtcccttttataagaacccgctgttctattttgccatcacagaggtttaagttgtcatattactttgttactcgccctgttattgtcttcttttcacttctgaaaacct

SEQ ID NO: 5767 - DNA, 355 bp, Oryza sativa
  Clone ID: PAT_MRT4530_12521C.1
gggggaaaaagggaacccaaaacccctttttaaaccaccccacttaaaaagggggttcagggggggccacaatggagttgggcaaaaacaccccccgggaaaatggaaaccttctggggggggccaaaggcccaacaaaatttaatacaagggggccccaaaaggggaggccggggggtaaaactgggcccagcctaaaaggaaaaaaaggggtccccgggcaatggaccaacagtggtaaactaaaaaccctttaaggatcaaggaaccccagatttgaaagggtggggggggccccctcgtgggttccaaaaaaaggccttttcaactgggaaaaatattctaccaggggggg

SEQ ID NO: 5768 - DNA, 149 bp, Oryza sativa
  Clone ID: PAT_MRT4530_12522C.1
cgcgcaaggagtacgcactccaaacgtcccagaaaggtatacgggacacccgagtggatgagaatgcgcacaaagtcaacactcgccctccgaacaaactacggttacagccccggaagagcgagatccccctcgggggagtggcatag

SEQ ID NO: 5769 - DNA, 3969 bp, Oryza sativa
  Clone ID: PAT_MRT4530_12523C.1
atggctgaggttgttatcggaccactagtttccatggtgaaggagaaggtttccagctaccttctagaccagtacaaggttatggaaggcatggagcagcagcgcgagatcctggagcgcaagctgcctgccatcctggatgtcattgaagatgcggaggagaagggagcttttcgacctggagtaagcgcttggctcagagcactcaagaaggtggcctatgaggcaaatgatgtctttgatgaattcaagtacgaagccctccggcgcgacgcaaggaagaaggggcagttcaacatgctcggcatggacgttgtaagcctctttccttcttataaccctatcatgtttcgtaataagatgggtaagaagctacaaaagattgtggggagcattgaggtccttgtctcagagatgaactcctttgggttcatacaccggcagcaagctccaccatccaatcaatggcgtcaaacagattctataatggctgactctgagaaggatattataagaagatccagagatgaggagaaaaagaagattgtgaagatattgcataatcatgctagcagcaatagggatctgttggtccttccaattgttggaatggctgggctgggaaaaaccacctttgttcagctcatttacaatgagcctgagatcaagaaccatttcgaactctggaggtggtgttgtgtgtcagatgattttgatgttggaaatattgcaaatagcatctgcaatagcacagagaaggatcatgaaaaggcattgcaggatctgcaggaggcaataagtgggaagaggtacctaattgtcttggatgatgtatggaaccgggaagctgataagtgggaaaaattgaagacctgccttaagctgggtggcaagggtagtgcaatactaacaactactcgtgattcacaagtagctagaattatgatcactggtgtagttgaagcctataatcttgagaaacttggcgaagaatatacgaaggaaataatacagactagagcattcagtttggctggcagtgatgagctatctgaaattgttcagaagtttgtggacagatgtcaaggttctcctttagctgcaaaagcctttggttctatgttgagtaccaagaccagcatcctagaatggaagaatataatagccaaaagtgacatttgcaacgagaagactggaattttacctatactaaagcttagctatgccgacctaccatcgcacatgaagcaatgttttgctttctgtgccatattccccaaaaattatgagattaatgtggagaatttgattcaactatggatggcacatgacttcattccactagaggagaaatatcattttgaaacgacatcaggggaagaaattttcaaggaactagcttggaggtcattctttcaagatgtcaaacaaactcctcttgtgtgcagtaataatggagacagggtgcaactccgatacaccaccacatgcaagatacatgatcttatgcatgacattgctctatatgttatggggaaagaatgcgtaactattacggataggtcctatcgcaaagagttgttgtcaaatcgttcgacttaccacttgctcgtgtcaaggcatagaactggagatcatttcgatgattttctgaggaaacaatctacaactctccggacattattgtatccaacatggaatacttatggatcgatacatcatttatcgaagtgcatttctctacgtggactgcagctatatgaaatcaaagaacttccaattagaccgataaagttaaagcacctaaggtatcttaatctctcagaaaactgcgacatcaaagaacttccagaggacatatccatactgtaccatctacagacattgaatgtttctcattgcattagacttcgccggctcccaaaggatatgaagtacatgacaagcctacggcacctctatactaatggatgcaaaaacctggagtacatgcctccagaccttggacatctaacttctttacagacactaacatattttgtggttggtgctatctctggttgcagtactgtcagagaattgcagaatttaaacctttgtggtgaattagagttgtgtggtctagaaaatgtatcagaggcacaagcaagcacagtcaatattgaaaataaagtgaaactcacacacttgtctcttgaatggagtaatgaccaccttgttgatgaaccagatcgccaaaagaaggtactagatgctctaaaacctcatgatgggctcctgatgttaagaatagcattttacaaaggcaatggttttccaacttggatgacagatctcagtgtgctgcagaacttggccgagctctatctagttggttgttcaatgtgcgaggaatttcctcaattctgtcatttgaatgtcctaaaagttctttgtctcacaagtttagacaaccttgcaagcctatgcagctacacaacatccaatttttttccagcactaagagaacttcagttacatcgtttggagaggttggagagatggtcggcgacggaaggagaagaagtgacatttcccctgcttgagagtgctagtataatgaactgtccaatgttgaaatcccttccaaaagcaccaaagcttcggatattgaagctagttgaagaaaaggcagagctatccttattaattctgaggtctagattttcttcattatcaaagctaacactgtctgtcagtgacggaaatgcaggactggagcttgatcagaattatgaagcacctctttcggaaatggagttatgtggctgcgccttcttcttccccttaggcccatcccgtccaacagttgggatatggaaatggtttggacaacttgtggatttgaaaattgaatcttgtgatgtgcttgtgtactggccagaggaagagttcatatgcttggtttccttgaagaatttggccattgaaaaatgtaataacctaataggccacagacatgtgagtggggagtcaactcgagttccaagcgatcagttgttaccgtatctaacgtcactatcaataaggcaatgtaaaagcttggaagagatctttagacttccaccatctctcacatctatttctattcatgattgcagaaatcttcagctaatgtggagagaggataagacagagtcagagagtgtaatacaggtggaacgcaggtcggaacactgcaatgaccttgcttccacaattgttccagatcagcaatctccatcactaagaaataattctctgccatgtttagagagtctaaccataggtaggtgtcatagattggtaacacttaaccatctaccaccgacagtcaagtcgctgggaattggtcagtgtgacaaccttcattctgttcaactagacgcgctgaatcattccctcaagaagctactaatatttggctgtgagaagctttgttccgtctcaggacagctggatgcactcaagcgcttaattattgatcactgtaataaactggagtcattggattgtttgggagatcttccgtcactacgaatcctccgtcttgagggatgcagacgcttgcaatcagtagcagggtgccatggtcgttacccacttcttcaagatattacgattaaatactgcccagctataaatgtgaagcctctgtatgaacgcctcgggcagcggattgatagtcttgagatcagagagttatcagatgttcattcaagaaatcctgaagaaggggaacgacggcagaaggactgccggaatatattagacgaaataaaagttatttacagacaagaaaacaacaaaaacacaaaaacgaaaaaaagcatcaaggaggttggaaagccaagagtctttgatcaatatcttgaagaattagggtggccaccctatcaaccgttgtgggatttttttggaagatacgcttattccgtcccaacagaatga

SEQ ID NO: 5770 - DNA, 1016 bp, Oryza sativa
  Clone ID: PAT_MRT4530_12524C.1
actgcttaagccgcatatgcggccgattataccacattaagtgtctgattatgccgcataagcgctacaaggtggggtgaccgcatgaaaccgcataccactttttaaaacattggtattgtgtgaaacccttttttaggataagttttatagacaaaataccactaagctataagaaacactgatttgatttgtttgtacagttagcacgagcaaacaatacttgacagagtaaggaaacatcctacatgtgcatatagctaaagcctaaaacatcaccaaaattatatttgaattattgattgcttttcatgaaaccaattgaaagactagcaatttggctataaaattgtgaagatcgactatccgatccatgaatgttttatattgttttaaaataatgtggtctacagctagattttatgttaaaccctactatgcctctttgtgaggttcgcagcatcatttagtgaacacttctgtatatcagacattcatatggtctagttattgtactttctgtgtcattgtattatttacctcagtctgcaatagatatatatgaataatgatatcttcaaagttttattatttttaggttgaaattgtacatgacaaaatatgtacaaataccacaacttctcagtgcaacttaaaacacagtcattttttgtgttctcttgtttattgaggtttcttttgagcagaaagtccttgctactcaccggtgcaaatttaaaattagccgtaatgggcaaagcgaagataaggcaagcaagaagaagaattctgcatcgtgctaaatgcacattgtacacttttgactgcaagacactgctcacttatctcatcttcctcgcatgttgtgtatatttggtctagtatctgcagaataagaatacgtggccttactgtttagtgaagcctttggagtatcctgtaaatatggacgagatgctgctgaaatctaataagtgttgccccattatctttggtttttaaaaaaaaaaaaaaaa

SEQ ID NO: 5771 - DNA, 531 bp, Oryza sativa
  Clone ID: PAT_MRT4530_12525C.1
acatatctgacatagtatgctcccgtgcttcggaatcctggccaatggcgtactccagccggatgggcgagaccgccgacgcgaacctcgaggggctgcgcgccgcgctcgagacgctggtgcagatgatgccgatcgagaactacgccctcatcatgctcctttcgggcatacctcatcggcgacgcgagccagctcagagtgcgagtcggagccacacccggatcggcaaggtggaggagctctactacacgctctgggtggccgccttacatctcagccagacgaagaagcgtgcctcaacagactcgccgtgctcaagctcaatggaggtctcgggacgactcatggactgcactcggcccaacattgtgattgaaggccgcaatggctgtacggttatataccttattgtgattcaaatcgagtacgtgatcaagagagatggacgcactggccctttgcttctaatgaactcattcatcactcatgatgacgcacataagatagaggatgatgtactccaactcc

SEQ ID NO: 5772 - DNA, 480 bp, Oryza sativa
  Clone ID: PAT_MRT4530_12526C.1
tctctgatcaagctctctaagcatcgatcacttggttcttgctcatcatctttcgcttgctcgtcagctaggaattcgtagtcttgagccgaggttgggtgattcgatggacatgagcgagagcagtgagaaaggaatggagagcaatgcgtcgtctggccctggcaatggcatcccggtggagtggcagagccaattcagcagcgccttcgcgtgccagccgtcggtggcggcgcagcaccagcagcacgccatgatggactccttcgcggcggcgtccgccggcctgtgggcgtcctccgacgtcgtcagcgccatgtcatcggccgcgccgccgcggggcgcggggttcttggcgccggtgcccgggttcctccagcaggggctcggccatttcccggtggactccggcttcatcgagcgcgcagcgcggtcgacgtgctttggcggcgggatgatggccggcggcccataccgcgc

SEQ ID NO: 5773 - DNA, 624 bp, Oryza sativa
  Clone ID: PAT_MRT4530_12527C.1
atggaggcaggcgagcacaccagtcggcggcgacggaggcaggccggcggtgaagtcgtagacgcccaacaacggcggcataataggccagccgtgcatgcggcggcgaaggccagccggttggtgaagacgtggatgcccatgaacggtgatgtgaccatcaaaccgtataggcaaaagcaccagtcggcggctatgaggcagccgccgatggctagcttgatggtccttcagcacgacgtcgtcatcggaggtagccggcggatctcattaaaagaagatcatgcggacaccgacatgaaggtgagccggcgaagacggttgatctcaacaatcatgcataagccagccgatttggcttatatgtatggttctgatgatgaagatgattccgaagtggcagcagccgagtgggtcaggagcaaaaaggttgtgccatgcccatgggtgagaagttctggaaaagaagaaagattcgactttgatatcaccaaggctggagggaagattacatttgatgacttaaagaagccaatgaaggttgatggtaatcctttccctgttaacatggtgcacacatctagaaggacagcagatgggggaaagaatagaactttcagatga

SEQ ID NO: 5774 - DNA, 330 bp, Oryza sativa
  Clone ID: PAT_MRT4530_12528C.1
ggctaacagtgacaggcatttgtggtgaattgtggaagggaaatggactgtaaagctgaggcgtatacatggatcaaataactctgctggctatgatacatgctcagcttattgttttcaacagagttgcatttgaagttttggacacgtgcgatttagttccgggcctctggatttcaattcattttctgaaggatgacagtgaggcaagaatacatgataacattgaaatcggttgtcctgagggatgtttattctgcaatggcttcttcattcttctgatagatctaatgcaacgggaacatcttttagaaggagaaaaagaggcaa

SEQ ID NO: 5775 - DNA, 872 bp, Oryza sativa
  unsure (1)..(872): unsure at all n locations
  Clone ID: PAT_MRT4530_12529C.1
tttttttnttttttttttttttttttttttaattggttacgttatgtagccttattatcttcaaggtaaagcagtacttacaatatgcaaagtaatctttaatggacaaagatcaacagataccggtaaagatcagcatttagtttgtgaaccattcagagcacaaaagttgttgttcaggctgtgaacagacagagctcacggtactagcaaaaggaaacatactccatctgcgtaatcgtcacaaccaatacacaccttatttggaaatactaggaatgagcaactaaaaatcccagcggggggacatcactcttgccaagctgctggaccagatagacaccactcaacttttctggtttcctgcgaccttgtcctcccaccagtagatgaaccttaggttggccccctgcttgtccgtcttgtagagctggtaccagtgctccgccacctccgatccgacgacggcgccgcagatcgccccgaagccggtggccaggacgacaccgtgcggggccttggagtacttgagggcgatgccgccgaggtgcgcgccgccgacgagagccccgccgagcgcgaacttcctggattccctcatcgccttgagctgcgggccgtagacgggatcggaggcgatgaactcgtcgacgtcggcatcggtccacttggggaggggcttgtcccggccgtagaccttcttgaagtagtcgaggaaggagaagttcttcgcccagtgcgccttgatcccctcgacgtgctcgtggatccccatcgccgccgccgccgccgccgccgccgccgccttggattcgattcgacggtgaggtgtggtggtttcgcctcgcgtttggcttctccctcccggccgg

SEQ ID NO: 5776 - DNA, 164 bp, Oryza sativa
  Clone ID: PAT_MRT4530_1252C.1
gttattactttagttacccggtggctatgcacctggactatccttcacaaaccgggacttcggaatactattgcgctggtatcacgacgtttggaccaggtggcgcagagttttttaaccaggagcatggatggcagtctagtctacggattgatagctactaa

SEQ ID NO: 5777 - DNA, 378 bp, Oryza sativa
  Clone ID: PAT_MRT4530_12530C.1
atgtctagtgttatgggttgggactgccctaacgccacggccaccttgccttttgccgcccctcctgcgcacgacatgggcagcagctgtgccgttggcactgcaccgcaggccatcatggcccctcttgtctgccctagaaatggtaccgccgtcctcgctgctatcgcggtggctgccgtgctgcttcgtgctctacgccaccaaccccacaccgatagcccggcaaggcctgtagcctatcgctgcctgtctcctctgtcgcaccgcctttccaccatccttcgtattcatggaagaggtgttgaagagggaacccccctggatttttcacattttggtccttttgaaaaacttatttcgcaaatagatccctga

SEQ ID NO: 5778 - DNA, 318 bp, Oryza sativa
  Clone ID: PAT_MRT4530_12531C.1
atggtgacgcgcgcgcgcgtgcgcgcccggcggcatcgatcggcatggcgttcggcggcggcgacgctgcagagcgcgcgcgctcgcgcccgcggcgcgctgtgcgtgtacgacgtcgtcgcatggtggctggcgcggcgcgcgcgcggggcgggggcgcgggcgcgctcgccatcggtcggcgtcgcggtctcgacgacgtcgcgcgcgcgcgagagcgcgcgccgccgggccccgcgggtcacggccgctgtcggtagcgcgcgggctgcccacgtggctgggcaccccggccaggccgacaaccgcgtcgtctga

SEQ ID NO: 5779 - DNA, 417 bp, Oryza sativa
  Clone ID: PAT_MRT4530_12532C.1
atgctgtacgggcgcacgccgttccgggggcggagccggcgggagacgttccaccgcgtcctcgccgcgcggccggacatgcccggcgagccgacgccgctgcgcgacctcatcggactcctcctggagaaggacccgggcaggcggctcggcgcgcacggcgtgaagcggcacgccttcttccgcggcgtggactgggaccgcgtcctccacgtggcgcggccgccgttcatcccgacgcccgacgacgacgacgcgggcgccgccgccgaggcgctcgacgtggagaaggtgctgcacgaggcgttcgctgcgtcgaccgccgccgccgccggcgagacggcggccgtagagacggccgcgccggaggccggcagtgacagagggagagatgaagatttctccgtatttttttga

SEQ ID NO: 5780 - DNA, 564 bp, Oryza sativa
  Clone ID: PAT_MRT4530_12533C.1
ggacaaaaaaggggagtttattccactatctatactaaaaaaatgggggggtttttcattatcatcacccacaaaaccccatgggggagcataaaaagaactttttgctttaccaaaacccctatgaggccaacaaaaaaggggcggcttcaaagtatccccgggaatctatttagaaccaaaggccgggagagggggggccccctttctctacacaaaagggggcttaagttgcccaaagctgccatgttctaggccaaaatatactttgggagccaaaccccgctgaaggccagggagtttcataaggcaaacgggctttgatatatacaaaactcgaccacaggttatatgggtaccctaaagggcaaaaatcttcttggattcgggggtaaaaacctctgtttccgaatcgactgatatggcccacgacgggcggggggaagacccccggacctttttaagggtcttcccccccaccctgggagcgataaggcagtaccacatggccccaaggggggccagcataatcgcggggccgattgccattgtacaccaagctag

SEQ ID NO: 5781 - DNA, 1905 bp, Oryza sativa
  Clone ID: PAT_MRT4530_12534C.1
atggcagaggagagagagagcttcgaaagtcagtgggcgccctccgatgttacggaggaagatttgaaggagatggtggcgcatggtgttcttccggcgaaggagatcatcgggtggcgtccggcatgcggcgaagcatttccgacccctgacacacatgaggtcgtggtgttctctcatttcttctatgggggcttttctcttccaacctcaagattcttccgggggattctggagttttacgggattagtttgcatcacctaaaccccaattccatagtccatattgccaatttcatccatgcttgcgaggctttcctaggtattagaccgcattttgccctattccgccacatcttcttcctcaagccccagccaaacaagagcaagccatgcattgttgggggagccggttttcaactaaggggaaccttgagccagaaatatttctccatgccctctaaaacctcgaacaagggttggcatgcaaattggttttatgtgcagaatcctgaaccagcgcttcctgagtacacctgtcttcctccagaattttccttgatgaagtctgatcctccgatcgctcaacaccgctcaccctgtcggcaggctggtcaggctagtggaaggccaaaaatccggtccgatgctcaaccaaacacctcgaagccgactaaccagtcagactctcgtaagaggaaattagttctgagtgacgatgagggtgacgatgttgaaaaggctggcagcaaaggggtgactggaaaacagccaagacaagctaacccgaagaagaaaacatccagtcgtcccataccgaaaatcaggaagtcatccaggaagccttatgacatcgatccttctggaaaagactctgaaccaactggcgcggagactagtcctacgacagaaaccgggccgactgccaaagatcgcctgagtagtaatcaaccagcaaccgacaatgtacaggccagcaatgaacctcgactggaaaccagtcggccgaagctgaaatcgcaaatcaaatctcaagctcaattcgacgtcttggtcaacaaaattaagaagcttgaaggagccggagatgaagttgccaacgccgccacaccactcatccaagccatgtttttcaataataatggtccgagttcttttgatgctgttgaaatcttcgacaagctaagagctgctccagatacatattttaagaacatcaaggaagcgggatgcatgggggctagcctggcattggcaatgaccaagtccttgtacccgaagatcgatattgatgctgtcgacgactttgcagatgggacaagtgaagaacatgcccttgatctcatcaatgatgcacaaaaggctgcagacaagattactgctgatgtagttgagaggtttcaggacaacaatctcgggccgactgggtctggtaattctgatgatgaaaaaactgagtctgatttacattgtatacccccgactggtaactcaaggaacaacttgatgttagcagtcaaagaggaagatacaaaattggtcgaaaactcgtgctttaattccttgaagtaccataccattggcacgttcgacttgtccattgctcatgggatgcgctacggaggcataacaaattttgatgccgaagtcttcacagaaatctttaaatactccgccagtgaactgagtgccattatcagtgatgatccgattaggtactccaaaccgatgcacgatgttgatgaaaaaatctctagacttgtctgttgtaattgtgatgactggtttggcttcaatccacttggagaatttgtcaaaagctacaaagagatgactgtaaccaccggtagcctttttgaatgggccaacaatgtcgagcccccaaaccgcgaacggccaagataa

SEQ ID NO: 5782 - DNA, 1956 bp, Oryza sativa
  Clone ID: PAT_MRT4530_12535C.1
atggcagaggagagagagagcttcgaaagtcagtgggcgccctccgatgttacggaggaagatttgaaggagatggtggcgcatggtgttcttccggcgaaggagatcatcgggtggcgtccggcatgcggcgaagcatttccgacccctgacacacatgaggtcgtggtgttctctcatttcttctatgggggcttttctcttccaacctcaagattcttccgggggattctggagttttacgggattagtttgcatcacctaaaccccaattccatagtccatattgccaatttcatccatgcttgcgaggctttcctaggtattagaccgcattttgccctattccgccacatcttcttcctcaagccccagccaaacaagagcaagccatgcattgttgggggagccggttttcaactaaggggaaccttgagccagaaatatttctccatgccctctaaaacctcgaacaagggttggcatgcaaattggttttatgtgcagaatcctgaaccagcgcttcctgagtacacctgtcttcctccagaattttccttgatgaagtctgatcctccgatcgctcaacaccgctcaccctgtcggcaggctggtcaggctagtggaaggccaaaaatccggtccgatgctcaaccaaacacctcgaagccgactaaccagtcagactctcgtaagaggaaattagttctgagtgacgatgagggtgacgatgttgaaaaggctggcagcaaaggggtgactggaaaacagccaagacaagctaacccgaagaagaaaacatccagtcgtcccataccgaaaatcaggaagtcatccaggaagccttatgacatcgatccttctggaaaagactctgaaccaactggcgcggagactagtcctacgacagaaaccgggccgactgccaaagatcgcctgagtagtaatcaaccagcaaccgacaatgtacaggccagcaatgaacctcgactggaaaccagtcggccgaagctgaagtcagtactgatcaggagcccccgactagaaatcagtcgggtacagaacgaaatgaagacatcccggaagcagaggctcaagcaagcagccctccctaaaaagaagcttgaaggagccggagatgaagttgccaacgccgccacaccactcatccaagccatgtttttcaataataatggtccgagttcttttgatgctgttgaaatcttcgacaagctaagagctgctccagatacatattttaagaacatcaaggaagcgggatgcatgggggctagcctggcattggcaatgaccaagtccttgtacccgaagatcgatattgatgctgtcgacgactttgcagatgggacaagtgaagaacatgcccttgatctcatcaatgatgcacaaaaggctgcagacaagattactgctgatgtagttgagaggtttcaggacaacaatctcgggccgactgggtctggtaattctgatgatgaaaaaactgagtctgatttacattgtatacccccgactggtaactcaaggaacaacttgatgttagcagtcaaagaggaagatacaaaattggtcgaaaactcgtgctttaattccttgaagtaccataccattggcacgttcgacttgtccattgctcatgggatgcgctacggaggcataacaaattttgatgccgaagtcttcacagaaatctttaaatactccgccagtgaactgagtgccattatcagtgatgatccgattaggtactccaaaccgatgcacgatgttgatgaaaaaatctctagacttgtctgttgtaattgtgatgactggtttggcttcaatccacttggagaatttgtcaaaagctacaaagagatgactgtaaccaccggtagcctttttgaatgggccaacaatgtcgagcccccaaaccgcgaacggccaagataa

SEQ ID NO: 5783 - DNA, 519 bp, Oryza sativa
  Clone ID: PAT_MRT4530_12536C.1
atggcgcggaaagtaggctttgtcctggtgctactggcggcggcgacgctcgccatggaggccggaacggcggcggcgcagagctcgccgcaggacttcctcgacgcccacaacgccgcccggcgcggcgagggcgtggacctccccgacgtggcgtggaacgcgaccctggaggcgttcgcggagagcgtggtggcgagcgccgccgccggcggcgcgtgcgatctccggcacacgtcgggcagcggctacggcgagaacctctactggggccccgccgggaaggcgtggtcggcggcggacgcggttggcttgtggatggaggagaaggcgtcctacgtgtacagcagcaacacctgcaccaaaggggcgctgctcgactgcggccactacacgcagatcgtgtggcggagcacgacgtcgatcggctgcggccgcgccgtctgcaacaacggcgatgtcctcatcagctgcaactatttcccgcccggcaacgtccccaacgagcgcccgtactag

SEQ ID NO: 5784 - DNA, 276 bp, Oryza sativa
  Clone ID: PAT_MRT4530_12537C.1
atgctgtcctcatcatcctccttgcttccgtggcagtcccgagctcgggggctggcggatctagcccccgccaccgtgtgcctcctcctacacctcgcaggagaggagaggaaaggaagggtggagatgaacaccttgccagacctcctcgtcgtcggacctccttgccacgaacaatttgaccacctgccagccagcgacgtggcaaagggagtggcggcggaggccagtggcggggcggctaacagtagcaaaggggagggtgacgaggtctag

SEQ ID NO: 5785 - DNA, 1809 bp, Oryza sativa
  Clone ID: PAT_MRT4530_12538C.1
atgcccttcaaaacctcgaaaaagggttggcacgcaaattggttttatgtgcaaaatcctgaaccagcacttcccgagtactcctgtcttcctccagtatatcaagacacctggaactcgcttccaatgggagatgaggctgcccaagcactttctctgatggaccgcatgctgaagctcaaagagcagggtctgcaaggggaacaaatcacccggcattttatcaagagccggctggcaccgattaaagagagatctcgcacagccttcgaatttgatggcaagcatgatcccaaccgtgaagatccagaatctcttgagtttaaaatcatgaaggagagaatgtacaaaatcttgtcaaatgctatcgtagtcaactattcacacttgttgccagtggtgccatataatgctttcaaccctcctccaccggctggtcaggctagtggagggccaaaaatccggtctgatgctcaaccaaacacctcgaagccgactaaccagtcagactctcataagaggaaattagttctgagtgacgatgagggtgacaatgttgaaaaggctggcaacaaaggggtgactgggaaacagccaagacaagctaacccgaagaagaaaacatccagtcgtcccataccaaaaatcaggaagtcatccaggaagccatctgatatcgatccttctggaaaagactctgaaccgactggcgcggagactggtcctgcgacagaaaccgggccgactgccgaagatcgcccgagtagtaatcaaccagcaacggacaatgtagaggctagcaacgagcccccaactggaaaccagtcggccgaagctgaagtcggcgctgaccaggagcccccgactggaaaccagtcgggcccaatgattggtgacgaagaagaggtccttcggatacggtcagctgaagattcttgcccacccatcttagttaaatggtgggatgatgaaatgcggttacaagggattgtgataaataaacagaaggaagatgagaaagtttctttgctgacaaagacactcaatcaggccactcgtcttagaatccatcttaggaatgaagcaaaaactgcaacccttgagaaactggtcccccaccttggaaccctggaaacaaccatagcccaactacgtgaagccaaggagcttgccagaaaaactgagcatgatcttagggaccgaatcgccgagctccaagattccaactttgagctgagcggttcatccaaagtgcaagctgccaagatatctgagctagaaaagcgaatcaaagctctggaaaaagacaagggtgaattgaccaaacaaagggactcggctcggaaagacgtcgaagatagcaaaatcaaatctcaagctcaattcgacgtcttggtcaacaaaattaagaagctcgaaggagctagggatgaagtcgccaatgccgctacaccactcatcaaagccatgtttttcaataacaatggtccgagttcatttgatgctgttgaaatcttcgacaagctgagagctgctctggatacatattttaagaacatcaaggaagctggaagtatgggggcgagcatggcattggcaatgaccaagtcattgtacccgaagattgatattgatgctgtcgacggctttgcagacgggacaagtgaagaagacacccttgacctcatcaatgatgcgcaaaaggctgctgacaagatagccgctgatgtagttgagaggtttcaggacaacaatctcaggccgactgggtctgataattctgatgatgaaaaaactgagtctgattga

SEQ ID NO: 5786 - DNA, 375 bp, Oryza sativa
  Clone ID: PAT_MRT4530_12539C.1
atgcagtcggtcgaaaactcgtgcttttattccttgaagtaccataccgttggtgcgttcgacttgtccattgctcataggatgcactatggaggcataataaattttgatgccaaagtcttcacagaaatgtttaaatactccgccagtgaattgagtgccgttgtcagtgatgatccgattaggtaccccaaaccaatgcacaatgttgatgaaaaaatctccagccttgtctgttgtgattgtgatgacgggtttggcttcgatccacttggagaatttgtcaacagctacaaagagatgagtgtaaccaccgatagcctttttgaacgggccaaccatgtcgagcccccaaaccgcgaacggccaggataa

SEQ ID NO: 5787 - DNA, 528 bp, Oryza sativa
  Clone ID: PAT_MRT4530_1253C.1
atgccgttcggtggcccagctcgtatgagccgggagtccccggttcagcggtttttcctgaaaaccatccggttcagccggttcacaccgggatctatcgatgaacgtttcttgaagcaaaccgaactgggaaggtccctggttccggtttctgtttttaataaacattgcgacgcggatgagaccgccggcctccgtctccgccgccgccgggcgccgctcaccgcgccggcttcctcccccttcgccgcttgccgtgccggcatccgtctccaccgctgccggacgcgggagctgtggatccgctgccgccggcgcctctcgggcctggtgggggcgtgcagcgcagcatccggagcagccaccggcgacgtggatcgaagcgcaagaagcaccggcgagagagagctccgacgagtcctcctcctcctccttctccggcagcaggtcagggcgcagatcccctcccagcagcgcgcctgcttcctacatctcgcgagctccgtccatcgagaggctgctcgatga

SEQ ID NO: 5788 - DNA, 452 bp, Oryza sativa
  Clone ID: PAT_MRT4530_12540C.1
atgaatactaactttactatatatccaagtcatattgattatgatgctagcttatctaggaaatgcaatggtgtgggtataatgatcgtgtatacgatgactttatatcatgatgatgatattagagtagtatttggtaatttaagcgtagtgtttagattactagatgtcattatttggggttatatgttgcggaagcgaagtgggtcactgatggtgacagcttaatacgggtattcctccgcgcgtgtatatagtcctaagttactttcctggggagggtactcctccgtatttagccccggttggatggtcatgacggattgtcgtaagaaactcggcaatcaggggtggcttctcgaaacaccaggagggcattggaaagagggtattaggtaagtaatcatataactaggatgtattcacagtcatctttatatgtattcagttgt

SEQ ID NO: 5789 - DNA, 744 bp, Oryza sativa
  Clone ID: PAT_MRT4530_12541C.1
atgactgagtggcactggaaagtctacaacaataagagcgagggctatgacggtccagagaaaaagaagaggaaggtcagctgcaccagggcctcagtgcaggacatgggggcaaaaagttggaggaagggaggtgacccgcgtccgcaccaattccatggggtgcggagaagaggcacggaacgccggcagtttcgggagaggtgcctgcaggttaaaggtgagccccacaggtgggctcttcctgttggcgacacgaaagaaggagggaccggggaccggcgcatccgcctcgccgcgcacactggcacactgccattcggttctacgaccagccccgcaaggtcgtcgactggctcatgtgcaacgccaaggccgccatcgacgagctccccgatcgactgcgctgaggccccaccaccacccgacgtggcgtcgacggagcagccagaggccaccgagcaggcgacctcgacgtcctacggattcggcaacaccggcagcgccatgaccagctccgcgtccgctgctggctcattccttccacattcgctgggcgcagatcgagtctctgacaacgtcaagtccctgttcccctcctcgtccacagccagcggcgccgcctccgccggacacgacgagtgcaggggatccccgccggacctcctatcgcgcacgacaagcaaccagcagctgcaggagctatgcctcaccctacttgtcgaaactagatttcggcaataa

SEQ ID NO: 5790 - DNA, 435 bp, Oryza sativa
  Clone ID: PAT_MRT4530_12542C.1
atgtggagtcgaatttggaaggagtccaaatttggtatggaggctgaggcgacttcggagcagtcagatcgggcaatctacatcggtcagaccggcggcacaggcgcgcggcacaaggcgggggagggggtgccggctgctggctcggcacggctcaagctggccggccatggcgtggcggcgacggcgcacgaccgccggcaacgacaagcggcggcgcgggaggcggcgcggacggcgcgaaaggtggcggcgtcggctgaatgcgacggcgcacacgcggagggtggcggcgctcatgggagggaggaaaggaagaaggagaggggatccctcaccgaggcgatgacggcgatcggcgcgggaagagacgagcggcggcggcggttcggagaacggtggacaaggtcaggcacaacctgggaaaggcgatga

SEQ ID NO: 5791 - DNA, 872 bp, Oryza sativa
  Clone ID: PAT_MRT4530_12543C.1
atggaagattcaaggtctagaactattccttcatatcattctttggggatggaatccttaactacatatctgttgaaaatcaaactaggtgagggatcagaaataagctagtgtggaatatgattggtttatgtcagtaaggtggtagactcaaatgcaatgttctgcaaagactttgttggtcatattatgaagttatatccatggagggctaaatgaaactgttatagttggctatgtgcatatggttcattgaagttctcatcatgtcacaactaactaactaggatatgatggaaatgattgaaaagtttgttgataccaaggtgattccattgattatccgtttgcatggtattaatgaaaatgttgatgagttcgatcaaccacactcttgttaaagtaagcgtagaagtgcttgatactcctcttttgagaacctcatctcaagtgaatttcagccaacctagcagcagcactaaccttctcatgcccttgtgccatccaacacatacttagaaaacccttatcctatggctaaacatgttggtgttgatgagcaaggcatgtacttagatgatggtgatgaggttgcagcatgttgtcatgctgagaaaactagacttcaaggggttgtcagtgaagaatccaagtatgaatcttaggatggacgtacatgaggataaatctcaggatggacttgaggatgaatctcaggatgattgtgtggatgaatcgatggtatcagatggaataccataacatcttcctacagcaacttatgataaaaacgatctaccaatgatagtagaaaacatatatcctaagatgaatgaatttagattgaaaatagtacaacacgcaatgaaaag

SEQ ID NO: 5792 - DNA, 957 bp, Oryza sativa
  Clone ID: PAT_MRT4530_12544C.1
atggagctcttcgtctccaccgtcgcctccgcgcgcgccaccgcccccttatgcttcgcctcctccttccaccaccgccgcgctgctcctcccgccgtcgccgccgccgccaccctccgccgcagcaaccgccacctcccgactcgaggatggcggtgcgcgagcgcggcggcgccggacccggtgccatcggaggagcccgcgtcggcgtcggcgtccaccgtcgtcgtcacggaggacaagcccgatccgccgccggcggaggagaagagcgaggaggtcgcggcggtctctaatggcgggtctctggagaccgtggcggcggcgccggtgtcgtcgggggcagccgaggaggacggcggcttggatgacatcctcagcaagctggacatccaagtgacaccaactcttgtcctctatggatccggtgctttggttgtcctatgggttctatcttcagttgtttctgcaatcgattccattcccttggttccaaaagttcttgaactcataggaactggttactcaatttggttcacttcacggtacctcctcttcaaggaaagcagggacaaactgtttgcgaaattcgaagatctgaaagagaggattatttgagctcacgatgaatgatcctatggtgtatgttaggcttcgcagccaacttattattaggtcttcttttttctattactgaaagggaaaaaagttgtgtatgtaagccacgtttctttcgcttcaaatatgatcagacatccatagatttttgtttgttagagcggagcttgctcaagtctttctggtttttttaccacttgatccgatgtatatactccatactgaaagtgccgccaactgtgaagctgtgtaccttggatacataataatatatcaaatgggtcgaccttcatatttggtaaattgcttcagcaaaaaaaaaaaaaaaaaaaaaaaaaa

SEQ ID NO: 5793 - DNA, 932 bp, Oryza sativa
  Clone ID: PAT_MRT4530_12545C.1
ttttttttttttttttttttaacagaaataagatatgattcaaccaaattaaggggatcgacggtagttaccacgcatagttaatcagagtagtatagtcatcatctaacagatcgatcagcataacggccgtagacttggttaattataatagtagtagtaatcgtagtaatcatcctcttcactgggcggcagcttgagcgtcctgatcctcgcgcacttggcaagcagctgggcgtcgtcgtcgacacacaaatcccagcagctgcacacatcgagaagctccaggcgagggcagccatcgacgatggccgtgagctcgtcgttgctgacgccgatgccctggacagtgagccgccgcaggtggcgcagctccgccaccgcgagcgcgagccgcggcagcgggggacggcgatggccgccgctgctgaggacgatctcctctaggagagggcacttcctcgtcagctcggcgaatccttccgtggacatcctggtttcgtcggagcaccaaacggaaataaccttcagagaaggcgacctgtctccaatatactcgagcagctcatcgctaacaaaatcctcccccttgaacacctcgagccggccgccggagcggtcgacggcgaccttcgccatggcgcacatcaggtccctgtcctgcccgaggtggaggcaccggaccgcgccgcgcagcatgtccacggctcgccacagctcgggcaccctcgccgcgtcgagccacgagcggcacgcgaggcccgcgccggcgaggacctcgacggcgcccaccttggcgaacaccaccgacagcacgtccgccggcagctccgaccagtccctccccgccggcgccgtcgtctccggcgccggcaacggcggcaggaggaggacatccattgttgttattcgttggtggctttgctgatggt

SEQ ID NO: 5794 - DNA, 473 bp, Oryza sativa
  Clone ID: PAT_MRT4530_12546C.1
aaatgcaatgggcattctattcaaaacctggagccatctttttgttggttttatcaacacgatcttccaactatgcaataatacataaggtgccctcctaactctccaaagtggaaaaacatacaaggtacccttccgaaaaatatattgacgaccaatcagagagaacaaaacaggacaggggaacacctccagccatccaaatatttacagtcacttgtgtgcgtgttactcactcccgaatcaagtgtctggtgtattcatttcgctggatacccaaccaggtacaacagcagcaactcgctcgcccgttgcgcatacccccgcaagcagctgcaggcctcaatttccggtgctttcaacagctttcaactcgggcaggtaggcaggcgggcagacaatcagatcactggaaaacaatctcgctggaagaaagaaacgccgggactgttcctggcgctcgctcactcggt

SEQ ID NO: 5795 - DNA, 186 bp, Oryza sativa
  Clone ID: PAT_MRT4530_12547C.1
atggcgccgccgccgcccagccagtccgacgccgccaccttgccgtgccgcccacgccgtcgccttgccgtcactgccaagaaaccaccatcgacgtcatccgccacctcacgccgccgacccaccaaaaagctgtcgtgggaactttacgccttccatggatgtaggatcaaggaggccgactag

SEQ ID NO: 5796 - DNA, 264 bp, Oryza sativa
  Clone ID: PAT_MRT4530_12548C.1
atgggccgtgggccttcttcttctcttgggccgcctcaaagcccaatgcctcgctcatcaagcacacgcttcctccggcggatcctgcgggcgctgaactcgccggagctgccgctggggcacgcggcgcggctggcgaagaaggcggagtgccgcgccatcttcgtcttcggcgccgaggagaggtcgctccacaacatccgcgacctcgtcgacgccgcgcgccacaccctcggcctcctccaccgcggccgcctcccttga

SEQ ID NO: 5797 - DNA, 210 bp, Oryza sativa
  Clone ID: PAT_MRT4530_12549C.1
atggtgagggtgatgcaaaaccattgcaatatgaagcgctgcaatgacatcatggacatgcccacgaggaggggactctctgagctgcttgaaggtgaatcagagatgcattgcgatcggctggtgcaccggacagagctgaatgaaattctccagattgttgggtatacaataccgttggggagaaaattgtataatttccagaagtaa

SEQ ID NO: 5798 - DNA, 244 bp, Oryza sativa
  unsure (1)..(244): unsure at all n locations
  Clone ID: PAT_MRT4530_1254C.1
naggtgccgagagcccaanacgcgatgggggaggagactgcggcagcagcgacacagtcacgcgcatcatggaaaatggctccgcacgggtggcaatgccactcaccatgccgtgcctcccttcctcccctccgtcgctgtccaagctagcaatcggatatctgtgcagcggcaaggtcaaaggcggtgggggctgcttaccagggggatcctctagagtcgacctgcaggcatgcaagcttga

SEQ ID NO: 5799 - DNA, 344 bp, Oryza sativa
  Clone ID: PAT_MRT4530_12550C.1
gttgatcctatattgttaggggaggcagggaaaagggggggatctccacaaatagtccggcccattatttgcaaggggggcggaaaactccttcccaggaaccattagtacccgcaataggaaggtccctacaaaacaaaagccaccaattgaagaccgaggccccccacttagggtttgttacccaaaaaaagcccgaacacaaggagattttcaaggcaaatgggcccccccggggggcccatgaaaggcgggaggatcccccaactggggggacacaaaaattttaaagtgcccccggagagaatacggggccccccgctggcaagggcctatttggcccc

SEQ ID NO: 5800 - DNA, 496 bp, Oryza sativa
  Clone ID: PAT_MRT4530_12551C.1
tcctcattcctctccacttcttccttccgtgccggttcgacccgacagcagctttggcgtgtggaggtgggaggcggcgtgcagcggcgggagggcggcggcctcaggtgaaggcggcagcggcgggagggtggcggcgggatgggaggccgggcagcctccggtgaaggcggcagcggcggctgcaccctcccctccgccagatccagtgggagggaaggcggtgacccgacaacggtgcccgctggtggcggtggtggcggcgtcaacagtggtggtggagactggcgcgggctaggtggctgccggctgtaaccgccggattccggcgatggcggtggcgttgctggtggaagaggctggcacgggcgatgtggctaccggccgacatgaaattttctttttttgagatcttgagttctttctctcttttatttctcttcatgtcccatttgttgagttcttgagactttgtacatgtagtggtttgctgttc

SEQ ID NO: 5801 - DNA, 276 bp, Oryza sativa
  Clone ID: PAT_MRT4530_12552C.1
atggaggacacaccaatcaaaaatagcatgccaatcgtagagatgcatgaggtacctgctgaggctgaacccacagttgaggacatgcaggaggcgctcttccagaagcagaaggaagaacagctccagctgcagctgtttcaacaggaagaggaactggaagaccaacagcctcaggtggttcgctctctttcatttaatttgatgcattcatttcttgatgatcatccaattctcatgcttcatcttaccatcaactggttgctgggggtctaa

SEQ ID NO: 5802 - DNA, 278 bp, Oryza sativa
  Clone ID: PAT_MRT4530_12553C.1
gtcattgcagcacatgcacaacgtctttcattaaactctcctgaggtgggtctcattgatccattcatacacgatgagctatagcttaataaacagaagcctacacaatcatatatggaatcagctctactgtcaagattactcatgcatgctgaatgggaggaagtagccgctcgcgctgtttagcttacacacgaacacacctcactttacgaagaattgaaacatctataggagaagtgcaaattcttgacctgagcaaatacaactatacatga

SEQ ID NO: 5803 - DNA, 386 bp, Oryza sativa
  Clone ID: PAT_MRT4530_12554C.1
gtgctgcccaccttctttatcgttctgctttttttttctttctttctctggacaattgtatccagtcattcttttctacgcgaatcgatttcgctcacattcattgtcactctcactctctagttgttcctacgtggactatctacactctttctcccgacattgattgtccttgagattcttatcaactttcgctcaatatgcatggaatgaacaagctcgctctggcactggctgccgctgtggctgctgtcggtgaagccaaccttcacgatatgcatgctcgtcacccccatccctctggtctgccccagaccctcactcagacccgttgttcccgagcctgtcccaactccttctgagacttccttcgagaccccctttga

SEQ ID NO: 5804 - DNA, 630 bp, Oryza sativa
  Clone ID: PAT_MRT4530_12555C.1
ctactctgggtcagctcttaatcccttcaacttccgtcggttggacgccaccggaagccaatccctgtttggtgttttacccccaattttgtcagattttttggagcgaaaccacgagctgtttgaagtgttcggcttcggaatctctttcttggagttctaggaatggggttttgatacaaagattgaagcctttttgttagcgttggtgcaaagattgtattgtattgttttttttttctgcgatgggtggaggcgtcacggagcggctcccggagggcagcagcgagccgctgctcccgacgaagcgggagggcggcggcggcggcgagttcgccggcgcggtgttcaacctgtcgacgaccatcgtcggggccggaatcatggcgctgccggccacgatgaaggtgctggggctcgccccggggctcgtcgcgatcttgctcgccgcgctcctcaccgacgcctccatcgagctgctcgtccggtccagccgcgccgccggcgcgccgtcgtacggcgccgtcatgggggacgcgttcgggtggtgggggaggcggctgctccaggtctgcgtcgtcgtcaacaacatcggcgtcatgatcgtctacatgatcatcatcggtgatg

SEQ ID NO: 5805 - DNA, 291 bp, Oryza sativa
  unsure (1)..(291): unsure at all n locations
  Clone ID: PAT_MRT4530_12556C.1
tcgnnatttcnccgatttttttttctagcgataaattaattaatgctcctctcgccgcgccgggaaagcatttaaatctccccctcctccgcgcggttctcccaacccaaaccctaccacgattcctccccactcccaatccaatcgncgnggcggaggcggcgggcgcgcgtgcacaccaggtgttcgacggaaggcctcgncgggtggggggcgaagatntacgtggtgaagcgggacgggcggcangagacggtgcanttcgacaagatcacgncgnggctnaagaag

SEQ ID NO: 5806 - DNA, 1651 bp, Oryza sativa
  Clone ID: PAT_MRT4530_12557C.1
cgcttgcttaacgttcacccacgccacgccgccaccgcctcgcttttccttctccaccatttctccttgtctcccaccaccacttccccccttctccgatccctcctcccatggacgccgccaaggataccaccgccgccgccgccgaccaaaaccctacccccaaccctcccaccgccgcagctccacccgatgactccgcggcggcggcggcggcggggagacggcccttcaccagcctcacccaggaggaggccgacctcgccctcgcccgcgtcctccaggagcaggagcgggcgtacatgatgctcagcgcgcaccacggcggcgactacgcggcctccgatggtgggagctacgagtttgacgaggaaggggaggggagcgattttgagggcgaggatggggacggggacggcgacggggaggcgctggatgaggacgaggaggtggccgacgcagacgcagacgccgccggtgacccggctgagttggaccccgcgcggtacgaggacgacgaggccttcgcgcgggcgctgcaggacgccgaggagcgcgaggtcgccggccgcctcatggcgctcgcgggcctcagtgattggcgagtgatggaccatgatgatgacgatgttgatgatgatgatgatgaaaatgatgatgatgatgatgatgatgaagatgaagacggggatgatccacaggatgcatgggaagatgttgatccagatgaatattcttatgaggagctggttgcattgggtgaagtagttggtacggaaagcagaggcctctctgctgatacacttgcttcattaccttcaataacttatcgagcacaagataagcaccctctcaacatggcacgatctgcttcttgcccaccattcctctcttccttccttctcatgatttctgcgccttctgtggggatcgccttcgcgcccaagccgccaccggcagcggcggttgggtcgtaccgggcaaggaaggtccggtgcgcggtggccgtggctcctgcgccggcgccggcggggacgctgtacgacgtgctggggctgcgtgccggcgccacggtgcgggagatcaaggcggcgtaccggcgcctcgcgcgggagcggcaccccgacgtggccgccagcgccggggccgacgacttcgtcaggctccacgacgcctacgccacgctctccgaccccgacagccgcgcgcgctacgaccgcgacgtcgtcgccgtcgcctccatggcgcgcggcgcgcaccaccggacgatggcggctcccgccgccgcgccgcgctggtacggccgccgcccacgccgcacctgggagaccgaccagtgctggtagcgcacacacgcgatttctgtctcttcacggccatggccgctcacctcacaaatttttagttacggtgatcacccatgcctgcctatgtaaaaaaaaagtaaaatcttcctcctcgcatcgatcccttgtgtatgaatgtaaaatgcaaaattgagactaggtagcgtattaggaatccagacttaacccaatcatcatcatgtactgtgaatatgtacttactactgtattgtactagcgtgttttgacgcgaggtttgaaggaaaatgcatgccctgcctctgcttaataaaaaaaaaaaaaaa

SEQ ID NO: 5807 - DNA, 354 bp, Oryza sativa
  Clone ID: PAT_MRT4530_12558C.1
aaaaaccaacggaagggcctttatggggaccgaggcccccaaaaaagcaggcaaaaatttttatcccgggacgggggaaaaggcctttctgggccccaacaagcccagggattgcaaagggggctggtccataacaaaaacagccaggaagggaagcatcagtttaaaaatcccccgggcggccggtttggcaggcctgggccacccccaccaaaacttaagaaaaggggggggctaatcttcaacgggggggggaaagaccctgttggcaggggccccctgggggggggggcccccaacccccagggaaaaaaatgtaaaacccgggaaaaacccaactttgcccccaaaggg

SEQ ID NO: 5808 - DNA, 426 bp, Oryza sativa
  Clone ID: PAT_MRT4530_12559C.1
gggtatcgcaagctggtattggtatacttaaattccatgcagctttgtaacatactaacatcataataaaatagaaataacaaacaatactacagcggtacagacaataccatgcaaataccaatcttgtaagctgaaatattgggacagaaatatgcaaatttggttttactaggatctaaatataactattatggaggaacagaattgtgccatcaatatatcaactagataaacaaagaagtacaaaaaagaaaggaagtttaagttacaaagaaacctaagtaagttattagagaagtgcaatctcacagcgggatatgattcaagagctccatctccagctaaaaacgaaacatgattgaaaccattttctctcataaacttttctcctagctgcaatacaataaaataactaggtaaatg

SEQ ID NO: 5809 - DNA, 261 bp, Oryza sativa
  Clone ID: PAT_MRT4530_1255C.1
aggggggagcacggtagaacagcatacactcacagattttaatacaatgtgagacgctgacggtggaacgagtaatacatgaccacgcgggtcattgccacatgaaccatgacattcagtgccctacaacgccaagcagtgcacccaactaggagcgctattcgttatgggcccagagagaaagcgaaacatcacgatgggaagagaacctgaataatactatgcgccagaagatcatgatcagatgggctgcttatgacg

SEQ ID NO: 5810 - DNA, 317 bp, Oryza sativa
  Clone ID: PAT_MRT4530_12560C.1
ggaagggaaaaaacaagctttgggccccttttttccatcgggcagggaaaagcggattttttattaaccacgggtttggaaaaggaaaaacccccggggtttccgggacaagaattttggggggggggttttttaaaaaaggggtttccccatttttgaaaaagggccgggggttttttgggctttaaggcttaaatccaaaatttaaagggtttttggggggggttttaggtctgaaggaaggtcgggtttttggcaccaaggaaaagcctttgcccccaaagggggggatttttcccaacttgggggttttgggg

SEQ ID NO: 5811 - DNA, 469 bp, Oryza sativa
  Clone ID: PAT_MRT4530_12561C.1
ataaacaacacatcaaacatgggtatgggcacacaaacagctgcaccaagacctatgttcttcgctgcccatgtaggagtacttagcacggtaaagatctctccgtgcccatcaaccattaggcctaataggtctcgggcctgcagggttcgggtggcggagagcctgagtccgtctattgcttccggtgatcctaatgctcctgaaaagttgttctacttcgagccctcggtctgggtgaacttctttatcaaccacaacccgcgacctctccagaggtcagacgaatggatgaggcataaggccgataaactcaaagagaatgttcgcaaactgatttggacttccaatgacgtggttgcaaagatgaacttagtggatgcaatccaacgcctcggaattggtcacctctttgaagatgagataagctgcattctaagtgacatacacaaaagtgaatttactagct

SEQ ID NO: 5812 - DNA, 2831 bp, Oryza sativa
  unsure (1)..(2831): unsure at all n locations
  Clone ID: PAT_MRT4530_12562C.1
atgtcctcctccgcggcgtcaaggctgtcccacatcgtcgccgccgccggtggtgcggccggggagtccagcgagccgccggcggcggcggctgcagcgtccggtcttgcccaagaggacgatgtgagtggaatcgcggggaggctgtgggttgagcggattttgagtggttttgatggagacgagggaaggacgcggttcaactaacagctacaatgtacctggcgctagccccttactccaaaagaaatacaagtcatcgttgttgcatcacggcctcccgtgctatgattctaggcaagcatgcacaagaatttatgcctggcgcgccgagcaatgtcaccattgtcggatctcgcaaagcctgaagagagacgtgctggggtgttgatagatgattagtttaatccttgacgcagaatgtctttgtcgactgagatagcaatgcaagatctgatggatggtgggaaattgggtccagagaaagtgctccatggatagcctgaaggggggaggattaattttgtcacctggtcattagacggacgccatttatcattcagcgttagagttgatgaggaggacaacacaagcggcaagctacgtttgtggattgcagatgtggaatctggagaagcaagaccactttttaaatctcctgagatatacttaaatgctatttttgacagctttgtatgggttaacaattctactttgcttgtctgcactatccctctgtcacgtggagctccaccgcagaagccctcagttccatctggtccgaaaattcagtccaatgagacatcaaatgtggtccaagtgagaactttccaggatcttttgaaagattaatatgatgccgctctgtttaatcattaggcatccccgcagcttgtattggtctctgtttgtggaactggaaagccgattagcccgcctgctgtatatacatctattgacccatcaccagatgacaaatacttaatgatttcttctattcaccgtccatattcctatattgtaccttgtggaaggtttccgaagaaagttgaattcgaggggttctcatcaatgcaaagatcgcttctgtgatgaagtggtttcggttggctgtttgtgagctcatcattggacagtttgtacaagcctgaaaggatcataaatgcagttttgtgcttgaaccagaactggttcttcttgctgcaagtggcaaggagtcactacattatggagtattcgattggatttttgctgaaggttgccattccagtgatggaaaggccttattgatgatggatattgcaccctgattgattttactcaattgttttctgttggtatagaaaccagttaaatctaaaaatattctcacctaataatggctctgtagtctgtccaagtatatataaactagtgcctactaggactatagacgatggatccacttgtcttgaacttgttagtcagctttatgcttgcatcagtatgcagtgtgctattgtttgacagcaacataattaataatggatcataccatattgacaatacctacatcttgctgaatgggatgggtgccacaccagaaggaaatgttccgttccttgatttgtttgatataaatactggaagtaaagagaggatatggcaaagtgacaaggaaaagtactatgaaactgttgttgcacttatgtcggacaaaactgatggggaactgccacttgagaagttaaagatacttacatcaaaagaatcaaaaacagaaaacacacagtattacctgcaaatttggccagaaaagaagcaagttcagatcacagattttccccatccatatcctcagcttgcttcattgtataaggagatgataagataccaacggaaggatggggttcaactaacagctacattgtacctgcccccaggctatgatccttcacaggatggacctttgccatgtttagtttggtcctaccctggtccaaccatcccgattattggagaaggcgatgaagaggccaatgacaggtacgtggagcagctagtaactagtgctgaggctgcagctgaggaagttgttaggagaggggtggctcaccctgataaaattgctgttggtggtcattcatatggtgcattcatgactgcaaaccttttagctcatgctcctcaccttttctgctgtgggattgctcgttctggagcttacaacaggacactgacaccatttgggtttcagaatgaggacagaactctatgggaggcgactaacacctatgtcgagatgagccctttcatgtcggccaacaagatcaagaaaccaattttgcttattcatggagagcaggacaacaactctggaacacttacgatgcagtcagaccgattcttcaatgccttgaaaggccatggcgcactatctcgtttggtgatactcccttttgaaagccatgggtattctgcgagggagagcatcatgcatgttctgtgggagactgatagatggctgcagaagtactgcttaagcggtagtagtaaaaccgattcagattcagtagctgacaccgaaaacaagacagtgtccgctagtggtggtggagcaccatgtgaaggtcctgaggccgaggggttctcatcaatgcaaagatcgcttctgtggatagctattgaagatgggaaaatgagttttcacgatataagttaactgtttgtgagctcatcattggacagtttgtacaagcctgaaaggatcataaatgcagntttgtgcttgaaccagaactggttcttcttgctgncagtggcagggagtcactacattatggagtattcga

SEQ ID NO: 5813 - DNA, 1212 bp, Oryza sativa
  Clone ID: PAT_MRT4530_12563C.1
tttcggaaggatggggttcaactaacagctacattgtacctgcccccaggctatgatccttcacaggatggacctttgccatgtttagattggtcctaccctggtgagtttaaaagcaaggatgctgctggacaagtgcgtggctcacctaatgagtttccagggattggtgctacatccccactgctttggttggctagagggcttgctattttatcaggttcaaccatcccgattattggagaaggcgatgaagaggccaatgacaggtacgtggagcagctagtaactagtgctgaggctgcagttgaggaagttgttaggagagggattgagctttattttcactgttctttaggtggctcaccctgataaaattgctgttggtggtcattcatatggtgcattcatgactgcaaaccttttagctcatgctcctcaccttttctgctgtgggattgctcgttctggagcttacaacaggacactgacaccatttgggtttcagaatgaggacagaactctatgggaggcgactaacacctatgtcgagatgagccctttcatgtcggccacaagatcaagaaaccaattttgcttattcatggagagcaggacaacaactctggaacacttacgatgcagtcagaccgattcttcaatgccttgaaaggccatggcgcactatctcgtttggtgatactcccttttgaaagccatgggtattctgcgagggagagcatcatgcatgttctgtgggagactgatagatggctgcagaagtactgcttaagcggtagtagtaaaaccgattcagattcagtagctgacaccgaaaacaagacagtgtccgctagtggtggtggagcaccatgtgaaggtcctgaggccgaggggttctcatcaatgcaaagatcgcttctgtgatgaagtggtttcggttggctgtttgtgagctcatcattggacagtttgtacaagcctgaaaggatcataaatgcagttttgtgcttgaaccagaactggttcttcttgctgcaagtggcaaggagtcactacattatggagtattcgattggatttttgctgaaggttgccattccagtgatggaaaggccttattgatgatggatattgcaccctgattgattttactcaattgttttctgttggtatagaaaccagttaaatctaaaaatattctcacctaat

SEQ ID NO: 5814 - DNA, 467 bp, Oryza sativa
  unsure (1)..(467): unsure at all n locations
  Clone ID: PAT_MRT4530_12564C.1
tcgccgtcatacacccacgcaccacacaccgtgctaactctccaaccacagtacggttctccaattaaattgaagaagctctagtgatctcggtcgaggagaacataaagctaccccgtacatgctgaaatctaaatctatatgaataaatttcataaaactacatgtattttaatcaaattatcncaaactatagatttaacncaatatttattagagaactacaaatttagggccaagtacaaaactatagatttaatactagagttatcacaaaactacaggttttatagtttaaatctctgccactaatgttacgttagagttataaatgttgcaagttttgtacttaacatggtgccaacaatgtagttttgtgataattttattactaaatatgtactccctccatcctaaaataagcgcacccatgagttttttgtgtctaaaaaaaaaaaaaaaaaaaa

SEQ ID NO: 5815 - DNA, 1607 bp, Oryza sativa
  Clone ID: PAT_MRT4530_12565C.1
gacggaagtattagtatatatatcagatacatgtaaaggattcatcccaagctttgaccgaacaaaattttccgtttcatcatgagttcaccgtttcttacttccaaagagcatagctcacgacaagaaacacaacacaaaaggtttgctcccaaagttgtggaagcaagcaacggagcaaacatttccgttcctcactagagctcataagctgaggttactagtataagacgacgaggcctttaagcagcagcatcgacttttcgagctttatttgccctttcatggccgtccgagtggcgaccacgcttcccaccgaagtgcctcccgcccctgttattcttccagtcccttcccctgttacttctattgtctctatattttccttgaccgccctttatcgcactccaataatccttctcagcttgaccggacacaggttccaaagtaacaagatggcccttcataatcaaaccaccttcatctgaaatagccgcaagtgcacgggccttttcagctgccttagaatcctcgaaccgaatgtatcctgaatcctcccctatgctgaagtccacataccgcactgtgccgaatttgccaaattcttctttaaaatcttcccttgaaattggatcatccgcattttctgaaggactttctcctttcttaacagattgagcagctgcctcttttgacttctcaacatcatctgacaagtcttccttgatatcactgttctcagggattttctcgtcatgccctgttcttgatttattggcatcatcagtttcaccctctttgtccccaccattttctgccatgccaccatcaatttgaattatcttcagcttgaaggccacaattagaccttttggatatccctcatcatgaccattcttagtaggttgtgacttctcataagcttctttcttagcctctctttcagtatcaaattctttctttggttttatttccagatctgcttctgcaaaaacaagagtattctttaatacagcatttgcttcctcttcttctgaaaattcgactaaagcagtgccgcagaagtgtcgtttgtcggcaatatgtcgaggtagcctcacactgttcaccttgccatactgagcaaagaaagactgaacatcttccagctttacattgtaaggaaatggtgatgcagcaattgtcctagagtccacttgctccatgatctcatccagtttcgacaactcaattgatctgccaactttcttcccatcctcggtgacacggagggccgaggaacgccgcagcacctcggcaacggcgagcaccgtctcctccggcatggtctcctgcttcacgtccaagtccaggcctaggtgcttcttcatccgcgagaaggagcagatgagtgccaagctcaccaggccatcctcgctctcctcgactgtcttccgcaggaagttgtcgcgggggaggttgctgtcgctgaagtagaactccacctggcggagaacctccttggctttggcctcgtcgagggggacggcggcggtggcggcggcggccatggctctagcgaatttgggggagaaggagttagggttttacgaggacagctcgaacgc

SEQ ID NO: 5816 - DNA, 552 bp, Oryza sativa
  Clone ID: PAT_MRT4530_12566C.1
atgcagatcctggtgatgcagcgtgcgacggcgaacaggcggcaggatggaggggaggggcggtgctgggttgggcgttggcggcggggtggacggggaggaatgcgtgcgacggcgacggcggtggcgttgatctggccgagggatggactcgagcggggaggggcggcggtgggtggggcgtcggcgataggcggggcatcaacagcggtgtctgtgggtgagaagggaggagatcaccggtggagaggcgcaggtggccagagggttgacgggatgggggcgctgtgcggcgaggttggcgtttggcggaggaagatcggggactcccgtcgatccggcggtgccgcaggtggaggtgccgccgtcggccggggagcggcagtagggggaaggggcgcgaggggtggatgcgcgagcggagggggtggttggcggctgaagggatggtggcaccgtgatgtgcggagcaaaagaggaggcgtggaaggaaacaaaccaattttctgcccggtgactacgcgtgtgcgcgatctccctcccaccgtgtga

SEQ ID NO: 5817 - DNA, 419 bp, Oryza sativa
  unsure (1)..(419): unsure at all n locations
  Clone ID: PAT_MRT4530_12567C.1
ccccncattactgcgcgtggaccaccgcggtcgcggacgctctataactagtggatcccccgggctgcacgaattcggcaccacgacaatcacccaaccacacgccccggtcttgtcaccggaaagagaaaaaatacaactcaaattcacgaacacgacgacaatgtgatggcgcacatcagcggcggcggcggcgcgggggctctctcgccgtgctcctcctcctcctcctcctcgcggcgctgctgctctccctctccctcctcgctcgcgtcacccgcccccacggttttcttcaccgaatctctattggaattgaatggaaatgtttgttgttggccacttccccctaaagacatgaatgcctgttttcctgccggtccggaaggaattaattgttcaaccnnccccncncntna

SEQ ID NO: 5818 - DNA, 567 bp, Oryza sativa
  unsure (1)..(567): unsure at all n locations
  Clone ID: PAT_MRT4530_12568C.1
attttaggcagcctctccgccatatatacaccacggaacccaaattatcatggctttctcgctatacggtggtggaggtggcgaagttggctagagtaaggctctacaagatgaggttgtgggtgagtgaggggagaaacagggaggaggcggaggaagtctttgtgattacgaggtgattgatgctacgacagcggttgatctaaaggcaatacaacaagagaaaagaaacatgttcctcactctcaaatgcattggagacaactggtcaccaacaatccatccatgctggcctggttgactagttcagtacttctgtcaggagattcgccatcatcatttgagtgagttcacctttactctatctaatcaccacaatcaagttaatttcgaggcagagccagatcatatattatcgacaaaaggatcagttaactcccaggtgtaaatgtgtaatcaaagtgtctttctagctaggatcctttntcaaaggtttctcgtgctagctgctgantagtcataacttcagaactganactattatgaaccatggtcttgntaagtcat

SEQ ID NO: 5819 - DNA, 986 bp, Oryza sativa
  Clone ID: PAT_MRT4530_12569C.1
aagctgtccgatcagaccagcggatggcaatggcatcctcgttgatccgcgcattggattgcacggctacgcccggaacacgtggtgctccagctccggtcgccccgcgtcgccgcgtcgctcgtgttcgactggcgccgcggtgccagtggaggcctctcaccgcgcgtgcacaggcggcggcgacgcagccggacccggaacaccaggcgcccgcgaatggggggccgtcggcgtttcccacgaccgcgctgaaggtgggcgccggcgtggcgctggcgctggctctgggtggcgcgtcgtggagggcgcgcggcgggagcgccggcccggtcctcatgcaacccgccgcggtgtgctccctcaacgtcgtcacggacagcgcgtcacgcgccaccgcggaacggagcgccgccgccgcggccaccatgaggacgagcgtggacgcgctctccgactcgctgttccggcgcgaggacgcgcccagggaccgcgccacactgatggacctcgtctttgagcaagtcaccaaggagcaaatcggcgacaggggaaagctgacgagcttgctgcagaaggagtggtcggcgtcgcgcgattccgagaggaagcttgacctgggcttgctgctcactgacgtactgatcaaccagagagaatggcagagggcaaaagaagtttgtcagcaattgactggccgataccaacgtgactcgaggccttacctgcacttggctgtcatcaacatgatgatggcagtggagaccatgctttctcctgaaacagccaatagtgacgacattgagaagatgtcaaagaatgccatggacgcgtggaaggaattcaagaccaagtatgagcatgccaaggggtcaactgattccagcacctgaccgaccagtattatgcttgctttcagacaaatctttctgttgagtgctgacaactcttgtgatgaatctgtcttacccacttagttgcttggt

SEQ ID NO: 5820 - DNA, 345 bp, Oryza sativa
  Clone ID: PAT_MRT4530_1256C.1
ccccctgaaaatttgggaattggacccgcaacacctcaaatggagaggaaaccctgggggttttcccctcagtttacaaaacaaatcccccggcgggggggctcaaaaccccccaaattcattaaaaggaaaaggggtatgggggacctgggccccaagggactggctaaacctaaccccagacgggggacccccgggccccaggtttttcaaaaacaagaggggtttgagggcgattcctcccaaaaatcgaggggacactggtggcaaaggggaccctaattttggcctaacaagctgggggcggatgaacttgggggccaaaaccattttgggggggggagg

SEQ ID NO: 5821 - DNA, 1140 bp, Oryza sativa
  Clone ID: PAT_MRT4530_12570C.1
atggacgagaagccgccagcgtcgccgtcttcggttagtccaggttctgttaaagagaagattcagcagctgggcttatctgatgttaatgagggcaacatcgtgaccattactccagacaagttgacacctgatcagaagaaggatttcgaagcaatgatgcagcaggcagggaatcagttcttgagctcattcatgcagacccgcaaggggacagtggtgcaaaagtacaaggtaaaagtagttgctgatgttcctgggaccggttcttctaaggatggagaggtgaaacaagccccagatggctcggctcaaccgagcaacaaaggtgctacagatgattctcaaggaaatcaaggtgataactctcagggagcacagggagttcaaggtgatggtgctcagggagttaaaggtgaaggacctaatcaagatggcaatgcagcacagttgcagtttaacaatttccaagatcaggttgactatgctgtacaccatgctctgatcaatcaatctaggatattaatcaatactttggcaaatatggtgaagtcaatggttgatggttcaatggccgagtatcaagctacaggaccagtctacttaccaggaggagtcttctcgaattatcggccattagtcatcaataatcaaccagttgtccagtcgatccctcttaatgcaccatcggctcagccgacggcaccatcaccagctcctacacctgccgcaccactttcggctctaggccaattagttaatccccgattgttggtgagagaacaaccacagcacagtggacagaatgtgaatcggctaacccaagaccaggttgcatctatgttcttacctcctcaacatgccattgatccaacccagcaacagccgattcagcaaacaccgccaaggcagcaggttgtgcagccgattcaacaaacatccccagtccaacaggttgtgcaaccaattcagcagacaccacaaagacggcaggttttgcagccggttcaacagacgccattaaggcaacaggtggttcagccgattcagcagcaaggctcaatgaatgcatcggctgggtttgcgatacctggttgccgcgcccggaaaaataccttttccagaacgctagtgtattag

SEQ ID NO: 5822 - DNA, 393 bp, Oryza sativa
  Clone ID: PAT_MRT4530_12571C.1
atggtcgttgctgaggcgttccttgagactgctgtggcacgggctcaaattggttgtattgaggaacaaactggggttgagccgatcctgcctgttggtattgaacttgcggtgatggcggctgatactgataattcaaattgcccccctgctgaacaaccagttgctttaatggcatctgctgaatcggctgcaaaacctgccgtctctgtggcgtctgctgaattggttccacaacctgttggactgggagtgtttgttgaatcggctgcacaacctgttggactgggggtgtttgttgaattggctgcacaacctgctgccttggcggtgtttgctgaattggctgttgctgggttagatcaatggcatgttgaggaggtaagaacatag

SEQ ID NO: 5823 - DNA, 314 bp, Oryza sativa
  unsure (1)..(314): unsure at all n locations
  Clone ID: PAT_MRT4530_12572C.1
gngaaagtaagaaagaaagaaaagaaaaaaaaaaggaaaatcgtgtctcgtctcgtctcgtcttcgtctcccncgnttcccgagcagattctcgaaaccctcgcggcctcgattccggcgatgncggagccaaccngcaagtngagangnagnnggagntggnggaggtgaggaggccgaagctgangtacttggagttcgtgcaggtngcgncagtcangcgacggtctacctcgcggggctcttcgcgctttccaaggaccacgncngcccgctccgncccnagcgtcnacgcgtagagtccnccgtcaagg

SEQ ID NO: 5824 - DNA, 471 bp, Oryza sativa
  Clone ID: PAT_MRT4530_12573C.1
atggttgttgctgaggcgttccttgagactgctgtgacatgggctcaaattggttgtattgaggaacaaactggggttgagctgatcccgcctgttgctattgaacttgcggtgacggcggctgatacttataattcaaattgcccccttgctgaccaccaggtatcgcaaacccagccgatgcattcactaagccttgctgctgaaccggctgaacaacttgttgccttaatggcatctattgaatcggctgcaaaacctgccgtctctgtggcgtctgctgaattggttgcacaacctgttggactgggggtgtttgttgaatcggctgcacaacctgctgccttggcggtgtttgctgaatcggctgttgctgggttggatcaatggtatgttgaggaggcaggagctggtaatggtgccatcggcttagccgatggtgcattaatggccgactggacaactggttga

SEQ ID NO: 5825 - DNA, 710 bp, Oryza sativa
  Clone ID: PAT_MRT4530_12574C.1
ccctcgcgttcgccggaggcgcctccgcctccacggccactataagagcgcggcggcggcggcggcgggggcggggggccatggcggggaagaaggaggaggaggaggctgttgtgtacaggggcgacaagctgatcctgcgggggctgcggttccatggcacccacggggtgaagccagaggagaagaagctgggccagaagttcgtcatcgacgtcgacgcctggatggatctcgccgccgccggggactccgacgacatctccgacaccgtcagctacaccgaaatctacaggatagccaagaatgtagtcgaaggcccgtcgcacaatctgttggaatcggtggctcagtcgattgcaaactcaaccctgctcaagttccctcagatttctgcagttcgagtgaaggttgagaaacctcatgttgctgttcagggagtcctcgactatttgggcgtggagatattcaggcagagaaaagcatgaacaacacctatacttgttcagaacctcattcgaacagatacgtacttagtgtacttgtcttatctttattgctcgttatcataccaatattattcactcagtatccatgtcaagaactagaaaattccctgtttaatttgcacgaagaggaatatatatgtaacgtagattgttgtggtactattaaataatactccctccgtttcaaaaaaaaaaaaaaaa

SEQ ID NO: 5826 - DNA, 320 bp, Oryza sativa
  Clone ID: PAT_MRT4530_12575C.1
acaacacatcaacattagcctatctgccagtgctgggctactcacgactcgtgcaagcaggcaaacacaatgtagttcaacgcctcttgtgcatttacaacaagattgataacctgcttgtacagctaatatcaacaccactcctgacaaaccaccgcgtctgtcctcatttcaacaataaatgctgctcctagatacaggggtttagcatatgggcaggggcgcgccgttacatttcttgatacacttaagcatcagctcaatgggccttcctcgtttggatgttaaaagccctttgttcagcttcttgccgggcgacc

SEQ ID NO: 5827 - DNA, 976 bp, Oryza sativa
  Clone ID: PAT_MRT4530_12576C.1
agacaactttcctgtcatgagtcgccaatatcatcaagtaattattgcatactttttttttttttttttgctgcaacttgcaaatatggcttttctcaacttaaaacaaatcatcacaaggtcatactgacgactgcaagccacgaatatcaggagaatgattactcagaataagtactgagatcacatttttttttttttttttttttttgaacaaggtaacattttattaaactgaacatggcttcagtgaagaagctcttattcttgctgtccaacaaaagccactgcaaaaacgcagttacatgactaagtgaggtagttgatgaactcgacagctgttgcaacagcgcctccggtgatggcgtccttgatgatcttgtctttgtggttgttgctggcagcagagatcagagcaccacttaaagcacctccaatcatagcattcttccagtcatggcgaccacgaatcctctccactccgtactccatgcccacatacaccccagcaacagtaccccaataggcaccctccttgcacattttcttcagcatatgctcaagcttgtgctttgaaacatcccctctgtggaggcagtcgaatgtgtcctcggcggcgaccttgcacgccccgacggcgccgatcttgaggaagccgtcgacggtgcggttgaggaaggggttccccatgtcgatggcgacgtcgatcctgggcgagcttatcgaccccgagaacccaccgcgaggcattctcctcctccaatccaatccaacgtatgtactacctcgacttctcgatcgatgaatccactcctcctctctcttgttggtgatggtgagggagaagaagaagaagaagaaggagaagaaggggccgggggcagcggctgacaaggcacgaaagcaaagcaaagccaaatcccaatgtcgcggcccacgcgtcagtcaccgccccggacgcggggcggacgcgggg

SEQ ID NO: 5828 - DNA, 603 bp, Oryza sativa
  unsure (1)..(603): unsure at all n locations
  Clone ID: PAT_MRT4530_12577C.1
gctcgagtcngattagctagttgggtgaggcnatagcttaccaaggcgatgatcagtagctggtccgagaggatgatcagccacactggggactgaagacacggcccagactcctacgggaggcagcagtggggaattttccgcaatgggcgaaagcctgacggancaatgccgcgtcctcgccgccaagacccccttcctcggccatccccgccctccaaatgcccccctccgcgacatcgccgcccgcccgccaccggccgcatcaccatgaagcaaggaactgtggtacggggcctgacagggttgaantncctggggccattctcggcgcagacgccgtcgtacctgaagggcganttccccgggcgactacggggtgggacacggcgggggctctccgcggaaccnggaagcctttcgcnaaggaacagggccctggnaagtttatccncngcccggttgggcaagctccgcccccctgggctncatcccccccggaagttctccaaaaaattgggtgcgcnttcnacttncaaggaaccccntgttggttcaaaggcccggcgccccaaattttcctcccnacgggnggctcnaant

SEQ ID NO: 5829 - DNA, 2326 bp, Oryza sativa
  Clone ID: PAT_MRT4530_12578C.1
cctcctaaattgttagcccttttcctttcggtttgtaattgtcaacaatgtggtactatgcttggttccaaatcaagatttgttactagtataacaagatcggtgcagtttgagatgcaatttgatcacaaaatgagatgtggagaatctgtggttgtgaattttgttgttgcattcagttgtgggtgtcgtcttcgtcttggtctccggcgatgtcgtccgggttgaggaattcctccgggacgttgccggggaggtcggagccgtagacatggcccatcttggtgcgcttcgtctcgaggtacctctggttctccttggtgatgggggagatcaccggaaccctgccgacgacggcgagcccgtagcccttgagcccgacgaactttgccgggttgttcgtcatcagccgcatcgtgcgcacccccatgtcccgcagaatctgggcgccgatgccggactcgcgggacagcatggcgccgttgcgcggggccaagcgccggaggaaggcggcggcggagaagaaggctgcaatggcggcggccgctgcggcgggtggcgcgcccggagcaggcggcggcgactggtgggacggcttctgcatgcggatgtcaggaaccttgtctggtatacaggatgcacaaagatttgagtttatcttcaaaatgccgaggatgtcgccggtcaggcactcggaatggaccctcaccaagacgtcctcgccgtcgccgatgtcgccctttgcaacagcaatgtgctcggttccatcaagcttggattggtagcagtaagctcggaaaaggccccatttcgtcggcaaacgagatacagcaatcagttccaccagcttctccctcttccttctataccggatgagatcagcgattgaaacaattgggatatcatgctccaaagccatctgtttcagcactggcattcctgccattgaaccatccactgggttgatgacggttgacaggacagacacagggcgcaagccagccaacgcgacaagatcgacggatgcctcagtatgtccagctctttttagcacaccaccgtttcggtattttagagggaatatatggcctggtcttctgaggtcagttggcttagaatcaggggaggctagagtaaaaatcgtttttgccctatctgcagccgagacgccggttgatatgcccactctggcatccactgttactgtggaagcagcagctgaaatatcctcaatttctgcaattggagacatcataggaatcatcaatcttgttaagtcctcttccttcatgcccactgagatgatcccagaaccattcctgatcatgaatgcaatagattctgggtctgccagcgtagctgccatgacaagatccccttcattatcaccgctttcatcatctacagcaataacaaactttccttcatgcaatgcgcctatagcctcatcaatagaggaaaaaccatcagttggtttgtctgggtcaccctctgcatcgctaacaaagaaatcaccagtttcctgagtgattttagcaccaacagtccgaaaggaagcactagatccattgaatccttgcaaaacaggtccattattgctttcctttaaaggatcattcaaattctctcctcccccaagtccaccaattgcataacatctcaattttaagctcccctttctgataacagcaaatcctatgctgttgataccaccgcttccttgttgaaccctctcaacaacataaaataaagctagagaacgctctggtttgtcataagccttctgctccggagttctggctgattttaggacctgcccattgtttgctggcgagtgacttggtccatggatcaagagggacccgctgaggtggctgtggtgttgcaggttttgcctctcgaagttcattctcccggtcgacaaacctgtgtatgatgacatggccaattgaatctcatcagtcatcatgacagtttcctgattgaagttggtttcaatgtatgccattggtgcagcatcgccaacccgtatcctagtccgcagtagtcttgtatatccaccagctcgatctttgtagcggtaggcgagttctgtgaataacttgtgaacaacattgtcaccccgaacaaaggctgaggcacgtcttgctgcatcaagcgtaccctctttgccgagctgcaccatctgatccgctttcgtccgcacctccttcgccttcgcgacggtggtctcgatccgctcatgcttcaccagctgcgacaccatagtcctgagcatggagacgcggtgggcggcgtggcggcccagcttgcggaacttccccat

SEQ ID NO: 5830 - DNA, 709 bp, Oryza sativa
  unsure (1)..(709): unsure at all n locations
  Clone ID: PAT_MRT4530_12579C.1
gcagagcagagagcagcagcagcagcagcagagcagcagagcagcagcagcagcagagcacgcacgcagagcagagagacgcagcacgcacgcagcacgacgcacgcagcacgcacgcacgcagcagcaagcacgacgacgcacgaagaaggacgtcaccttccgactcgacgacagacatgactacatcaccaccgcacagagtcactctacgtcatccagacgtgtcatacaaccacaaggcctaacaggaacctcaatatagcaatactcctggcctgatactacatcattcaaggggaaggggttctatggggtaaaaacctatccccgagtaagcccaaaccgactataatcaanccaacaaattaccaaacaaatttatccgatcatcaaagggccaaaagtcaaaacaccaaaaaagttatacgggactgaaacatcaaaaagatccatcaatttagaccaaggagatgttgatagcaacatcccagcatggatgattgcacaattgggattcctacaaaatgtaatggggtgaaatgcccatacgcgatatgaatcagcccaaataaataattgtttttcaattgaacaattaaacacccaaaccagatgccaaaaatccaaccatttgaaaacccaaaaagccaaaaaaaggagttttcccataatttaagcctgggattaaacccaccaaatagggggt

SEQ ID NO: 5831 - DNA, 1092 bp, Oryza sativa
  unsure (1)..(1092): unsure at all n locations
  Clone ID: PAT_MRT4530_1257C.1
atggaggccggctacccgggcacggcggcgaacggcgctgccgccgacgggaacggtggcgcgcagcaggcggcggccgcgccggctatacgtgagcaggaccggctgatgccgatcgcgaacgtgatccgcatcatgcgccgcgtgctcccggcgcacgccaagatctcggacgacgccaaggagacgatccaggagtgcgtgtcggagtacatcagcttcatcaccggggaggccaacgagcggtgccagcgcgagcagcgcaagaccatcaccgccgaggacgtgctctgggccatgagccgcctcggcttcgacgactacgtcgagcccctcggcgtctacctccaccgctaccgcgagttcgagggggagtcccgcggcgtcggcgtcggcgtcggcgccgcgcgcggcgaccaccaccatggtcacgtcggtgggatgctcaagtcccgcgtgcagggctccatggtgacgcaccacgacatgcagatgcacgccgccatgtacggtggcggcgcggtgccgccgccgccgcatcctcctccgcaccaccacgcgttccaccagctcatgccgccgcaccacggccagtacgcgccgccgtacgacatgtacggcggcgagcacgggatggcggcgtactacggcgggatgtacgcgcccggcagcggcggcgacgggagcggcagcagcggcagcggtggcgccggcacgccgcagaccgtcaacttcgagcaccagcatccgttcggatacaagtagtaacaagcagcagaatggcgatcggtctgcacctgcatgcacacgtatcgcatgcagatcgagctagtagtgcaactggctaacttgaaccagttaaaaacttaagacttagtgatcgtgtgtggtttaattaatttgctacgttcaggtagtgatcgatgagattttaatttcctactgtcagtttaattcaccgttcatgtactcgatccagctagtactactcctagttacccttgttctaatcttaacgcaattgtgtcgatcggacgatcgcacgtttatcttcaagtggaatttgtcttataacnntaaaaaaaaaaaaaa

SEQ ID NO: 5832 - DNA, 301 bp, Oryza sativa
  Clone ID: PAT_MRT4530_12580C.1
accgggtaccccggccaaaacttttagggaaacaaaagattgatcccgggacacccaacgggcctgttgaagtttgacagcaaaacttggcctgggattaaagggatggttttttaaaagcggggacccattttttttggccattcatgaagggtcggggttatcccgccgcaatttaagaagccaatatggggcccccccccggtttggaaaaaccaaaggcttatttttacagggtttacaggggaaacttattcggtctttgtaggaaaggggggggctggtttctcagtttgacttt

SEQ ID NO: 5833 - DNA, 303 bp, Oryza sativa
  Clone ID: PAT_MRT4530_12581C.1
atggcggcgtcgggcggctaccagctgctgcaaccgtgggcccagcggccgcgacgccgcctccgtcgagcagggaggcttcgtttcgtcctctggcagatggcgctcaacatgtggtacgtcgagctcgccgtcggcggcagcaaggtgcacgcgggatccaacagtcgtctcgtctggcgccacacgccagcggcggcgagggcgggggaggggaaaggaaggcggcggctcagaggtggagtgaggcggcgcgtcactgaggtcaccgcccgcctcgctcgcatgcggaagagaagatga

SEQ ID NO: 5834 - DNA, 163 bp, Oryza sativa
  Clone ID: PAT_MRT4530_12582C.1
gctactctgcacttgcgtccatgttcttcaggtttaccagagaagaaacataaatttctagtaatttttatagtcaccatttctgctgttgcaatactaggcattcttctgttgctctacaagtatcttaatcggcggaagaaaaataacaccaaaaactctt

SEQ ID NO: 5835 - DNA, 1158 bp, Oryza sativa
  unsure (1)..(1158): unsure at all n locations
  Clone ID: PAT_MRT4530_12583C.1
atggatgagctccgtgctccggcgtgcggcggcggcgtcgggacggtgatcgaggaccttccgacggacgtcctcgcgctcgtgctccggcggctcgacggcgcgtcgctggcggcggtggggtgcgcgtgctccagcttccgcgagctcgccgtcgaccaggagacgtggcgcggcctctgcctcgccctgtggccgtcggttcgcgacgtgctcggctgcggcggcggcggcggcggagacgggtaccgtgcgttcttcgccgacgcgttcccgttcccggaggcagcggcggcggtggcgtcggcggcgccggcgccggtgcccgggtccctcccatcacgcctcgtctccgccgttgacctgcaccacggcggcgtctgcatcatgtcgcgcgtcgtggagacggacacctcgtcggcgtggttcctgggctcgccgttccgcgtcgacgcgctcgtccaggagggcttctcggcgccgtcgccgatcacgccgagctcgctgacgctgagctggatactcatcgaccccgcgtccggccgcgccatgaacgcctcgagccgacgcccggtggccgtcgaccggaagtggctcaccggggagacggtggcgcggttcaccgtgatgctcggcggcggcgtcgccctcgacgcggccgtcacctgcgacgacaggtacgggcacgtcagggaggtgagcctgtgcgtcgaggacggcgagggcggcggcgtgagcggccaggacgggctgggcgcggtggccgcggccatggcgggcgcgcggcggggcaagggcgcggaggcggcggcgaggcagcggtacgaggagttcgtgaaggggaagagggcgaggaaggagtggaaggcgaggcgtgagggcatcgtcgacctctgctgctccggcgtcggcgcggcggcgttcgtcggcttcctcgtcatgctcaccttccggtgatcatcgcggcgtccggcgacgcgggccaggcatacggcataagcagcgtacgtagctgggtaccgtacaatttcgttgagaatgccaagaaatgtaaatatgataaaagtggtactagtgtcgtaggaactgtgttatcacaaatgggctaaatggatagtaacaatttttccngttgcttattaaaaaaaaaaaaaaaaa

SEQ ID NO: 5836 - DNA, 1015 bp, Oryza sativa
  Clone ID: PAT_MRT4530_12584C.1
accaacaccaaataaaacatctgcattttctgcagattgatcaagatctctagggggatcaatctttcacaagataaaaatacctactagaacaagctcagactgacttgcaagcagcagaaacttttaaggggaaccatctgcacaatatatgtatcttgtttgtctacaccaaggttactattccaaaccctatatatcatgattaaaacagatcaagaaaaaaaaggataagaggaccggttgaacatagtagagcagcatacttctgctcttcacagcaaaagacctttcatatcactgggaactagcacaccaacggtgtgcggttgcagtgccgcctccaccaagaggagctggaaggcggggtagaacggcgaatgcgcaaagatttgaggcggtggatgggtactagggctccagcttcagggagacgactcgggactgccggttccgcttggccgccctcacgaacaccaccgataggcatgacggcgcccaccatggcctgcggacttcttgctcccctttcaggcaggccactttgatgcgcctcaactctttgcacaatgtaatgaaatctccccatttcatatggcacctcctgataaaccgcagaatctgttctgtagtaaacatcgacaggctttcaagatactctccattgacaccgttttcctcaaaaacttgcctgtagctgccaaggtttatctcttcaagccataatccaacatcctcgactgtccagatgaagaaatccagcggctccggcgaccgcccccggctcatctccctactcggctcctccccgccagcaaatccccctccccgtttcttggatccaaccagcgaccccgatctccccggaaggaggagcactgccgccgctccccgcagccgctccggtggcagagctacctcctctcactctctctcctcttgatgggagcgcgcgggggggagtggaggaggggatcgcggggaggtggagacgagtggggagctccccggccgg

SEQ ID NO: 5837 - DNA, 1254 bp, Oryza sativa
  Clone ID: PAT_MRT4530_12585C.1
atgctgagctacaactacctggacgtggccttcgccccctacagcgactactggcgtgagatgaggaagctcttcgtcgtcgagctgaccagtgtgagccgcgtccgctccttcgcctacgcgcgggccgccgaggtcgcccgcctcgtcgacaccctcgccgcctccccgccaggcgtccccgtcgacctcagctgcgcgctgtaccaactcctcgacggcatcatcggtacggtggccttcgggaaggggtacggcgcggcgcagtggtcgacggagcgggccgtgttccaggacgtgctgagcgagctgctgctcgtgctcggcagcttcagcttcgaggatttcttcccgtcgtcggcgctggcgcggtgggccgatgccctcgcgggggtggaacggaggcggaggcggatattccggcaggtcgacggcttcctcgactcggtgatcgacaagcacctcgagcccgagaggctgagtgcaggggtgcaggaagacatggtcgacgcgctggtgaagatgtggagggagcagcaggataggccatctggagtactaacgcgcgagcatatcaaggcaatcttgatgaatacatttgctggaggaattgacacaactgctataactgcaatttggataatgtccgagatcatgaggaatccaagggtgatgcaaaaggcacgagctgaagttcgcaacaccgtgaaaaacaaaccactggtagatgaagaagatagccaaaacctcaagtacctcgagatgataataaaagaaaattttaggctgcacccaccagggaacttgttggttccaagacaaaccatgcaaccgtgcttgattggtggatacaatgtgccatcaggaacaagggtgtttataaacatatgggcaatgggaagaggtcctatgatatgggacaatccagaggaattctacccagagaggaaagtttctttcttgtccgacaaggacttgtatcaacccatgggtataaatatgtacacccggggcaattgtatcgtctacgtcggcatcgttcaaggctgcatcaatacattcgacctcttggattactctgccctatcagagggccccatcggcctggccggtcagactgctgttgagtggccggtcagaccggcctcggctcggtcagaccgccatcggctaggtcagaccgaatacggctccatcggctctgtatcggccaccccgagcaacaccatcccggcctccagggggccggtctga

SEQ ID NO: 5838 - DNA, 225 bp, Oryza sativa
  Clone ID: PAT_MRT4530_12586C.1
atgacccacatcagaccacgtcagtcgtgtttcgctcttgtgtggggtagcaagcttttcagtttgcatggcttgtcggtcttgctcacccgtgcacaagcaagactggtgatcgtgaagtcggagctacgacatcgacgaggtgcgacgtgtgacaacgatgacatgagtccttttgagttatgcttcggcatgggtcgaggcgttgtcctgacttgttcttga

SEQ ID NO: 5839 - DNA, 2481 bp, Oryza sativa
  Clone ID: PAT_MRT4530_12587C.1
atggcgaagtcgagcgcggacgacgccgagctgctgaatcacgcagcaatggctgggagatgcagtccgtaaataacaaaggactcgttgaagaactagaaaagttgcttgatcgcttgcgaattccacaggagtttgcagcatcattaactgggggttcgtttgaagagtcacgaatgctgaaaaatgttgaggcatgtgaatggttgacaggggccattcgcagccttgaagtgccaaatctggatccatgctatgttaacatgcgagctgttagggaaaaaagagcagaactggagaaactgaagacaacttttgttcgacgcgcatcagaatttttgaggaactacttctctagcttggtggacttcatgataagtgacaaaagctacttttctcagcgagggcaattgaagcggcctgatcatgcagacctaagatacaaatgcagaacttatgcccgacttctgcagcacttgaagagtctggacaagagctgtttaggccccttaaggaaagcatactgtcattctcttaatttattgcttcgtcgagaggcacgtgaattcgccaatgaacttcgagcaagcacgaaagcacctaaaaatccagctgtttggcttgaaggttctaatagtggcggtcagaatggcagtagtgctgacacttcaacagtatctgatgcatattcaaagatgctaacaatatttatcccacttcttgtggatgagagttccttttttgcacattttatgtgctttgaagtacctgcgcttgttccagctggtgctccgaatgctaaaagtagatcagggggaaatgacccagatgatgacctgaatcttatggatccagatggcaatgatctcaaaccagatgatacatctgctgaattgggtacattgaatgatgctcttcaagaactactcgatggaatccaggaagacttctatgcggttgtcgattgggcatacaagattgatcccttgcgttgcatttcaatgcatgggattacagaacgatacctgtccggtcagaaagctgatagctgcaggatttgttcgcagactacttcatgacttggagtcaagaatatcaacacagttcagcaggtttattgatgaagcgtgccatcaaatcgagcgcaatgaaagaaatgtacggcagacaggaatactagcctacattcccagatttgctgtccttgcatcacgaatggagcaatatattcaagggcaatccagagatttaattgataaagcatacacaaagctagtcagcacaatgttcacaactttggacaaaattgcacatagtgaccccaaaactgcagacctggagtgctgacacttcaacagtatctgatgcatattcaaagatgctatcactatttttccgactactcttgcaaaatactaccatgaggccagtgaatcatatgaacaagcttgcactcgtcatatcagttcacttatttatcttcaattcgagaggctgtttcagttttctcgaaaagtcgatgaattgacatacaccatagctgctgaagagattcctttccagctagggctgtcaaaaactgatctaaggagggtgatcaaatccagtttatctgggattgacaagtcaatcggtgccatgtataggaggttacagaagacactgacttctgatgagttgtttccttcactgtgggacaagtgcaagaaagagtttttggacaagtacgagagcttcgttcagatggtgacgcggatctatggaaatgagcccatcatgtcggttgctgatatgaaagatgtccttgctaacttctagatataagtacagcgccatgtatcatttcacagtgcagtagctatctatattcaattcatttgattgaattttacacatccacttttgctaggccttattagagtatatatatatatgttccctggttaagtttatctgtgtggcctctgtatagccgtggatatgatctgcttccgtaaaccatacatgctgagcagttgcatcaggctcagaactgtaaaacaattaaatttatgtgtctcaatgtaacaacacctgtttggataaaatgtgaccggttaccgtgatgccgcttgcactcgtcatatcagttcacttatttatcttcaattcgagaggctgtttcagttttctcgaaaagtcgatgaattgacatacaccatagctgctgaagagattcctttccagctagggctgtcaaaaactgatctaaggagggtgatcaaatccagtttatctgggattgacaagtcaatcggtgccatgtataggaggttacagaagacactgacttctgatgagttgtttccttcactgtgggacaagtgcaagaaagagtttttggacaagtacgagagcttcgttcagatggtgacgcggatctatggaaatgagcccatcatgtcggttgctgatatgaaagatgtccttgctaacttctag

SEQ ID NO: 5840 - DNA, 422 bp, Oryza sativa
  unsure (1)..(422): unsure at all n locations
  Clone ID: PAT_MRT4530_12588C.1
ttnnnntnaaaccatgagaaacattgaagggtggttttgttttagaggcagctgtttgttattacaaattggaggaacaggtaagattattacagttcacaaaagatggacccaatccatgataattttacagcttgatcttccaggtgggatagctacagtagaaggttcagcttagctttgatattggacccagttttttgcctgagccactgtgaatgcagacacatggtcttatgctaaatcctaaccgtcaactttttacccttatgacttctcctggctatgcttgatttgatgtcgcaacaacttgcgcgtttgcttttggagccactggtatatttatacttcttttgtggcatttcacaaattgtttcttagaaagagctgtgccaacagagcctattatttcttctaatgct

SEQ ID NO: 5841 - DNA, 467 bp, Oryza sativa
  Clone ID: PAT_MRT4530_12589C.1
ttgtggtttttttttttttttggtttttttttttttttttttttttttttttttttttttttttttttttttttttttttggatgcaagaactaggggctccattaataataattggatgccttgcaaactaatcaatcattttttcaaacataaaaagggggtggtccatttacaacaaaaaaaaaattcccgctaagaattattaccaaaggccattgatcgatacgaccacccccaattttttgatacaggaaaagaatgcgataattaaccccaaaccaaaataacaaaaaaaaaaggggattgcatgcagccctttgggcaactgaagggggggccccacctcccttagggaccccccctttggacagggccactccacctaattattccggccccttggattttagaagggtttcttcccacccaaaaaaaagcccacggttaattgaaccctgggcccca

SEQ ID NO: 5842 - DNA, 1401 bp, Oryza sativa
  Clone ID: PAT_MRT4530_1258C.1
atgccggagaagggcaccgtggtgatgagccggtacgagctcggccgctcgctggggcacggcacgttctccaaggtgtaccaggccaggagcctcgtgtccggcgagaccgtcgccgtgaaggtgatcgacaaggagaaggcgctgcgcgccggcgccggcatggtcgaccagatcgagcgcgaggtcgccgtcatgcggctcgtcggccgccaccccaacgtggtccgcctccacgaggtgatggccagcaggagcaagatctacttcgtcatggagctcgtccgcggcggcgagctcctcgccaggctggtcgccggcggcggccgcctcggggaggacgcggcgaggaggtacttccaccagctcgtcgccgccgtcgacttctgccacagccgcggcgtctaccaccgcgacctcaagccggagaacctcctcgtcgacgacgacggcagcggcggcggcggcaacctcaaggtcaccgacttcgggctcagcgcgctcagcgcgtcgcggcggcacgacggcctcctccacacgacgtgcggcacgccgtcgtacgtcgcgccggagatcatcggcgacaagggctacgacggggccaccgccgacgtctggtcctgcggcgtcatcctcttcctcctcctcgccggctacctcccgttcttcgattccaacctcatggagatgtacaagaagatcaccaatggcgagttcaaggtccccgactggttcacccccgacgcacgcagcctcatctccagactcctcgacccaaaccctacaactcgcatcaccatcgacgagctcgtcaagcatccatggttcaagaagggacacaccaagcggccggcaagctcgaacaccatgaaactcaacgaggaggagaaaccagcgaacgccgccatgaacatgaagccggcgagcttgaacgcgttcgacatcatctcgctctcgcagggattcgacctgtcagggatgttctgctgccatggccacagcagcaggacgcaggatcagctgttcgtcaccgggaagccggcgacggcgatcgtgtcgaggctggaggagatcgcggagacggagcacttcacggtgaagaagaagcagaagaagaggcaagaagaggacgggatggcggtgaagctgcaggggtggaaggaagggaggaaagggcagctcgccattgacgccgagatcttcgaggtttcgccgtcgtgctacgtcgtcgaggtgaagaaaacggccggcgacacgctggagtaccaggcgttctgcaacagagacctcaggccgtcgctgaacgacatctgctggacctcgccggcgacagcagcgtcggagaagaaccagctgccggcagtgtcggaggtgtcgccactgagtagtcctcggaattga

SEQ ID NO: 5843 - DNA, 267 bp, Oryza sativa
  Clone ID: PAT_MRT4530_12590C.1
atgggtgcgaccagcaaaaccatgcacccacagcccgggctgacgtcatccaagggggggaggccagctgcgccgacaggtgggccccgcttgtcagcgcacaaggggagggagagggggctcgggcaagtgggccccactggcagcggcacaaggtggccggtctaccgtggactgggaccacacgggtggtccaccgccggtccacgggaccgacggtccggatcagcctcacaggcgatcggacggcgcgggggaggcggctag

SEQ ID NO: 5844 - DNA, 1464 bp, Oryza sativa
  Clone ID: PAT_MRT4530_12591C.1
atggccctcggctccctgcaacatattcggcacttagctcagcagcctgacaaccttgttgatgtggatgacgttcgagctatagctgacctcccttctgcggaaacactcgtcatccgggtcaaggttgctgcgaacactgctgctgggggagacatgctagttattgctgtaagcttccgggcaaaatctggtgctgtttctgatgccactgttacgttacagcttactggggatctcgacaagatggttgcattacaaaggctgttggagccttatggcatctgtgaggtcaccagaacagggctagtggcgctggtccgcgaatccggtgtcgattccaagtaccttcgtggatactcctttccgttgtaatcccaggtcttgtgagaagaaaggacatgtaataaaatgcttggtcggttggttgctacctgttacagcagagtgttgtagtcagattccgttcgttcagttatgttgtttgttatgatgctgttcttttgttgttgtttaccttcctctctgtaatgtgccaatccgctggcttcttgtccagtaaagatcatgatgcaagagttgagcctaactggagatccaggaaaaaatgttcctgtggaacggaacctcagcaaatttgggataaaagaaatttgtagaacgggaaaaattgctttgagacgtgaaaaaattggagcaactgcccgcttctggggattttctgctgcttcttacccagatctcatagaggcattgcccaaaaattctcttcttacttctgtaaataagacagtcaatggaagttttgatcaaccatccaatgctgggggcgatgtctatcctgtggaaccttatgagggttcatccatgaaccaagtacttgatgctcactggggcgtccttgatgatgaagattcaagtggacttcgatcacatactctatccatccttgtcaatgattgccctggtgttctcaacattgttacaggggtctttgctcgcagaggctacaatatacagagtcttgctgtaggcccagctgaaaagtcaggcctttcgcgtattacaacagttgctcctggaacagatgaatccattgagaagttagttcagcagcttaacaaacttgttgatgtgcatgaggttcaagatataactcacttgccttttgctgaaagagaacttatgcttatcaaggtttctgtgaacactgctgctcggagagacatactagatattgctgaaatcttccgggcaaaatctgttgatgtttctgatcacactgttacgttacagcttactggggatctcgacaagatggttgcattacaaaggctgttggagccttatggcatctgtgagattatctgcgcaaatactgttaccgtattaacacacattgtctcaaaaactcattctccacacgtaatggatacttttgccgaagtgaacacatgcttttga

SEQ ID NO: 5845 - DNA, 330 bp, Oryza sativa
  Clone ID: PAT_MRT4530_12592C.1
cccaccccaacgctttctactacggtctatcttaccatggactattaccgtacgaccgggcaacatccgccggagagatgggctgcccaaacgaggacccgaccacggagcccgagctggggaacgatctgtacactctgctctcccaccccaggaacctcgccacgcccacttcaaccccaggcccaaactgtagcactcgtatgagaaccaggtcacggtacttgtggggggcacagacaccctgagatgcgagctcctacaggacatgaggctcacccaattccataacaagcacattatacacgtggacaccatatacgtttgcaa

SEQ ID NO: 5846 - DNA, 432 bp, Oryza sativa
  Clone ID: PAT_MRT4530_12593C.1
atggcacagcctgacctttgggctgtgcctaggcctctgcctcgtcacgatgggctgcccgacctggcccggtccaacgataagggagccaaaatagacttattacggacatataaggcacagggaaaattatactttgacttcctcaactatcgcacgagtatgattcatgtcctccaaccacaaaaccgggcatatcgactcctccagctatcaaaaccggtgcaaacaatgcttcggggaggatctcgtgcttcgtgcttcggggaagagctcgtgcttcggttggcagccgccgccgccgctccctaccaccgtccacaccgccgctccgcccaaggacaaagacttggtcaagaccgtcacgtaggcgtcacgccagacaaaaccacctccaaaaccatcaagtggcattgtttgcaccggttttaa

SEQ ID NO: 5847 - DNA, 425 bp, Oryza sativa
  unsure (1)..(425): unsure at all n locations
  Clone ID: PAT_MRT4530_12594C.1
tttnttttttttctttttttttttttttttttttttgggtttttttttgtttttttttgttttttttttttttttttttttttttttttttaaaaaaaaagggctggggacccggaaataaaaatagggtcctttaaacacaacccgggttgttaaaggtcccaaaaacatattttccaaaacttttaaccgggggttttaaaggcccaaatattttcccaagggaacccgggggaattttggggggcccgggaaaaaaaaggccaaaaaaaaccccctttggggccagaaaaaaggccggggtccccccaaaagggtcattttttggggggtaaaaacacaaggaccaataaagggggggaaaaaaaaaaagaaaaagtggcgcgttccaaaaaaaaataacccccccccccccctgtgggttt

SEQ ID NO: 5848 - DNA, 1813 bp, Oryza sativa
  Clone ID: PAT_MRT4530_12595C.1
atgggtcgtgagcttttctcctcttcaaattcccattccgttgatgagcctctaccttctcagtatcaatttagagcattccttggtgcaagatccatcatgctcgacgacgtcgacgacgagcctttcgccgatggcatctcgagcccgatagcgcagcacatctatgacttctgcgacgacggcaacggcggcgacctcttcgcggcggtgaacgcggcggcggcggcagggtcggacatgttcacggcctcctcggaggacgcgtccgcctcgtcgtcgtcgacggccaccgcgcccatcgccggcggcggcgacaccctgtcgccgccgctgccgtcgctggactccacgctctcggctctcctcgagcaagacgagccgcccggcgccgacggcgagctcctcctccccatcgacgactacgcgttctccgccgtcgacgagacgcagccaccaccaccaccggagcatcagcagcagcagcaattcacccagatgcctctcccggtgatgggcggcgcggcggcggagcacccggcgctgcaggcgcagctgagcagcaccgccaccgagctgatgcagtacgccgggttcaccgacgaggtcttcgcggcggcgttggccgctggagccggagctggggcgggagggtacatgggcctggacgacccgctctgcccgcagcagcagcattccggcgcgatgctccccgccgccgccgccgccgccggcgaggcgttcttcagcaaggacgcgcacgcggcgccggccgccttcttcgccgcggccggcggcggcggcggaagcatggtgatgtcgatgatgggaatggacgagatcggcgagtaccagcggatgatggaatgcggcggcgcgcttctcggcgccacccacgccgccgacggcgccgacatggccttcggcaacgccgccgccgcagagttgcagatgggcggaggcgggagtagcccagcgcggctgccggcgacggggacgacggagacgacgagcttggaggacacgagcttcaagaccgtccgcctctccaacgaggagaggaaggaaaagatccacaggtacatcaagaagaggaacgagaggaatttcagcaagaagatcaagtacgcttgcagaaaaaccctcgcggatagccggcctcgcgtccgtggtaggttcgccaagaacgacgactactgcgaggcatccaggtcgatcggctcgcagaatcacgaagagtatgaacaaattggcggcgtgaagggagaagacatgcttgattctgacgctctagcgcatatcagcgggatgagctcatacatgtacaatcacacagtggaatcctggatataaactcatacgacacagcactgagaaactctctcgaattgctttttctttttttttcccccctattttgtgcagatttaaccggtcctttacttcaaacctctgaataattttgtagaaatttgatgtatgttgatcagctggagttgctgtagggtcggtctgttgtcatatcaatctgcttttcacttgtttgtcattcttgcaggtgaatgaaatagatagagttaatttgcataatttgtatagatacaaatgtcgtgtgtacttaacgatgttagaaggcattttgaaatgcctagtatgttttgaggtggtcctggaaacggttgagaaaattggagcagggaaaatcaatatagatttaggcctttagcaatctgagggtgtaaaggaaaaggatatatttgcaaatgtttgacggtataatacctctatatgaatatattatactattgtcttt

SEQ ID NO: 5849 - DNA, 216 bp, Oryza sativa
  Clone ID: PAT_MRT4530_12596C.1
atggtttacctgatatatgaacgtaagaaagaagatacacaaaggtgttacagagacgccagtttattacgtctatcagaaagatctgaagaaaaaatactaaaagatgtggtgcattcagttcagcttctggaactgaagcaatttttttccctggataaagattcagacatggagatgtttggttctatcaagaagctgaagaaaccagactaa

SEQ ID NO: 5850 - DNA, 837 bp, Oryza sativa
  Clone ID: PAT_MRT4530_12597C.1
atgaccacagcatcggcttcaagacaaagagggagaaaagagaagagggatgcgtcgcttacatgtgaggccagagcggctcgacctcatagccgcgcggtcactggcaatggcgtcaccatcaacaatggctccagcctgcacccttggagcacggagcacttcgtccttgtgcacggcgccggccatggcgcctggtgctggttcaggctcctccgcctgctccaagactccggccaccgtgtctccgccgtcgacctcgccggcgcggccggcagcctcgtcgatcccaaccacgtccgcaccttcgacgactacaacgcgccgctccttgacctcatggccagcttaccggccggcgacaaggcaatcttcatcgcagcaaccatgcttcagttcggctaccaaactgaacaagacatcaaagatggtgtacctgatttatccgagtatggagatgtgtatgacctgacatttggtctaggagctgatcgtccgcctacagctgtggcattaagaaaggagttccaacgcattattctctatcaacaaagcccccaagaggactctgcacttgcttccattctactccggccatggcctacggcgctcagcacggccagattcaccggcgacgatggaggagttgagagcttcatcgacagggtccggcgcgtctacataaagacggcgaacgaccggatggtgcagccggagcaacaggaggcaatgatccgtcggtggccgccgagcaaggtgatggtcatggacaccgaccaaagccccttcttctccgcgccggagcttctcttcaacctcatcctcaagtcgctgtga

SEQ ID NO: 5851 - DNA, 1635 bp, Oryza sativa
  Clone ID: PAT_MRT4530_12598C.1
gttttccccaccttctctccacgactccacctgaagcgcctctcgccgccgccggagaagacgcgcagcggcagcagcggcggaagcggcggggagccatggcgccggagccggaagacgacatcatgaacgagaagaacccccgcccgctcgacgaggacgacatcgctctcctcaagacctacgggcttgggccatactccacaagcattaagaaggtggagaaagaaataaaagaaatggctaagaagatcaatgacctttgtgggattaaggagtctgacactgggctggcaccacccagccaatgggatctagtatcggataagcagatgatgcaagaagagcaaccgctgcaagtggctaggtgtaccaagattataagtcctaatactgatgatgctaaatatgtgattaatgtaaaacaaattgcaaagtttgtggttggcctaggggataaagtttctccaactgacattgaggaagggatgagagtgggtgttgatcggaacaagtaccagattcaaattcctttgccacccaaaattgacccaagtgttaccatgatgacagttgaggaaaaacctgatgtgacatataatgatgtgggtggttgcaaggaacagattgaaaaaatgcgggaggttgttgagcttcccatgcttcacccagagaagtttgtcaagcttggtattgatcctccaaagggggtcctttgctatggccctcctggaactggcaaaacacttcttgctagagcagtggccaatcgtacagatgcttgttttatccgtgtaattggcagtgagttagttcaaaaatatgttggtgaaggggcacggatggtccgggaattatttcagatggcccgctcgaagaaagcatgcattgtcttctttgatgaggttgatgctattggaggtgctcgcttcgatgatggggttgggggtgataatgaggttcagcgtaccatgttggaaattgtgaaccaactcgatgggtttgatgcgaggggaaacatcaaggttctgatggccacaaacaggcctgataccttagatcctgcacttctacgtcctggtcgtttggacaggaaggtagaatttggcttacctgacctggagggccgtacccaaatattcaagatacatacacgcaccatgaactgtgagcgcgatatccgtttcgagctgctggctcgcctctgccccaactcaactggagctgatataaggagtgtctgcacagaagctggcatgtatgcgattcgcgcccgacggaaaacagtgactgagaaggacttccttgatgctgtaaacaaggtcatcaaagggtatcagaagttcagcgcgactccaaaatacatggtgtataactaaaccgttgttgctcccatttactatggcccatgagattgtctctggctgtctgcaaagattgttgttgtttcttctcggaattgtgcatctttgtggcgaccatgtcatcttgtacaagttctattaaattttataagtagggttccttttgacggttaatgtgtcaaaaaaaaaaaaaaaaaaaaatttccacgacggttgtggtcgggtggaacggtggagatgaagaattgaaggtgaccccccgaaaaaaaaa

SEQ ID NO: 5852 - DNA, 1394 bp, Oryza sativa
  Clone ID: PAT_MRT4530_12599C.1
atggaccctagggcggcctttctgggccggcccattaggtggcgaagggcctccacgggcgacggcttcatgctttgcttgaaggccttcgcccttggtaagctttcggtcgatcatcgagcttggtggtgaacccgttgaccttcgtcgctaggcttcgcccgcggccccatgacaaaccccttagtcttcacccttctggcttcgcccaagttttgggccatgggtatcgtgtatattcggccttgtactgtgcggcccgatccgacaggaatttactgtttcgtatacccctggtgacacttgcctctcgcctttcgccacggctgtcgtggcgcctcgcaaacctgctcgtgctagggcaacaggcgaagaccctaggagcatcaccgacaactgaacttgctacttgggcaagtcattggtcgaagatgccgacttggccggggatggtccttgccggggtaactactgaaggtcaagcttcttggcccgttgatgacgaggtccagagaccaggcgatgggcgtactgtggtcttcgccgctttcttcgacgcgggtctccgactactgtgcgacgacttcttggcctctgttttggagatctatgaggcgaggctgccgcaattaagtccttcggccattgcaaagctttccgtcttcacagcttttcgctttgctttttactgccagcgcttcgacgaaggacgtacacacgcctgccggaccaaagaaatcggtgttcggcagcgtgaatttcaacctccgaccggagcgttcggattcttggccggttcctgcatccatgccaaaataggatcagtgttggatgcagaaatggggctctacatcgacaacccttataccgccaagtactccgacaacgcgggccggctccgctttcgctgtcttcccatctccatcaactccaagccgagcatggagatcactggtctcctggagtcaagactcatcctccttcgcaacgtcgtgtgccgtctcagcactcacgactgttgtgaggagtattgcatgctccagaggacatgtcgagccggggaacacccttgccaactcaacaacatccacctctttagcgctggcgacgaccggctagctacgctggacatgaccgaagagtcgtgcctcatgtgcgtgctcgacctgcagctggagaagatggtcctatttggcaagcttgacctcgcgggatatgaaatttctaccgaaagtagaaccatttgctgtaaattctttgttttgggtattgaactgctagcgcggaatggatttgtgagaatagcagacaaaaaaacacaacttgctgtgtccatccagacaaccgccttccgacaatgcaatagaagtagcaacaccatcagaactcaaaat

SEQ ID NO: 5853 - DNA, 1413 bp, Oryza sativa
  Clone ID: PAT_MRT4530_1259C.1
atgcgccacctcgcccgcctcctcaacaaccgcatcctcctccccgcctcctcctcacccgcggccgccttctccaagcgtacctacgcccgccaccacaagccggctcggccgactgccgatgcacccgcccccgccgccggggagggggagggggggggggagagtgtgcaggggtggctgcgggagaagcaccaagccgagaccccccggcggtgaaccggcccgttccagccgcgcggcgccgaagcggtacgactcgtcggcaccgtcggcgcacacgtacaggtgcagcggttacccgccgggcggttctcccccggctctgtggtcgtgcaggaccaccacggtgatcaccccaagttccggattcccatcatattcgaagatgacttggcacaagttgccgcgtctcacttgcaagagaaggaccatatatatgtgtctgggcaactaactggagatatcccaccgaccaaacttatggatggccaagcaaacattcaggttttagcccaaatgctatcatttgttggtggtaaagcagttcaagcagatagcatggtggatgaagaggagggatttatgcagattgttgaggctgaaaagaaagttgaaactaaaaaattcatccctaaatatccaccacgcacagtttcaggggcaatgggcatgactaacaaagcaatttctttcagccatgcacctttattcacctgtccaccagtttcacagtattctcggatcagggataagccactcttttcactttggaccagatgtgtttacaaaatgttccccttcggaccagttcttcctctggctctcctcttttctgtcacccgcaaccttgctgctccaggtaaattgtttaggtctatcttgacacttaaactcaaactgaaggaaacctttttagacaacttttgtgatgcaaaagttggttacagaaacaaggataagctaaacaaactctggaatgatgttgtggctaatcctcaagactggactgataaccgacctcagaagaaaaatggatctataaatgcgaagtatcctgacttcaaaaacaatgtatcaaaagaggcactttggcttgacactgcaccaaaagcagtgctggaaaagttggatgatttagtattcagtagtgatttcagtgctgcaaaaaaatacaggccttttggtggtgacaagggcaatggggagttgtggcaagatctggtggacaatcctggaaaatggtgggataaccgatcagataagccttcaataaaatatcctgatttcaagcacaaggaaaatggcacgcctctgtggattggatcccagacacctaaatgggctatagatgcgcttccaccggcaaaaccatccaaggcaccttttaagcaagagaccttcctctcatga

SEQ ID NO: 5854 - DNA, 317 bp, Oryza sativa
  Clone ID: PAT_MRT4530_125C.1
gggaggccttcaaaggggaagggtttaaaaaagatgggggggtattttggattgggggggaaaaaattttcccggggaaaaagaaacaagggtaaaacccccaaattttaataatattctaaaaatttgggaaaaaaaaaaagacttcaaataaaaaaaggaagggtcaaaagggcaagaccacggggggcccagaataaaagcttggcccggggaaaaattttttttggaaaaaattggccaaaaaaaaccaacccgtgggggtttaaaattaagacaaacgggaatgggggtaattggttgggaacccgggggaa

SEQ ID NO: 5855 - DNA, 266 bp, Oryza sativa
  Clone ID: PAT_MRT4530_12600C.1
ctgtcccacacaccatttatatcacaatggccgccgccaagtccgacgagcggatcgggcagtggcgggaggtgccagccgagccgacgccggacggccccatccgcctgtagtgcctcgaccgggaccctacccagatggcgctgatcgaggcgctcaacgtgttcaagccgactctcgatagggtgattggcagcgattacgtggcggatgggccggaccgtacgatcgagcgcgccttggcgagggccaaggtgcattactac

SEQ ID NO: 5856 - DNA, 193 bp, Oryza sativa
  unsure (1)..(193): unsure at all n locations
  Clone ID: PAT_MRT4530_12601C.1
gtctcctnanntgttaaccggaggaaccctcgagtgatcatttattcatcatacatgcttccagacntagaggggcccccattcttatgtacctcctttacacccacacgtacagggcagaactagctacatacacaatgctagtcaccagatcccgggggccaggaacagacaccgcctacgccattgggga

SEQ ID NO: 5857 - DNA, 306 bp, Oryza sativa
  Clone ID: PAT_MRT4530_12602C.1
atggcccttgatggagatgtggcctccaccatagagctcctcttgaatctcattggaaacatggatgacaccgatgtctctgatgcccatgtcttcaactttcggttcctctttcgtctggccagaccccctttcttgatgctgctcccttctattggctggtatgcttccaggccatggtcgtggagtctttcggtggatgaggagaagtgttcgtccgtgaagatggtccaacttgtttgtggtcaaggctctttggcctcaccggtgcttcaagtgccctatgtcttagtgaacctgtcatag

SEQ ID NO: 5858 - DNA, 610 bp, Oryza sativa
  Clone ID: PAT_MRT4530_12603C.1
actccccatacgactcgagcgcgtcgccaaaaccacttctcctcataccaatctcgaatcctctgactccgagaaaggaggaaagcagtagcgtccggttcgctacctctacctctcctttcctccacctctcatcctccgtctcgagaattccctctcatccgcccgacccgagcgtccggatcgcaacgaccacggagaatgggacaagaaggaggaagtaaaccaatagtgagcgtgatgatggaggatctagcaagtgcggaggttggatgttgctgaggaccggtggaggtgaacgtgaaggttggcaacgacctcagcttctgcggatatggtggtagtaataggcaatgaaggaaagggcgagtgcacgagataacggagtgaccacaacatcaatgaggaccagcgactgttcatcttctatcctgggtagtagccatcgatctagcgacggacctgaagaagctgaatgaagaggtctagatggctatgtcataagggatttgacgattgctttaagatgcaacgctaattatgaggagagtggatggagttctccgatggagccctttgttgatgctacttggatgaagcattggcgatt

SEQ ID NO: 5859 - DNA, 1476 bp, Oryza sativa
  Clone ID: PAT_MRT4530_12604C.1
taacaacatactccatcaatggattcctccatgccttttgctctgctgcttgccttgctcatacccaccctcctccgctttgtcatcaggcgcaagtactcatcctataatctccctccaggttctcttggcttcccattgattggccagagcatctcccttcttcgtgccctccgcagtaatactgattaccagtggtaccaggacaggatcaagaagtatggtcctgtgttcaagatgtcactttttggctcaccaacagtgcttatggctggcccggcggccaatcactttgtattcagcaaccaggacctcattttcacccagacacagccgcggagcctcgcggcgatcatcgggaggaggaacatgctggagctcgtcggcgacgaccaccgccgcgtgcgcggcgcgctggcgcagttcctgaggccggagatgctgcggcggtacgtgggcaggatcgacggcgaggtcaggcgccacctcgccgggcggtgggccgggcgccgcaccgtcgcggtgctgccgctgatgaagctgctgacgctcgacgtcatcgccaccctgctgttcgggctcgcgcgcggcgccgtccgggagcggctcgccgccgcgttcgccgacatgctggagggcctgtgggcggtgccgctcgacctgccgttcaccgcgttccgccggagcctcagggcgagcgcgagggctcgccggctgctcgcggcgacggtgagggagaagaaggccaacctggagcagggcgagtcgtctccatcggacgacctcatcagctacctcgtcagcctccgagacggcgacggcggcggcggccggccgctgctcaccgaggaggagatcatcgacaactccatcgtctgcctcaccgccggccacgacacctccgccatcctcttgaccttcatggtccgccacctcgccgacgaccctgccatcctcgccgccatggtccaagagcacgaggagatcgcgaggagcaagcgagacggcgaggcgctgacatgggaggacgtggcgaggatgaagctgacatggcgcgtcgcgcaggagacgctccgcatggtgcccccggtgttcggcagcttcaggagggccctcgaggacgtcgagctcgacggcggctacgtcatcccgaaagggtggcaggtgttctgggcgccgtgcgtgacgcacatggacccggccatctaccacgacccggacaagttcgacccgtcgcggttcgacgcccaggcggcggcgtcggcgccgccgccgtactcgttcgtggcgttcggcggcgggccgaggatctgccccgggatggagctcgcgagggtggagacgctggtgacgatgcactacctggtgaggcacttcaggtggaggctctgctgcgggggggaggagaacaccttcgtcagggacccgctgccgtcgccggccaacgggctccccgtcgagctcgaccacattgct

SEQ ID NO: 5860 - DNA, 1428 bp, Oryza sativa
  Clone ID: PAT_MRT4530_12605C.1
atggcgcctttgcttttctttgctgtattcctattcggcacagcacttgatggagcagtcggccaagaagatggctttctaagcatcgactgtggcatggatcccaactacggcagctacaagaacccagatgacggcatcgtctacgagcccgacggccaatatgtcgatggcggggagaaccatatggtagcccctgagcaccagagtgggacgtttcgaccctactccacagtgaggagctttccctccggcgtacggaactgctacgcgctgccgaccgtggccggagccaagtatcttgtccgggtgagatctgcctatggcaactacgatggcaagaacagctcgtcgacgattcagttcgatctctaccttggggtgaattactgggccaccgtaaaagatccctggaacgagttccacgaggcattgttcgtggcatgggcaagctgggtgccggtgtgcctgctgaacaccggccgtggcacgccatttgcgtcgtcggtggtgctgaggagactcagcagcgagctctatccggtcatcaacgccaaacagtccatgcgcatgatttcaaggaaaaacgtgggctcagacatttccactttaagttacccttacgatcgatatgaccggcactggtgggggcagatagcacctgacccgacgtgtaagaacctttcaactgcgtcgaccatcaagaataattccatgttcagcgtgccttcccctgttatgcagaccgccgttgaggcggccaacaagtcatctcttagaattaaatgggaaaatagtgcccccattgagtacaaggttttcatgcactttgcggactttcagaacagccagctccgacaattcaatgtttctttcaacgagctagggtcatatcaggtaagcccaccttacctagacaatggtgtccttagcaacagccaatggtacaaagctcccggtggagtgtacaccatcactcttgagcccactgctgagtccaagctgccaccgatgcttaacgcgtacgagatctatgctctcatctcccatgatgatccaatgacgttccctagagactgtcttgtttggttaatcccactcacaaaggaattgagggagattgaaagagtggaattaatcccctttaattccatccaatcactctctcaacagaacaaggccttaaggggggttgagctcctctctcctgttgccttggtcagcggcaactgcatgcatgttcccgacaaggccctcgtcatcactgagggtcccctctccgcggcagccgctcagctttttcatcacgctgtagttcagagggaacttgactttttgggcttccttattgagcttatcggagatatacgtgactacgtgagcacattgacgtgtggcttctcctccttctaccagcagcagcagtag

SEQ ID NO: 5861 - DNA, 2148 bp, Oryza sativa
  Clone ID: PAT_MRT4530_12606C.1
atggctcctcgcaagccgaaccctgccttcacgacgggccccgaccctagccggatcgacgataacaccaccgccttcttaggggcttcgctcatggatgatgacgagctagcgaagttggtcagctccggagcggtggcggaggggcaggccttcgccccggggaaggccttggtgccgaaacacggcgacaaccggacgatggtgttcgctgtgttctttgaggccgagcttcgatttctgtgcaatgtgttgttgccggagatccttcgccttttccaggtggagctcccccagctgagcccgtcggcacttgtctggatcgccatcttcgactgggcgtgccgaaccgctaggttcgaaccgagcgccgagctttttggcaccgtgttctacgccactgtgaactcgaaaacaatggtcactccggctgggacgaagaagatggcgttcgggagtgtgaacattaatgttcgtcccgagcagtccgatctctggccggtgaacaccgccatgtcgaagtgggatcgccattggatggcgaaatggttctaccactccattcccttcgaggctaggtccgatgcggcgaaaaccctccggtgtcaccgcaggtcaattgcgccgaacaggaagcccaaagtcgccgtcgacggcggcatcgaagcccggttcgtcctgttgcgcaaggccgacaccgaagcccgtaggatgatcggcgatgtgtcggtcactgagtacagccaactgctcacgcggcaggcagccggccgggcgaatcgggtgtatgatggcgatcttccaccccgggtgaaacccttcaaggccgatggcgacgaggggacgtccaggaagcgtatgcgcgggcaggtgaagctggcccctcagaagagaagggcccccgcctcctccgactctgacgccgatgacgaagataacatcgaagaccatgatgacgaagaggaaggggaggacgaaggggaggtggaagttgcggccgaaaaggctgtggacgaggaacaagctttatctaaatcacgagcgatcctaaccgttcaatcgaattcgatgactcttagcacacctaacacgtcggacgatgccgctgctgattggtgtctccgcctgcacggctggcctattatgccgctgttgttgggcgtctacgacttcaccgaccggtttgccttggccaccgaccagtgtctccgcctccacggctggccaattatgccgccgttgttgggcgtctacgacttcatcgccggtctgcctccgtcgtcgccgactggtgtctccgcctccacggctggcctattatgccgccgttgttgggcgtgtatgtcttcaccgaccggctggcctttgccgccgctgattggtgtttccgcctgcacagctggcctactatgccgccattgttgggcgtctacgtcctcaccaccattcatggacgtccacgtcttcaccgaccggcttggctttgccgccggcgactggtgtctctgcctacacagctggcctattatgccgctgttgttgggcgtctacgacttcaccgccggcctgcctctgtcgccgccgactggtgtcctcgcctatatggttggttggccacaccaccgttcatgggcgtccacgtcttcaccgaccggcttgcctttgctgccactgactggaatggatcagttagaacatcaccaccggcttgccttcgccgccgccgactggtgtctccgcctgcacggctggcatattatgccgccgttgttgggcgccgttggtcggcgtctacgtcttcaccgccggcttgccttcaccgccgccgactggtgtctccgcctgcacggctggccaattatgccgccgttgttgggcgtctacatcttcaccgaccggccgcctcgtatgacgccaactggtgttatcgtcttcacggctggccacgtcgctgccaccgctagtaggcgtcatcatcttcaacgcaagctgtctgcgtctgctgccgactggtttcttcactcccatggctgcatgattctgatactgttgattggccttatcgtcttcaccgtcggttgtctgacattctacttcagcaactccaattatttcaccggcaattttggtttctggacgctgccataa

SEQ ID NO: 5862 - DNA, 1644 bp, Oryza sativa
  Clone ID: PAT_MRT4530_12607C.1
atggctagctcctcctcttgcacctcctccacaacaaatcccttgttcggcttccatgtctctgagaagttgaacaagcagaattatcagctatggtgtgcgcaagtgctgactatgattcgcggagcacgccttgaggggcacctgaacggcaagaccgtcgctcctatcagctatggttctcggcttcctcttttcatcgctgtcaagagagatactatcccaggttgccacggcaaccacggcggcagaagcatggacgatgatccaatgagatgttcaactccaggacacgcgcacgacgtggtcgcggcaacactccaagtaaccgcggcggcagtggcgtcggccgcggcaacggtgctcgtggtggcttcaatggtgctggtgccaactccggccgtggaggccgggtcatggacaacagcagcactccggcaacgacactcggcctgtgtgccagccgcctcctacgcctatggtgtcgactccaactggtacatggactcgggggcaacagatcacatcaccaacgagctggacaagctcaccgtctgcgacaaatacaagggaaatgatcaagtgcacacggccaatggagcagatgaacgcgtggacctaacacattcggcaacggcatcggatggagtgaatggagcgggaaactccactccgggatcggtgcctgacgtgaccagggagacagcgcaggcgccggaacagcagcaacatggcgaggatgctcaaccccactcagccagcgagacgtttccaagcagctgcacttcatcggctagacctgtaccacaccagaccgtgcctgcactgggtcatgatctgaccggtactagtgctgacacttccactgatggcgttgctgtgcaggacatcgagcaaggagctgaaggcgagctcgacttaaacagacccagaacaaggctacaaggaggcatcagaaaacctaaggtgtataccgatgacactgtaaggggttggagtctacaacaactggatgttcagaatgccttcctacatggagttctagaggaggaggtgtacatgaggcagccacctggttccaccaaggatgcagtgccagctcttctacatgatctaaaggaggattttgctttgaaagacctaggagagcttcactattttcttggcattgaggtcaataaggtaaacaatggtttaatattgacacaaggaggatttgctgtatatcttggctccaaccttgtgtcatggagtgcaaggaaacaagctacagtttcaaggtccagtacagaagcagaatacaaggcattagcaaatgctacagctgagccttcagcaattactgatgggagaattggcactggtgggaactctggttggtactggttgctaggtgccaatccacagcaccaagagtccaagattcccatgttcggtttggtggaggccttggccatgagcagcggcgacctgacgctgcaacaggcagacgagggcgtcctcctttcatcccccattgcgatggaaatcctcgaagggtgggtgatagctctgatccgtcccctctacctggttctgcagtgcaccctcccagtacaccttgcaactacccaggccaacttggttgccctcattgatatatag

SEQ ID NO: 5863 - DNA, 726 bp, Oryza sativa
  Clone ID: PAT_MRT4530_12608C.1
atggcggcgaagacgtcgacgacgacgacgacgctgctgcggctgcggagctccgaggggaaggtgctcgtcgcgccagcatgggacggccgcccgagcgccaccgccgccgccgccgccgcgccgccgctggagaccagggtgccgctgcgcgccctcgagaaggccgtgctgttctgggttgggcgcgcgctggcggaggcgatcggcggcaagtccggcgacggcgactgggaggcccagttcctgcggtgcctccagcaggacgggctcgccgcggaggacgtcgccgccgccgtcgagaagctccgcggcattgacgcgctcgccggggtggtgcctgacttcacgctggctgctgcagctgctgcccaccgccacccgtcgtcgtctgcggcgccggagacaagcgccagctgccactcccactccaactcccgcgccgacgcctcgccggatcgcgcagccgcgtcgcgcgcccgtggacgccagaggagggaagaagaggaggaggaggcggctgatcgcggccaccgcaagactcgccaggctggcgccgccgccagcgacgacggcgtgcagtcgtcagggaccagcgcggccgctgcggcggcgacgaccggggcttcgctgcgcggtcggaggggattgccggagctgcacgcgctgcaagtgaataattcggagacccagaccctgctagcttgggagctactgcttgtgtag

SEQ ID NO: 5864 - DNA, 295 bp, Oryza sativa
  Clone ID: PAT_MRT4530_12609C.1
tctcacgcgtccggttctagatcgcgagcggtcggaaatcaatctactactctgactcgtacgcagccgctgggagaagctagctagtttgctagcgctcaagcataccagcgaactatctagtgaagatagatatgtgccgcgtcgccatactgcaggatcagcatacatagtcccggcagccagatgagccatttcaccgtcattgaggtcttgccgccggcggccgagtacgccagcgacgacccgaccgaccaagctgggatggatgacgaggagcatgagcaaaattcgc

SEQ ID NO: 5865 - DNA, 222 bp, Oryza sativa
  Clone ID: PAT_MRT4530_1260C.1
atggaggaaagaatggcggccggtgaggcgaagacggttgctacggacactgagaggaagccaaccaggacggcgccgactgtgaggaggacaacgtcggctgaggagaagacccctcctagcgtctacagggacgaaaatgagactgagcgacaaatagagggacctaaagtgaacttattcctttgggtggacgccgaattcatctcgtttcgtctctaa

SEQ ID NO: 5866 - DNA, 343 bp, Oryza sativa
  Clone ID: PAT_MRT4530_12610C.1
tcgacgccacgccccacgccacatatgaactaaagtttatttttgcacaatctttgtatcagagcttgtgaaagtggagaataaatgcatcaaaagtagataaaaagaagaataattcattgggatttgataaaagttagatttttttattagtatatgtgtggaatgggtaaaaataaactacatgacagatgcagtaaaatacgtacatgacaaaacagagacccaaatctgacgtgacaaaatggtgttatttttttcaggcgatcgaactaccaagcagccaggaacgcgctggagctggacctggtaggcgacccgacctggtgtccaccaacgccgt

SEQ ID NO: 5867 - DNA, 783 bp, Oryza sativa
  Clone ID: PAT_MRT4530_12611C.1
atgaatcttgatcgtgatcctttcccggtgaatgcaattgatttcaatgaaaataaggtgttgatttggtcggagcaagccgaatctactaaagggaaggaagtggtcattggagaacctaggcctaaaaatgatggtgccaaaaaatccggaggttggggaggaccgaggaggtcagcacatgagcgtttgtcttcaccaaacaatggcctgttttatgctaaaaatcaggtcaatgaagaaaagagggaaggaaagcgcgtcaaggtggaaacgagaacttcggaggtgattactatcaaggtggggtctcatgatgtgccaataccttctggagatgaagccggggagtcccaaggtcctaaagacgcagtttttgagaagcctaatgagtcaaaccgtcatatgaagcctctttatattaagggttatattgatgggaagccggtctctaggatgttggtagatggaggtgtcgccgtgaatttgatgccatactcgttgttcaagaagttggggcgtggagatgatgagttgaagaagaccaacatgattctcaatggcttcaatgatgaaccaacgaaggcgaatggtgtcttttcggtggagcataccgtggggaacaagacgttaccaactactttcctcatcatcgatgcgcaagaagctaatttagagtggttgcaaaagagggtgcaagaatatcggtctacaaagaacgatattggagaaactattgaagactttgatggagtagaaaagcttggtcaagggtttacatag

SEQ ID NO: 5868 - DNA, 429 bp, Oryza sativa
  Clone ID: PAT_MRT4530_12612C.1
atgcggtggtggcggagtgaggcggccatgcggcggtggcggagcgaggcggccggtggggccgcgccagtcggcggcgagcaggcggccggtggcggcggcggacgggtagcggcggccgtccgggagccggtcgggcggcggaggcccgtgcggtggtggcggagcgaggcggccgtgcggcggtggcggagcgaggcggccgcacggcaggcggccatgcggcggccggtggggccgcgcccgtcggcggcgggcaggcggccggcggggccgcaggtggcggccggtggcggcggcggccgcgcagcattcgaagacaatgattccagggggcctgagaacggaaacaatgtagcaaaacagtgttactcaaaaccagttgaggatctattagcacagctggaccacatatttgttcatgaatga

SEQ ID NO: 5869 - DNA, 185 bp, Oryza sativa
  Clone ID: PAT_MRT4530_12613C.1
atctttactttagagagccaaagcaacagcaacggggggggtttcaattaaaccaccatcatcatcaaatcgcggggctgcctaggtacccacccatggagaacccacacgacaaacgggcttgcgccgccaacatcgccaccggcgagagatgcaatactacgggtccgcttccgcacgactcc

SEQ ID NO: 5870 - DNA, 210 bp, Oryza sativa
  Clone ID: PAT_MRT4530_12614C.1
atggtgacaaaaacaccagtcggcgccagtggaaccaagccagtgataatgaagcccattaacggcggcgaagtccaccaaccgtataggcaaaaacaccagtcggcggcggcgaaggccagccggtcggcgaagacgtggacgcccatgaacggtggtgcggaggcaccactcggcggcgacggaggcgggccggcggtgacgtcgtag

SEQ ID NO: 5871 - DNA, 282 bp, Oryza sativa
  Clone ID: PAT_MRT4530_12615C.1
atggcttcatgggcagccaaatctagagttagggcaacagcagggtggctcctcagcaatggtggcgatgcagggcggtgcagcccgttcgactgcagcagctccatccctcttccttggagcagaggcagggacaacggtgctccgagcaagagtagggtcaagtgctatggcctctgcctcacccccaagtaccttatcgtgttcccctttatctttcaccgtcactgccacccatcccttcgaggcttcgacaatgagaagaagtgccaacaacagtag

SEQ ID NO: 5872 - DNA, 1392 bp, Oryza sativa
  Clone ID: PAT_MRT4530_12616C.1
atgggccggccggcacaagacgcgcgcgcgggtggggaggggagagagggagccggtgggctgggtccatcccgcgtggtcccgggtgggacccgcttgtcggcgactcggctcaccgtgagcgaggtgcacgcggggcgtgctagggtttggggagggaggcgcggtgcatgcgcgcggttcgcggaggacgcggtgcggcgggcccacgcgcagcctcacggctcgcggtggaccgcgcgcgcgagggggcgaagggaaacggtggaccggggtctgcttgacccggtcgcggccgaggtggcgctgacgtggcgcctacgtggctgccacgcgggccggcgggaggtagacgacgacgccggccggaacggacggcggacgacagcggcgagcggcggagcgaaccatggtgatacaggcgaaggcgagcataccgggatgttgcacaggacgaggggagacgagccaactgctcggattcgccagagggagtccgtcggcggcggattgtggcggcggcaaccggcgaagagaaaagggggaaacggcgacgaggtcacgaggggccgattcccggcgatgagagcatctacgcggctacaggaatccgttgctagcgtcggattgggcggagctacgccgagcgaggccggcgacgagcgggtgctacggagcacgggcggcgacggcggcgagcacacagcgagcggcggcaacggagtggaggcggtgggacaaacgagaggagaagggaaggagggcgcctgggcttatagggcggcaatgtcagtttggaaaccgaccttgggtggtcaaggcgcgagctggcgctcggcgcttgcggccaaaacggcgacagaggcggatgacgccggcggggaagagaaaagggaaaaagggaggaggaaaagggggcttgcccccttgccactttggggaaaaggaggagggagagagggcgacgcggcaaggggggagctctgcctccgtccattggaggcacgcgcggggagaggcggggccgagtcgatgactacggcgatgacggcggggcgcaacgacatcggcattgtcagattcaagtattattggcatatgtatccagttaatcgccaaccgaacgccctccaggcaagccaaagcttcagcctgggtagcagagctgcatcttggaagcttcttacaagctgcaagaagaaccaggcccctgcaatctctgacaattattccagcacaagcatcacccgtctccttcctgaatccagcatcaatgtttaccttagccacaccttccggtggagagccaaccatagtttcctttcccctgatgttgctgtgcttgaagatgcctccacagcatttttagataggttccaggccaacatgtaa

SEQ ID NO: 5873 - DNA, 859 bp, Oryza sativa
  Clone ID: PAT_MRT4530_12617C.1
ccgaaaccctaaaactcatcgtagccgacttgctcctggaagaactcctcatcaacgggatccacttcatcttcttcagcaactgggggaggattatttatatagagcaaggtttaataacctctgcagagggggtacactttacccacacgacattactaacccgaatcacccagcccgtgcagagcggccacgtctggagaccttgaggctttcatgacaaggcatttcgaaagccgacacaggttcaccatatgccaacgagaggggtcccagaccaacaccaggtccataccgcgtggtccctggtgggacccgcttgtcggcgactcggctcaccgtgagcgaggtgcacgcagggtgtgctagggtttggggagggaggcgtggcgcatgcgcgcggttcgcggaggacacggtgcggcgggcccacgcgcagcctcacggctcgcggtggaccgcgcgcgcgagggggcggagggaagcggcggaccggggtctgcttgacccggtcgcggccgaggtggcaccgacgtggcgcctacgtggctgccacgtgggccggcgggaggacgaggggagacgagccaatggctcggattcgccggagggagtccgtcggcggcggattacggcggcggcaaccggcggagagaaaagggggaaacggcgacgaggtcacgaggggccgattcccggcggtgagagcatctacgcggctacgggaatccacctcttgcgccggattaggaggaaacgcatcgaggaaggtcggcgacgagagacgcttccgagctcgggcggcgacggcggcgagcacacggcgagcgacggcagcagtcggggcggcgccagctag

SEQ ID NO: 5874 - DNA, 1034 bp, Oryza sativa
  unsure (1)..(1034): unsure at all n locations
  Clone ID: PAT_MRT4530_12618C.1
atgggccggctggcccaagaaggcagcccaaggcgcgcgcgtgggcggggaggggagagagagagccggtgggccgggtccatcccacgtgggcccgggtgggacccacttgtcggcgacttggctcaccgtgagcgaggtgcacgcggggcgtgctagggtttggggagggaggcgcggcgcatgcgcgcggttcgcggaggacgcggtgcggcgggccacgcgcagcctcacggctcgcggtggaccgcgcgcgcgagggggcggagggaagcggcggaccggggtctacttgacccggtcgcggccgaggtggcgccgacgtggtgcctacgtggctgccacgcgggccggcgggaggtagatgacgacgccggccggaacggactgcggacgacggcggcgagcggcggagcgaatcatggcgatacaggcgaaggcgagcacaccgggatgttgcacaggacgaggggagacgagccaacggctcggattcgccggagggagctcgacggcggcggattgcggcggcggcaaccagcggggagggaagggggaaacggcgatgaggtcacgaggggccgattcccggcggtgagagcatctacgcggctacgggaatccgttgctagtgtcggattgggcggagctacgccgagcgaggccggcgacgagcgggcgctacggagcacgggcggcgacggcggcgagcacacagcgagcggcggcaacggaagaaggcgagcgcccggagtccccttccgcgtccacgaacgcatcggctctcccggtgcttggcgatgaacggcggaggcgagacagagggacggcaatggcgctgtggcggtgagcgaaacgggaggaggaatcgatgggagggcgccttggtttataggacgacgatgtcggtttggaaaccgaccttgggcggtcaaggtgcgagctggcgctcggcgctcgtggccaaaacggcgacagaggcggatgacgccggcggggaggggaaaatcgaattccctgcagcnccgggggat

SEQ ID NO: 5875 - DNA, 939 bp, Oryza sativa
  Clone ID: PAT_MRT4530_12619C.1
atggtgcgcatggctggtgtagaccgggagtggttacacagcatggcacatgcgctggcactggacacatggacgtggccaagagaggacgttcctggcctgggggtagtcttcctcctcgaatccgtgcccgacaagatcagagataacgctttcgtctctcctgacagtatccggagacaccgtaggggactagccgtgcttatccctgaagtcgatatccggcgtcttgtcttggcgtatgttggcttgtatgttgtggcttctgttgttccgtgggcaacggcggcggcggcggcgcggcgcggaggcagcggtgatggagcccgcgtggcggggaggcggccgcgggcgcgcgcgaggcggcggccgcgggtgcgcgaggccgcggctgagggcgtgcgccggcgctcgctcgcaagagcaaccgggccctttctgacagcaaccgcatgtctgttgcctgtccgacaacagattgatgacaagaagggcaagcgaccaatgtctgaggaactgacagaaaaagtgcatgccaatgctgtgcaaattgctaaatgggaacctccaccggaaggtgtggctaaggtaaacattgatgctggattcaggaaggagacgggtgatgcttgtgctggaataattgtcagagattgcaggggcctggttcttcttgcagcttgtaagaagcttccaagatgcagctctgctacccaggctgaagctttggcttgcctggagggcgttcggttggcgacgaactggatacatatgccaataatacttgaatctgacaatgccgatgtcgttgctggactgaatataacacaagcgtcaagagcagaatggggaggcataattgccgagataagagtggcaatgcaatgcttgttgcaggtgcaagtgcacaaagtgaagagagattcaaatagaggatag

SEQ ID NO: 5876 - DNA, 749 bp, Oryza sativa
  unsure (1)..(749): unsure at all n locations
  Clone ID: PAT_MRT4530_1261C.1
cggacgcgtgggtgtggctaatcctcaagactggactgataaccgacctcagaagaaaaatggatctataaatgcgaagtatcctgacttcaaaaacaatgtatcaaaagaggcactttggcttgacactgcaccaaaagcagtgctggaaaagttggatgatttagtattcagtagtgatttcagtgctgcaaaaaaatacaggccttttggtggtgacaagggcaatggtacaaactgggcaaagaagagtcaagattcttcttctatctcaaaacaaaaacaaggggagttgtggcaagatctggtggacaatcctggaaaatggtgggataaccgatcagataagccttcaataaaatatcctgatttcaagcacaaggaaaatggcacgcctctgtggattggatcccagacacctaaatgggctatagatgcgcttccaccggcaaaaccatccaaggcaccttttaagcaagagaccttcctctcatgatttgtaagagatctgatcagtggtaagcccttccctgtgcaatatgtacctcaggtttgttctatttagtacaaatattatagttgtcttaaggagctggttctttttctttaggcaagtcgcagtgcctgctaatacctaattcaggtaggtattagcgaatgaaattattttggcttgactaccacatgcgttaatggaagcccatgtggcccggnttcattaaagttatgttaggatgtatatactagtc

SEQ ID NO: 5877 - DNA, 634 bp, Oryza sativa
  unsure (1)..(634): unsure at all n locations
  Clone ID: PAT_MRT4530_12620C.1
ccggccgggccctacccgggccgccgcgcccccccccctgggctcgcctctcctctccccaccgcgtggcgcagtggcgtcgcttcctctcccccaccggcgctctccctcaccccccaccggcgctccctttcctcctcgtcggggtgccgccgccgcccccctcctctcaagatccggtgggtcggcggctcccgacggcgcggcaagtcagcggctccatggcggcgcggttgatctccggcgtagcggcgacgcggcggcgcggcagctccccagcgcaacgacgcgtcgacggctccccggtggcagcggcggctcaggatctagctcccgagcttggcacctccacggcagcgaggcggcgaggtggtggttcggcgaggagcagcggcgcctccggctcgaccttccctctcctctcctcatcttcttgtgttgatattttgtctcgttgatattttgtgatgattccgattgggattttgtttttgtgttggattgcgatgtgatgatttgggatttggagaagcaaagcgagggttggggggtgctcggctgctccccttttcttttccaaaaaaaaaaaaaaaaaaaaannnnnnnnnnnnnnnnnnnnnnnnnnnnnnnnnnn

SEQ ID NO: 5878 - DNA, 107 bp, Oryza sativa
  Clone ID: PAT_MRT4530_12621C.1
atggctttcaccaatcatggaggattcaagatcttctgtgaggaggccgcgacggcagtggtgtgcagagaaagggagcagcgcgctggtctatctgccataacagg

SEQ ID NO: 5879 - DNA, 168 bp, Oryza sativa
  Clone ID: PAT_MRT4530_12622C.1
gcggggatgcaggttcgaatattggagacaatgtcagatgcctcggaggactacatagaggttgttgcagagtatggttggctgtgttggacattgatatttttatgtttgctacactcatataataggtgcagcctagggtgcacttagtggagctaggttgctctt

SEQ ID NO: 5880 - DNA, 723 bp, Oryza sativa
  Clone ID: PAT_MRT4530_12623C.1
atgtggcgcgtcgtgcgcgcggcggaggcgctggccctggccgtcctcctctcccgctcactccccctcctccccgtcgcggcgggcgcggcgggcgccgtgctccgcgtcggcgcgtccttcctcctccacccgtgctccgtcttcctcctcgccaacggcatcgtggttctcctcgtcgcgctctcccgccgcgaccgcccctcctcctcctcctcgtcctcttcctcatcatcctgctccgacgaccacgacgacgtccacgaccagttcctctccttcgcgggcgcgcatctgccgccgctgcccgccgcgatcaccggggcggccgcggcggatcaggaggagggcgcggtgttcgaggacaagcaggcggtgcacgtgacgccggcccgcgccgccccgcggcggagcaggtccgagaaggtcggccgcggcagaaggccgacgagggcggcgtcgccggagctgcgccggtcggagtcggagcggtgccgccgccgccgccgctccctgtcgtcgtcgtccgcgtcgctggcggactggggcatggaggaggacgacggcggggagaaggaggaggaggagttccggagggcggtggaggcgttcatcgcgaagcagcagacgcggttccaccgggaggagtcgttcgtcctggtcgccggcgccggcgccggagacgagacgagtgctgctgctgctgctgttgaagtgaagtga

SEQ ID NO: 5881 - DNA, 363 bp, Oryza sativa
  unsure (1)..(363): unsure at all n locations
  Clone ID: PAT_MRT4530_12624C.1
ggnggggggggtttggtttggactggtaattcgggaccggggggtgtcccggttttttttttccttttggggattcggttttgaggtttgccttacaatgggttttgcttttttttagttgaatttgttttccggttacatttgacaaaaaaatacaggtctttaactttaagtgctagggttcggcaccggatacaaggaccaacttcacttgttttgttttggcgaccttttacattctttaaaagggaaactttcctgtccatttattttaaggaaaaccccccgcagagggggattggtttttggtctccggcgctgtttttttttttttttttaagagggaaagggtttttttttttt

SEQ ID NO: 5882 - DNA, 531 bp, Oryza sativa
  Clone ID: PAT_MRT4530_12625C.1
atggtgggtgctcgacggcgatgggtgaagggagaggtgcgcagtgggcggcggccatcggagagaagggagaagagtggtggccagcaagggtggcggttggcgacagaggctcgtgggcggccgcacgctgccgtcgggccatctcgatcttcgcgcgaatttgaagttgaggaggatgatgacgccaccacagcgtcccgatcctcggcatcttcgacgcggagtgggtcgaaggcggaggcggagcagtcgggctgctatggctcggaggaggcggggtctgccgctcctctccccatccgcagcatcttcctccacatagccgccgccatccgctgtcgtgttcttgtccgccgcctccagaagaggaggcgtggagtggcgaggcagctcgtgctccgtggacaggaaagcggtttgcggtggaggatctccgcgcggctcgtcggcttcgcagggagacggatgcggctaggaggagggagaggagggacgggggtggcatggcgagtttgtatggcatcctaa

SEQ ID NO: 5883 - DNA, 546 bp, Oryza sativa
  Clone ID: PAT_MRT4530_12626C.1
atgcctcgcgccaccatcctcctcctcgtgctcgccctcgtcgcgccgcagctgtcagccgccgacgccgatgccctcgtcgacgacggccacaccccgccgccgttccacatgtgcgggatcctgccggggccgtacgctgccaacagcacctacgaagccaacctgcggtacctcgccgccacgctcccagccaaggtgatgaacggatcctcctcctcctccgtcgacgtcctcgccggcgagcggccgaacctgatcgccgcgtcggcctcctgcaactcgtcgtcgtcggagtaccacgactgcggcgcctgcgtcgccgaggccttccggtgcgcgcggcggctgtgcccgtacagccggcacgccgtggtccacctcggcggcggcgcgtgcagcgtcaggtactacgacgtcgagcgcacggagcatgcggaggtgctcatggtgtggtgtcctccggaggcatcaccaaggagcgtgagtgatctctactcgctctacaaaacttgtcttttggattatgaatatggccatgtttag

SEQ ID NO: 5884 - DNA, 1047 bp, Oryza sativa
  Clone ID: PAT_MRT4530_12627C.1
atggagagggaagcaggaggtttgaatagcgaaaccgtggagcgccgcgtcggtaaagtgatgatcagcagccctacgatagcgagcaacatccccgtccccctttgccagaagggggtggccgaatgcgaggctgtgatcaacgctctccctctgacggatgtcatcgggccgcttgcggaccatcaggcggcggcgtcattgaaagagggcgtcgccaaagaggcgtccgacgttgctgctgctgccacgacgagtggcagcaacgttccgaagaaggggaggaagttctcctccgtgcccgggacccactggaaggcgcctaacccatcgggcggcgcgggcaaaggcgacgcaagacgggtccggtgcggcctccagcatgtcccctgtggcggcctcgacagatgtcgtgggggagctccaagccgagataaagcgcatcctccaggctggtgctcgcgcgtgggccgcgagatcaaggaagccagggcggcggggtcgtcggcaaaccacagcgccgagcagctggcgcgtggtctggcggaggcccgcgaggacctcctgaagatgagggagttggtggctggtaatgaatggcggcgacaagggctcgagcaccggatgtcagagctcgagaacttgtcggagatccgcagctcgctgcgggtgtcttacaccggcctacaccaactcgtcggggagtgcggcgtgacgaccactatcccggcgacccctgacgagttctcgctgacgtcctcgctcgcggacctggctgtggcgatggaggagatcccctccaagcatgcggccagaatcggcgtggagacgtgtaacgggatctacaccggggcgtgccatgtcctcgcatgcgtgaagctggcataccctgacctcgacatcaagagggttctggatcaggagctgttttcctttgttttcttagcatgtgattccgagtaccttgttgtcgttgtagagatgtcgacattgaggatgtccagcagcgcgggcagcctgagacgccggtggtcatcccggcactag

SEQ ID NO: 5885 - DNA, 1789 bp, Oryza sativa
  Clone ID: PAT_MRT4530_12628C.1
atggcggccatggccaccccgcagcaatgctggctccccacccgcgcgcgcgctccccctcctcctcctccacgcgcaccctcctccgcgtcccccgtctccggagctcccgcctccctccgcttccgtgggcgccgcgccgcgtcggcgtcggcgtcggcggcgaggaggaggaggggagcctccctgccctgctcccccaggtgcgcgttggagacggctggccctggctttgatcccctagggctgtacaacgatgggccttcgaggaatgacacgcagtccccgctgtcgaacttcttcggagtactgtcgccggtgttcgggagctcgagcggcggcaggaaggagaagtcctatggacgaggagcagcagctgcaattgaagatagttccattgacattggtgacttcttcaagggtcctctacctgggaagttcttgaagctccttggttatttggccttgtctcgacttggtatttatatacctctgggtggagtgaaccgggatgctttcgctggtaatcttgaccagaacagtctactaggcactttggattctttttctggtggaggtattggccgacttggaatatgctcccttggcattgttccatttatcaatgcacagattgtgtttcagcttcttgcacaactttatcccaaattgcaagatcttcagaaaaaagaaggagaggcaggaagaaagaaggttcttcagtatacaagatacgcatctgttggttttgcaattgtccaggctattgggcaagttctttttcttcgtccttatgttaatgacttcagcacagaatgggtcctcacatctgtgacactactgacgcttggatcggtgtttacaactttcattggcgaaagaatatctgatttaaaactcggaaatggaacatctcttcttatatttacaagtataatatcgtatttacctgcatcgtttggaaggacagttgcacaggcatttcaagatgggaattatgttgggcttctgacaatcatattatcgttccttttcttagttcttgggattgtttatgtccaagaagccgagaggaaaattccgctaaattatgcttctcgatacagtagtcggagtggagggctccaacgatctgcatatctaccatttaaggtcaatagttctggtgtcatgcctataatattttctacatcttctttggctttgcctggtactttggcacgatttactggcttagagtttcttaaaaaggctgccatatccctaaatccaggaggtgctttgtatattccaactaatgtactgcttatagcctttttcaattactattacaccttccttcaattggatcctgatgatcttagtgagcaattgaagcggcaaggtgcttcaataccgcttgtacggccagggaaaagtacagctgccttcataaaaacagttcttagtaatatatctgtcctaggatctgccttccttgctgttttagctgctggaccatctgtggttgaacaaatcactcacttaacggcatttcggggatttgctggtacatcagtgcttatccttgttggatgtgcaacagacacagctcggaaagttcaggcagaaataatttcacagaaatataagaacattgagttctatgatgtcaaccgttttgaccaatgattaatgacactgatcattcttttgaacttgtaccaaatgttctgttgtattataattgggtcatgtggtagcatttaagactgttcaattttatgcccgttttccttcaaaaaaaaaa

SEQ ID NO: 5886 - DNA, 789 bp, Oryza sativa
  Clone ID: PAT_MRT4530_12629C.1
aaaaaataaagaattagaaaatcaattcaggaaacgtgatcatgaagaattagaaaattatcgcaactagttgctctttagaacgcaggctaaaaaagtaactccatatgtcaatatcttgttaatacgattcttatgaacttcatcggcttatccgtaaacagtgtgattcactgagcttacgggcgtgtcggtactagaaacatcttcattttcagcaaccgtctgttcctttttggatcaatgggccaacgttgctggactaagcaagccgaggcacagcgttggcgcaatgacttggtttgccctgattggtcgcgtgacgcgtcctcatatgcgaagcaaaggcaaagcctaagcccaccgatcgatcgtgtccacccccaccgtttcgctcccacctctctgccacgccggtgcgcaggcgggcatgaacctgacttcacttaaccggcaacggcccgcggcgtccgtcaactgcttacctcttgcggctggtatttgacttccggcttttgtttccttgatactttactctcatcgctccctgcccatctcccacggcaaggcaccagaacttgcacctgcatagatacagatcatccaatcgatcacagcaagtgctgagccagctaattctaccggaagaacacatagatcatttcttcctgctgtatagtgcgtgatactactgcgtatttcttggttattcagatcaagtcaaacagcgttagtctaagcctatataacgctcctcaacattatttatccatcaattattacgggtca

SEQ ID NO: 5887 - DNA, 516 bp, Oryza sativa
  Clone ID: PAT_MRT4530_1262C.1
gtaacccacccccaataagttccaaatgccaagccacaaccaaatgtggtggccccaaaacaaaggccttccaaggccttggttagccgccacaccacaatcctcaacctaacccaagcccccactttagtttagccctttcaggccagaatttgtcccaagcaaaacttaaccagctggcaaccaaggtcaggttttgtcttacatttgatcaagactcatagctcaaagctcaaagcatttgctgcgcacattataactgtgccatgcacatgatgtgggtatgctatcctgaactgactgacacttgtctgccgaggacgctatgtccccacccgttgggtggtgtgctgggtgacctggaatgtggtgaatgagtgatgaatgggtgtgcaaaatggttgaaaaataaagtgcaatgcatgcatgcaatggcagtggacacaagttggaaacttgatgtcatataaatctaaataaaatcacctatttaaataaaaaaaaaaaaaaaaaaaa

SEQ ID NO: 5888 - DNA, 395 bp, Oryza sativa
  Clone ID: PAT_MRT4530_12630C.1
tttgaaatggctcaaacttatttgaaaccgacaactggagggattatagttgatgcaagtggtggaagtggcctgttttcaagattatttgttaagagtgaactatattctcttgttgtggcactagatttctcagagaacatgttgaagcagtgcaatgaatatgtcaagcaggaaaacatttcagataagacattagccttggcgagagctgatatatcccgactcccttttgtgagcggttcaattgatgctgtccatgcagctgctgcgatccattgttggccatccccagcttgtgctgttgcagaaattagtctagtccttatacctgggggcgttttcgttgcttccactttcgtagcatatattcttccaccagctgtaccggtatt

SEQ ID NO: 5889 - DNA, 1407 bp, Oryza sativa
  Clone ID: PAT_MRT4530_12631C.1
agggaacacaataaatttgtttatgctctgtatatactactagtagcagcatgagtcgatatacaaaagttacaggattgcaagagccgagtcgccgagtcctatacacaaaaaaattgaggtacaagcaaccaaaatggttaggtaaagcaaaatatatgtatgtactcactattctataccacatttccctcaggtaaaactattagtccaactagaaagggcgcggagaatcagtgcataatcaatgattttcaggacaaggttgagaggactgtccagttgatcaattagcttgctttagtagctgagaacattatatagaatccatttctgacaaacttgaaatcaataagcccacacgctctgcaaagatcttcgaactccgcttctgataagaagatattactgccggtaaattggctgatgtacgggcgtcctatcctcaataccggtacagctggtggaagaatatctgcaacgaaagtggaagcaacgaaaacgcccccaggtctaaggactcgactaatttctgcaacagcacaagctggggatggccaacaatggatcgcagcagctgcatggacagcatcaattgaaccgctcacaaaagggagtcgggatatatcagctctcgccaaggctaatgtcaaatgttggtgattggggaactgaggaccatacttatctgaaatgttttcctgcttgacatattcattgcactgcttcaacatgttctctgagaaatctgattgagctagacccagtttggatgcaaataggacttttctggcttgccttaacgaaaatggttgtgtgaacatttgcgcatatatgttgatcatatccctctctctctctaggcctgggaaaccactccaaatgaaattttggcgccatcccctctcataaagaaatgataccagcggagtcctgaaaacttcagttgtcactgtcgtggattcagagtactcagtagaaccaactgctacagtcatatcccagtaatcccctctattgggataaaatttcttgcaggtagaacactcaagactagaactagaagcagcactgaccggcgcggactgatcgctcgagcttatgagggggtagtagcagattgggcatgccagctttctgagcttgttctctgccgccggttcacgctccaccgaagattcctcgacggcctcgtcgggggcggcggtgacgaattcgggggtgacgctggcgcgcagggccgagcgcgggatgcccttcgcggaggcggacgctccaggcgcgcgccgccgcgccgcggcgcaggacagcaggcggtgcccgccgcggccgccgcagagcgccacggcggagcctgcggagcagcgcgaccacatcttctatagtgtcacctaatcattcctgccg

SEQ ID NO: 5890 - DNA, 274 bp, Oryza sativa
  Clone ID: PAT_MRT4530_12632C.1
cgtttctcaaggggcgggcgggagtatgattttctctgacaaacgtcgagccggtgttggaggtctcaagcatccatcacagagccatgaagatcttggacatcctctgtctcctcgaactcggagggaggggcgggtcgcgacagtgtgatgcttgcacctatgggcaatggcagaagcagatgcatatgaaagagatcacgaacccctgcaaagagttcgagaggccccagtgcacaccgaggagacgacggtgaaagcaggggagaaagag

SEQ ID NO: 5891 - DNA, 416 bp, Oryza sativa
  Clone ID: PAT_MRT4530_12633C.1
ggggtaacccaacattaaacaatccataaatataaatttggtggataggcaacaggggttaagactaaccttgggggagaattaaggtataaggggggggggggggaaagacacaccctgccgaaaggatgatcactggaggggcaattcataaaagaggtcatggggagaaattttggaactttcggaagggcttcgggggtggggaagggttttttaaaaccttttttggggatttgggttttgggttaggctttttcccaggggggggggttttttttatagggcccggcagaaaacccttttttagggcaccccctcttgggggtgcggagggggggggccccaagctctgcgggggccaagggttggggggcttccaaacttgattttttttctttgggaaccccactttt

SEQ ID NO: 5892 - DNA, 321 bp, Oryza sativa
  unsure (1)..(321): unsure at all n locations
  Clone ID: PAT_MRT4530_12634C.1
atggggggccgaaatggaattcgggggcgggggttgtggcgacaggggagcgcttggggtattggagtgcaggtgacggggcgggacgcagcccagaacaacaggcgaggttgggcggtggcagctgcgtgtgaaggagcggtggcacagctggacggtggcggctgcaacgcgtcgagtgaggagggaagggagccgtcggtggccggcgccgctgtccgggcgcaccgcttgccggagccgtcactctcccgtcatcgcagccgntccgtcctgggcctcccaccaccaccgccagacctcccctgcctgccgtcatag

SEQ ID NO: 5893 - DNA, 822 bp, Oryza sativa
  Clone ID: PAT_MRT4530_12635C.1
gcacgagggcgaccactcccccccccgccccccgctggccgcccccccgcccccccacccgccccccgccctccccacaggtgacgacctcccccgcgcgctctctgctgccgtgcccgccaccgcccgacacgcgggccgctgccgtcgccatcctctcgctcctgccgccgcatccgccaacaaggaggccgggaccgccggatccggtgactccggcctcctcgccggcagatccggccgttgtgaggggaggggaagccggcagctgccctctacgcccggcaccgcccctctctccctctccatcctcttcgtttctggatcggcggacgcctgcgattaggcggcctagggctcatggtcaacagggacacaccgctgtatagaagtccagctgctccgaaagattatcttcacccgcagccccctgttgttgccttgcgctacttgcttactgcctctgcagcgaagtctagccaatctggaagattgacaaaattgattgcttgcagaacaaatgacaatgacctgattgggagaagtaggtaaatctgagctggctttgacatgtagtagtgtggcttttgcttcatcaaacaagtgcatcatcataatatggatgtcctgagaggactgctggacaggcaatgctgctgtggtggtgaaagtattatgcataacattccttatttttgctttcaaaatgttaatcagattgctcaaactaacagtacttcatcatttccgatatgtgctctgattactgccggtaaatgtttttttccttaatgttcaaaatcatgtaggcttactgggatg

SEQ ID NO: 5894 - DNA, 466 bp, Oryza sativa
  Clone ID: PAT_MRT4530_12636C.1
ggcacaaaaggcttttattcaaaaaaagaccaacaaagaccacaacaaggggcccaaggaaaaaaacccagggtctccccacccggggggggcccttacataaaaaaaagggaaaaagctagggccccccttaaccaaataaagcggaccccatggcccaaaaaattaaacaacagttcccccccccctacaagggactcaggagcaagcagcacccaaatattaccgaaaattggaagcatttcacatttaaacagcccccccgaacttgaaccactcgggggggaaggagccggccatgtcaaccctctcggaggggggagccccaaaaaagcccctttgggcccgcaccaggggggaaggcaccctgcccccccgggaggagtcaaaaaacccaaaaccccccgacaggccgggggggcggaccccattgttgaggggaaggaaaaccaccctgccccatgcc

SEQ ID NO: 5895 - DNA, 354 bp, Oryza sativa
  unsure (1)..(354): unsure at all n locations
  Clone ID: PAT_MRT4530_12637C.1
gtccgcattcctggtcgaccagcgtncgctcgacaagctgtgatattagcaggatggacggggagcatcttgtaggaggacgtggcagggtagctgatgctgttgtaacctccgtatgaacgtgttcttgctggggtagacggatgggcgctcaacaggaggatcaagaacgacggcaccaacatcgttaacagacggggggagtaggcgcaatcgtctgattggatgctgagggcaatagttggctggaggaatcatatgtacatgccggtgcagctccgggtgattctccacagctntggtgcatgttgctgggggatattncttaaccttcgggaagggccatgtctttga

SEQ ID NO: 5896 - DNA, 291 bp, Oryza sativa
  Clone ID: PAT_MRT4530_12638C.1
atggctggctgcttcttcttcttcgggaccagatttctcggcccatctaagaagtgggctagttgggccttaggcgacgtgaagcgggtggtccaaaggcccaacgatgatgtgctggacctgcaaatgctagcacaacgctcctcggcttccctccgtgtggcggcggcggcggtggcgccgtggcggtggtggcggcgaagcaccggaagccggcgactagcggagacggcgggcgcggacgatcaagcggcggcggcggcgtcggccggagaaccatggcgcaggtag

SEQ ID NO: 5897 - DNA, 534 bp, Oryza sativa
  Clone ID: PAT_MRT4530_12639C.1
atgaagacccccaccgcggccagaggtggtgacggcggggcgcggcggcccgtggctcggtgcggcaacctagggcgcggcggccgcgtgccccgacctccgaggtgccgccgcggtgcccttcgcggccaggtgggcggcgtggcacggcagccgggcgacgggggcgccggcgggttgcgcaggaaccggagtagcagtagcgtcaccggcgtcggtgcaagcccagatggcagtgtaaagggagctgacggtggtgagtcgtcttcctcgttgccggtcggcaccctcacccttcttggaactcctccccttctttgcggggagtttctaggttggattgaggcggcggctcgtcagcgggggaagctcaggatgccgaagcaatgccacctagtcccgggttctctttcggccaaaactggcgaggcggctagcgggtggtggaacggaggggccggcagcggctacgtcttcgggcttcgtaacctccttggggcgttgtcgagggttaccctctccctttctcgatga

SEQ ID NO: 5898 - DNA, 186 bp, Oryza sativa
  Clone ID: PAT_MRT4530_1263C.1
atggggtgctcaggactgggtgagtacggttggggaagggaaggtgcaaaggggaaggttggcgcaggggctgctgggggccgacggtgcttgaggaggcacagatgcagcagggcgacggtgctagaggagatgcaagggtggctggctggcgctactggactttatggtgtttgctatagctga

SEQ ID NO: 5899 - DNA, 1125 bp, Oryza sativa
  Clone ID: PAT_MRT4530_12640C.1
atgtctcaagaaggtcccaacaaccatcctcaaggcacccaagaaacccatgactgccccttcaccatcgccaccaacacaccgttaggctcgacaaagatgggctactccgactctagaaagtctgacgagaataatacctcgtcaaagccagcaagtccagtggtgtctagtgatgttgtagagatcaaggaaacatgggaaaatgttgtcgttgcggatgaagagggggaaggtggcgaggatggcttcgctagcgatgctagtgaatctaagtccaagagctcatctgatgaagttgattatgagctcttggatcttttggcaggtgcaagtgaaggatgcagcggaggaaacaacaacgatgaagtgaaaaactttgcctatgcagaccacaagatgcatgttttgagagagagggagagaaggaaggagatgaaaaacaagtttgagattctgcatgccctcatccccaacctcccagaaaagactgacaaggccactatagtggaggcgaccataaactatatcaagaacctccaagacaaaatccataagatggagatgctcaaggtggagcgcgagcatgccatcgctctcgccaccgccgcaaccgccaccgccgctgcctctgcggacaccgcgctgcaggcaccgccgccgtcggaggaggagaatgaggagcacgactccgtggtggctgcagcgacgagggagatggccctggctgacatggtgcacgcctgggagcagcagcaggaggccgccgccaccggcggcagccatggcggccacgccgtgccgccgccgccgcccgctgcttcgctccagacgtggacggggcccaacatgacggcgagcctcaccggcgatgacggcttcatcaccctctccctgccgcatcagggcggccagaagaacctcgtcgccggcgcggtgagcgtcctggagcgccaccacatcgacgtcgttacggccaccgtctcggcatccgagcagggcgacaacctgatcagcctgcactgccatctgagtccagggagctctagctctcagaacctgacgcctctggacaagttcaagctggcaatgtcagagctgatgctttgggtgatctccgtctga

SEQ ID NO: 5900 - DNA, 995 bp, Oryza sativa
  unsure (1)..(995): unsure at all n locations
  Clone ID: PAT_MRT4530_12641C.1
gcttcgtctcgaagaggaaaggcggggctgnaggtgnaggagcgganaanaaggacctcttccatgtcgtccacaaggtgcccgcaggggacagcccgtacgtcagagccaagcacctgcagcttgtcgataaggatccggagacagccatcgtgtggttctggaaggcgatcaactccagggacaaggtggatagtgccctgaaggacatggctgtggtgatgaagcagcaggatcgcgccaaggaggcgatagaagccatcagatcattcaggcacctctgctcaaggcaggctcaggagtcccttgacaaccttctgatcgacctctacaagaaatgtggcaaagtcgatgaacagatcgatctactgaaacagaagctgaagatgatataccttggagaggccttcaacgggaaggcgaccaagacagcacgttcccatgggaaaaagttccaggtctctatccagcaggagacttctcgcattctgggcaatcttggctgggcttacatgcagcagagcaactattcagccgctgaattggtgtatcgcaaggcgcaaagcattgagcctgatgccaatagggcatgcaaccttgggctgtgcctaattaagcagagcaggcatgatgaagcaagacaagtacttcatgatgttgtgctacgcagaatctccggatcggaagatgacaaggtggtagcccgagctaagcagcttctccatgaacttgagccggtgacgcatgttacgtcgccaaataatgctgggctgagtgtcagtgaagagatcatggagagactagaccttgtgttgaacgaatggacgccgttcagactacaagaaatccaagtgtacacttcacttggcttgttggaatcaaaaactggaagactgaaatggtttggtttcaagtttgcagcacaaaatgtctctttctctgaactaatagtaactgtacaaatctacttccccatgtcagagaacagagcaaaa

SEQ ID NO: 5901 - DNA, 1338 bp, Oryza sativa
  Clone ID: PAT_MRT4530_12642C.1
gcacgagggcgaaacaaaccacccccgcatctctctctctctctctcttcgtcgagctcctcctcctccgctgctgctgccgcccatggcttcgtcgtcgaagaggagaggcggggctggaggtggaggagcggagaagaaggacctcttccatgtcgtccacaaggtgcccgcaggggacagcccgtacgtcagagccaagcacctgcagcttgtcgataaggatccggagacagccatcgtgtggttctggaaggcgatcaactccagggacaaggtggatagtgccctgaaggacatggctgtggtgatgaagcagcaggatcgcgccaaggaggcgatagaagccatcagatcattcaggcacctctgctcaaggcaggctcaggagtcccttgacaaccttctgatcgacctctacaagaaatgtggcaaagtcgatgaacagatcgatctactgaaacagaagctgaagatgatataccttggagaggccttcaacgggaaggcgaccaagacagcacgttcccatgggaaaaagttccaggtctctatccagcaggagacttctcgcattctgggcaatcttggctgggcttacatgcagcagagcaactattcagccgctgaattggtgtatcgcaaggcgcaaagcattgagcctgatgccaatagggcatgcaaccttgggctgtgcctaattaagcagagcaggcatgatgaagcaagacaagtacttcatgatgttgtgctacgcagaatctccggatcggaagatgacaaggtggtagcccgagctaagcagcttctccatgaacttgagccggtgacgcatgttacgtcgccaaataatgctgggctgagtgtcagtgaagagatcatggagagactagaccttgtgttgaacgaatggacgccgttcaggtcaaggaggctgccggtatttgaggagatagctaccttaagggaccaaattgcttgttgatccctttattcgcaaggtttttgttcttttgcttaatgtgcatacgggtgcgttgccttagaaattcatgtgcatatgtagaggctgttgtgggcttgtggcagtgcgagtaatggagtaaaggttgtgatgttcagatagatatcatatagctagagatcatgcaaagcatccaaggaatagtgtattttgtcttcatgttctatgatgcttataatgtgttgtaaacattctacagactacaagaaatccaagtgtacacttcacttggcttgttggaatcaaaaaaaaaaaaaaaaaaaaaaaaaaaaaaaaaaaaaaaaaaaaaaaaaaaaaaaaaaaaaaaaaaaaaa

SEQ ID NO: 5902 - DNA, 550 bp, Oryza sativa
  Clone ID: PAT_MRT4530_12643C.1
gcacgagggcacttgaaggtattgaagaagttcaatttgaagttgaactggttcagtttgttcaggtgagggatatgcttggcgatggccgcctcataaaacggcgtgtagttgatggaaaaggtgaatttcctatggactgtcctcttcatgatagcttgctaagagtgcattataaagggatgctccttgatgaaccaaagtcaatattttatgatacccgagttgataatcatggtgaaccattggagttctgttctggagaaggcctggtacctgaaggatttgaaatgtgcgttcgactaatgcttcctggtgaaaaatctattgtgacctgccctccagattttgcatacgataaatttccaaggccagcgaatgttcctgaaggagctcatgttcaatgggaaattgaattacttggatttgaaatgcccaaggattggactggtttcaccttccaagaaatcatggatgacgcagaaaaaataaaaaccacgggtaatcgactgtttaaagaagggagtcatacgagattaaaagtttgagg

SEQ ID NO: 5903 - DNA, 306 bp, Oryza sativa
  Clone ID: PAT_MRT4530_12644C.1
acagatcacatccactgggttgtatataccatattttactctccggataacagtcaacagagctaaagaattgatattttttgaagaatggcggagatcaaagcttcagctccacctcaaaaaaaaaagaaatacaaaaaaaaaggaaaaacgagatccgacacctgttcgatgagccgccgcgccgtgagcccgtcgaaggcgcgcaccagggagtacgcgcccgcggtgatgagcagcgtggcggcgcaatcccgcagcgccgcgggcgtcgccgaggccgcgagcgccgccacggccggggcg

SEQ ID NO: 5904 - DNA, 585 bp, Oryza sativa
  unsure (1)..(585): unsure at all n locations
  Clone ID: PAT_MRT4530_12645C.1
gccgggcgtgggtttaatcatgtctggtttgggatgtcttacgttgatgggaatgggatgacctcatgtcactcatctccattcttttgtatttccctctttcatgttccctgattctgtttcgttgcgtgtcaggagccggaccctggaaacacgatgttcgttgctctgcgctctcttgctgattctcttggctgattgttgctaggatcggataaaggctgaagcttgcatttcaattagtacccctgncgatttctatattcttgatgccccgttcatgatcaccgattataatgtctttacttccaccgcccaatttgctctgacgaatatatctttctgaccaaagcagatttccagtgccaatctttatgtacctcaagtcgcatcaattggtagactagagcaagttaggcagaattgctcttctttttcccccaaatgtacacagtgcatctttctttaatccattgtttgctggtcttcttgttcctggaccttatctcctcatgttagtggctgtggttgttgctatcctgttggaagcttttctcatgtgtctccactgggtgtcatattctc

SEQ ID NO: 5905 - DNA, 321 bp, Oryza sativa
  Clone ID: PAT_MRT4530_12646C.1
atgagcatcttcttcattatcatcggctgctacaccgctattgtttggatcgccaacattgtcatcttcatcaacatcctgtcaagcctcttcaacatagcctactctgctgccgttgatgggcaacttcctcatcatagccggctatctctgttgccgctaatcatcattaccgtcgccgactattttcttcatcttcatgatttgtggatttcgccatcaccgttgatgcgcgtctacgtcttcattgtcagcttgctttcatcgccaccgactgctctgtcgttgttgttgggcgcctttatcttcactgctagctga

SEQ ID NO: 5906 - DNA, 342 bp, Oryza sativa
  Clone ID: PAT_MRT4530_12647C.1
atggcgaagtcatcctccttcggcgtatacccttcgcccttcgaccttcgcctaggatgcacgtggtttcgacaggtctggtcgaagggtctcgtgacatactgccaacaagcccctcacgggcaagggtgagataggagcttcggccgagaccgtgcaaaccatgtggtatggtatgaggcgccctctttcgaccgatgctcctgccgaaactaacattggaatcctgcaaagaaagcagtgatgggcttttcttcgtgggctcgtcactgtgcggctcggtcaatgggaatttaccgtttcgcctacccttatgatacgtggcgggttgtgattgggtgg

SEQ ID NO: 5907 - DNA, 131 bp, Oryza sativa
  Clone ID: PAT_MRT4530_12648C.1
gggacaacgaggtgactcccactgatctccagaagcagaatgaggatagacagtctatataatcaagtaccacggagatattgctgttgacagcaaggagttggtgccagcggacactcatgaggatctgc

SEQ ID NO: 5908 - DNA, 924 bp, Oryza sativa
  Clone ID: PAT_MRT4530_12649C.1
atgcggatgagctgcaacgggtgccgcgtgctgcgcaaggggtgcagcgacaactgcgccatccgcccctgcctgcagtggattcgcagccccgatgcgcaggccaacgccaccgtcttcctcgccaagttctacggccgcgccggcctcatcaacctcatcaccgccggccccgagcacgtccgtcctgccatattccggtcgctgctgtacgaggcttgcgggcggatgctgaacccggtgtacggatccgtcggcctcctctggtcggggaactggcagctttgccagtccgccgtcgagtccgtcctccgcggcatgcccatcgcgcagccgccgccgtccgccaccgccgtgcccccgctccccacctgcgacatccgccacgtcggcgccaggagaggcgacgtccatggcgccgcggccggcccggttgccgacctccaccggcttgacatcagctcgcgcgccaagttcaagaggcccggcggcggcgccgccgccgcccacaggtccgaccatgccgccttcgagctcgtcttctccaagcccgccgccgccatggccgtcgatgtgataaggcaggcgcagccgctcaactgggcgcccggggcgctcagccacgagtcggcgagccacgacgccgcgccgccggagagcgagggccacagcaacgacacggccgacaccgtggacggctcccacgtcagccagtcggagccggagccgagagcgacgtcggcggcgaccgaggtgcacgacgccggcctagacctcacattaggtctaccgccgccgccgccgccggtgcaaaagaccgagccggcggacagcgacggcggcagccagcagcaacacgatcatcggaaggagaagccggtggagctcggcttggcgatctcaactaaagtagcagctcaatga

SEQ ID NO: 5909 - DNA, 255 bp, Oryza sativa
  Clone ID: PAT_MRT4530_1264C.1
atggcgggtgacacggtggtgcggcgaggtggccgagcgagctatatagcgggggagcacgtgagccatggcgggaaacgacacggcgagcggccgcgccctggcccgcccgtgaggcctcgccattggacgtatcgggcagaggacggcgggggcctcggctgcctctgcgccatgcatggcgacgctggccggggaccgagctctcgtcgccgcaccgcatatgcagttgacacaaacgccgactgcaggtag

SEQ ID NO: 5910 - DNA, 654 bp, Oryza sativa
  Clone ID: PAT_MRT4530_12650C.1
atggcgcggcggctgtggcacgtcgtcctcgccgtgtgccacatgctccggcgaggcctctgccggaagcgcctcatggtggacctccacgtcctcctcggccgcggaaagctcgccggcaaggcgccttcgtggtcttcttgccccaccaatccggcgtggggccgggccccacctagcggggtggagttcagctgcaccaccacgccgtcgtcgtacccgcactacgggctgttccccttcaagagccgcggcggcggcggtggccgccgcggcggcggaggcggcggcgagtatggcggcctcgacgcggcggcggtggcgcgggcgttcgagatgatgagcgccgaggtggaaggcacgccgtcgtcgtcggcggcggcggtgcagggcggcggcggcggcggctgggccaccgcgactccgtcgccgatggtggcgtggatcctggggcgaagccccgccggtgtccggccgctccgcgtcaccgactcgccgttccccgccgtgccggagaacggcggcggcggcggcggcgagcagcgcgtggacgacgccgagttcgaggacttcatcaacaagttctacgagcagctgcggatgcagccgtccgccgccacgccggactgccagctgcgccgccgcggcaggtag

SEQ ID NO: 5911 - DNA, 917 bp, Oryza sativa
  Clone ID: PAT_MRT4530_12651C.1
cccttcgctagtttatccaattaagctaatcagcccctcgaaacctcacaaaattaacaaccagtcccttctccgatccgttagccttcgtttttctctttagtgtgtgtgtgttgcgtttttgcaaatacacccctgagtattattattattgggtaaaattgatggatctcgcgacgacgccggcgcggcggcccatggaggccgggatggcgcggcggctgtggcacgtcgtcctcgccgtgtgccacatgctccggcgaggcctctgccggaagcgcctcatggtggacctccacgtcctcctcggccgcggcaagctcgccggcagggcgctccgcggtctcctcgcccaccacgccgccgtggggcacggccaccacctcgcggcgtcgtcgtcgtcgtccgccgcgctggcgtcgttctacggccgccgcccgcgggaggtggagttcagctgcaccaccacgccgtcggtgtacccgcactacgggctgttccccttcaagagccgcggcggcggcggtggccgccgcggcggcggaggcggcggcgagtatggcggcctcgacgcggcggcggtggcgcgggcgttcgagatgatgagcgccgaggtggaaggcacgccgtcgtcgtcggcggcggcggtgcagggcggcggcggcggcggctgggccaccgcgactccgtcgccgatggtggcgtggatcctggggcgaagccccgccggtgtccggccgctccgcgtcaccgactcgccgttccccgccgtgccggagaacggcggcggcggcggcggcgagcagcgcgtggacgacgccgagttcgaggacttcatcaacaagttctacgagcagctgcggatgcagccgtccgccgccacgccggactgccagctgcgccgccgcggcaggtag

SEQ ID NO: 5912 - DNA, 426 bp, Oryza sativa
  Clone ID: PAT_MRT4530_12652C.1
tttgtggttttttttgggttttttccgctttttcccccttttgttttttttttttttttttccaaataaacccccattgggggatggcctcgattttaatattacccatcctgggggaaggaaaaggaatcccggggggaccaaaggcggcagaaatccctaaccgttgggaggccccctcaaatggcaaaaacctggccctgggcaaggtttttaagcccgtgggcggcggctgcggcttggggggctcccccggccaggcccagactaggcccttaaaggggggccccatctctggggccaggcccttccggttttcaggggttccccccttgggcttctttggccccccaggatgaaggttgggggccccccggaatatctgggcataaaggcccatacccccgttccttcgggctgggggcc

SEQ ID NO: 5913 - DNA, 217 bp, Oryza sativa
  Clone ID: PAT_MRT4530_12653C.1
gccgttaagaagtccgccaaggtcatcattgagcgttactaccccaagctctcgctcgacttcgagaccaacaagaggatttgcgatgagatccgtatcattgcctccaagcgtctccgcaacaagatcgccggttacaccactcatttgatgaaggcgtatccagcgtggtccgtccggtatctccttcagctcttcagctcaagaagaggagcgt

SEQ ID NO: 5914 - DNA, 2387 bp, Oryza sativa
  unsure (1)..(2387): unsure at all n locations
  Clone ID: PAT_MRT4530_12654C.1
atccccgggctgcagccgcgtccctttcctccctcctcatcaaagccgtcacctcgctcgcgtcggcggcctcgactcccctcccccaaatcggttcccctccaaaaaaaccaaaccctcaaaaccctcgcctccgctctctcgcgcacactcgtgctccctcctccccccatccatggcttcctcccccgcctccgccgcctccgaggaggaggccgtcaaggcggcgaaggtgctgatggtcggcgccggaggcataggatgcgagctgctcaagacgctcgcgctctccggattccgcgatattcacatcattgacttggacacaattgaggtgagcaatctgaacaggcagtttttatttcggcagagtcatgttggacagtcaaaagcccatgttgctcgtgatgctgttctgaaatttaggccaaatatcaatataacatcatatcatgcaaatgtaaaggacgctcaatttaatgttgagttcttcaagcaatttaatgtagtcctgaatggccttgataatttggacgctaggcgtcatgttaatcgcctttgccttgctgctgaagttcctttggtggaaagtgggacaactgggtttttgggacaggttactgttcatgtcaaaggtaaaacagaatgttatgaatgtcaaccaaagcctgtccctaagtcataccctgtctgcacaattacaagcactccatctaagtttgttcactgcattgtttgggcaaaggagttgctttttgcaaaaatgtttggggataaaaaccaggacaatgatcttaatgtccgttcaaatgaaagcggcacttcgaaatcagatgtatttgaaagaaatgcagatgaagatcttgatcaatatgctaggagaatttatgatcatgtctttggttacaacatcgaagtggccttagaaaatgaggaaacttggaagaatcgaagaaggccgaatccaatatacatccgtgatacattacctgaagaagctattcggcaaaatggtagttcacgggacatcaataatgagcaggaagaaccatctgctatggtctctttgggtcttaggaacccacaagaaatttggagccttgctgataattcaagggaaatagggaatttagtatttgacaaggatgatcagttggctgttgagtttgttactactgcagctaatatcagagcctcctcttttggaatacctctgcatagcctttttgaagctaaaggtgttgctggaaacatagttcatgctgtggcaacaacaaatgctataatagctggtttgattgttattgaagcaataaaagtcctccatggtgattacaaaaaatatagaatgacatattgtcttgaacacccttcaaggaagatgcttttgatgcctatcgagccatttgagcctaataaatcatgttatgtctgctcagagacccctcttcttctggaggttaacacaaagacaacaaagctgagggaggtcatcgagaagattataaaaagcaaacttgggatgaacctcccattggtaatgattggctccactcttgtttttgaggatggtgagggcttagaggaagatgaggctgcaaattatgctctaaaccttgaaaaggtcttggctgaacttccagctccagttgttaatgacacaaagcttactgttgaggattttcagcaggaattgtcatgcagcattaacattaaacacagggacgagtttgatgaagaaaaagagcctgatggaatggttctatctggatggtctgctccagtggagaagcaagttacgagtaatgggggaaaccagtcggttgcttcttcatctggtgcagattatgctgacggtattgttgaggacatatccactaaacctggaatgaagcgcaagctggatgaggttttagagttgaaggagaattgcgatgcatccagtagtgctcaagttgtcgaagatgacgatgacgacgatcttgttatgcttgatgagaacccaaagttagccaagaaaaagagattgcaatagcaaccctacggtatctgttccagggataacagcggttgacttccgctattatggctaacacattgttccaacgtaacatcttttgtaacttaatgatgtttagggctgataacactgaggtatcagtaagcgtactcagggtcatttttttgctttagatacggtactttaggaatgtaatttgtagcgtttaggcacaggagtgactaatgccctgctgacagtcagctntaaggctgcncctgtgtttgtctagactggagcaatggtgatgttcttgtctactttctcgttaaaaaaaaaaaaaaaaaaaaaaaaaaaaaaaaaaaaaaaaaaaaaaaaaaaaaaaaaa

SEQ ID NO: 5915 - DNA, 227 bp, Oryza sativa
  unsure (1)..(227): unsure at all n locations
  Clone ID: PAT_MRT4530_12655C.1
tgggcgacgagatccgccgcgccggcgccgggaaggccaccatcaccacggcggaggcgctcgaccggcacgttgcgttcgcgcgctccgccgcgccgcgcgcggggggcgccgcggcggaggacgacctcgtcgccgccgtctcgaggctgttccgacgctgcctcgactcgccaccggagtncccggccgagccaccgacggcgtctgaggggaggaaggtcgtc

SEQ ID NO: 5916 - DNA, 491 bp, Oryza sativa
  unsure (1)..(491): unsure at all n locations
  Clone ID: PAT_MRT4530_12656C.1
tggtcggcctctggggctccggcggcgtcagtggggctccaccagatggtccgcgacaactacacgcaaggactcatccgggcgttcggccgccgccgccatgacgaagctctcctccacaagtggttctcgcagctggacgtcgagtgggttctgctcctccacgccggacaaagagatctagactcctcctccgtcgaagatttgatggcgttgatggagcggtggatgagagctctcctaatcatggtgcaggtcctctccatgacgctgctcgagctccgagacagaaggtcgtcgtcatcactcgccggcaccgacgacgacgatgccttcctgcttcgcacaaagggatcggcaggcaacaggtcaccggcaccggagctgccggacttcgtgtgcgtgcaggaggttgtgcagttcgcggaggcgagcatcctcaggatgctggccttcgtcgacgccatcacactagccgntctcaacgacga

SEQ ID NO: 5917 - DNA, 801 bp, Oryza sativa
  Clone ID: PAT_MRT4530_12657C.1
atggccgtggcgttcccgcctcacatcatggtgctgagcaagatgcagcggctgtacgacgcgtgcgacatgatcttctcttcgccggcgtccgcggcgccgaccatcggggagatcaggtggcttcaacacctccttgatggcatggaggcggcggacgtcgggatcgatgacggcgagtcaccgccgtcgtcgtcgtcgtcttcgtgttcgtcgtcggacgacgaggtgagctcgaaggacggccggctcctgccggcgcgggcgttcacgcggatcacctacatgcacatacaccagtgcgccgatttctcgatgggcgtgttctgttttccggcgggcgccacgctgccgctgcacgaccacccggagatggtggttttgagcaagctcctgtacggctcggttcgagtcaagtcgtacgattgggtcaccccgccgccgccgtgctccagaaagagtggtttggcgagggtggtggcagccgacgaggtccggcacgcgccgtgcaagacgtcggtgctgttcccgcggagcggcggcaacatgcacgcgttcaccgccgtcacgccgtgcgccatcctcgacgtgctcacgccgccgtactcggaggagctcggccggccgtccacctacttcaacgacatccccatcccatctctgccaggttttgcttttctggaagagacggacttgccggaggatttcagcgttgcaggggcaccgtacgtcggcccagagcttgagcttgtggtcgatatggatgatgatgacgacgattacgatgattacgacgagtag

SEQ ID NO: 5918 - DNA, 360 bp, Oryza sativa
  Clone ID: PAT_MRT4530_12658C.1
ggtgggttggcttctcctccccctctttaccttttcctcctcggttcggttccgtggttcgtctagggtttattgtgttgagatggcggcgccggatgtcgagtaccgctgcttcgtcggcggcctcgcctgggccaccgacgaccgctccctcgtggccgtcttctccacctacggcgagatcctcgtctccaagattttcatacgactgggagacggggaggtcacgtgggttttggcttcgtcaccttctcctccgagctgttgttgcgcgacgccttcgtgggcttgaacggtctggatgctttcggccggtgcttccccgtccttgtaggccttgtcccgtcgctccggcggggg

SEQ ID NO: 5919 - DNA, 573 bp, Oryza sativa
  Clone ID: PAT_MRT4530_12659C.1
atgggcggatcaaggaacaacaatggcgggaaaacggcggaggcggcggcggcggcgagcggcacggccaacaccgtcgtggcgctcgtgctcctcctcgtcgccgcgtcggccgtcgtgttcttgctgtcgccgccgacgccggcggcgacgcggatcggccgtcacggcgacggcggcccccgccgcgagccggtggagctggccatcgggctcgccggacacgagagctggctcgacgccgtccgcgcctgggcgaagctggcctgcctgaagctccggccgccggagccgcgtgagaaagtggcgtggtgctgttcgaggaacggcgcggcggtcgaggtacgatctgcgcagcccggcggcggtgaaggcggcggcgaaggaggccctggagatgggcaaggtggcggtggagcacgccgcagagtcggcggcgacggcggcggaggaggcagtggggaagaccacggtgaagctcaagaggaagttgtcgccgccgacatcgccggcgggggggcgcctcgacgaagacctgtgaccctgtgttctgtactcatgtgcattttataa

SEQ ID NO: 5920 - DNA, 2226 bp, Oryza sativa
  Clone ID: PAT_MRT4530_1265C.1
atgctcctcatcaacagcgtcacccttccggagccgagcggcgccgccggcgatggccactgccacggcgccgttgtgaacatggtcgtgccgccacgggagccgtgcgcctcgcccgtacatcatcgtgccgctctcgagggggtcgacggaggagcggaggaaggggacatcggaggcagggaagctgtcaagcacaacgtgctctaccgggcgtgcctcgtggacgccaacgtcgtgccctggctgctatgcctcctctcctccaccgccgtcgctatgcaggacaatgttgtggcgtcgctgctcaacctctcgaagcaccccgccaggcggatgaccatcgtggaggttgaaggcgtcggcctcgtcgtcaacgtgatcaacatcagtaccaaggccgaggcgcatcacaacgatcccggaggcgatcctgacgctggtccagctcatccaggacggcgcgtacggcagccggaagaatgccatgatcgaccgcatactccgcgccgcgcgttcgacttcgttggcgccatcgggctgcatcactgcgcaccacgcgaagtaggagctagatcagacgcgggggaagcaaaatacagggggccaaactgcaaatatattgccacgctggaccgccattggagttccaagaaagataggcgaggtaagagtatagcaccacggggtggaatagggatgacctctatgggcgttgatgattcgggggctgtcaacacagagagtgattgtgttgatcgttggcatgggagtggcgacacagcactgatgctctatgcattgctcatgaactactgcacctcgaagctatgcgacacctcttgttttagttttctcatggcagaagcagttgcatcagccgttgtccaggaaaccgtcagcggagtcttctcctacctatccagcaaccggacagagaaggcatccaaaaggcacaacatggagaggctggagatggcgcacagtgagttggacctcgcgctcgagagatcctcgaagctgcccatcacagatgcatccttgctccgtcagaggaagatctacaagcgcgcctacgacgagtgtggcgatgtgctgcacagatgcaagcttcaaattctcgagggggaagacagccacatggtaaaagggggttttaccaagcggattttccgtgctgtgaagtcgtccatctcttctttgattggcatggacaaagacgaggcgagctattctgatgatgcggtccggaggttcgagtggtttgcagacaaggccggcaaattcgtgagagatgtggagactggatgctcgcttgcgcactaccgttttttcagccctctcatcaagcatctcctcgaaggcaaaaggctctgctatgaactggtgcaaagaagccaaacacttcgccttgaaatagaccctgtgcgttcgaaagagcgtggtgtggaggcagagatacgtctttgtaacgataatgtcacaatgctaacaagaagtttcaatctaaggctgatactacgtctctctgagagcacggacatagtggggatcatcatcagctgcttacagtcatttggaccgcatttcaagtctttggttgaaaatgcaaagaatacagttgccgagctacctacacaagatgttctcaactcgtcagctagaattttctttgctctgccatccgacacattgtatgaaggttccgctacaacttatcggcctgatccactatgttgcagaacacatgggcatggcgttggctcgttggagttatcgtatcgatttcctgagcaagtttccaatgttcattttaacggttatgtcgtggcatctgactgcaactataggtcggctaactcaactaatgaagttattgatagaaacatcatgagagattggccgcctctgcagttgacaattgcttttgcgcctcatcagccgcaccatgaagatgtgcagggaagttatgagataattggaggaaacaacgaacgcattgatactagcatgcatcagatggaggagatggtagtatccaaggcaatcggttgtttcaacagtcagcccgaggtggctacttattcgatcttcagttggtcagtgcatggctgtgcatattttgctgtccaaaaatcgatcgtcccagttgcacttccgttgtcaccaagaccaaccaatagtactccaaggcctgaagagttctcaagagaagaaccttactag

SEQ ID NO: 5921 - DNA, 774 bp, Oryza sativa
  Clone ID: PAT_MRT4530_12660C.1
atggctgtgcggggtggtgtgtggatagcaacgtgcagaccgacggcgggaggtcgtgcgacaccatgtggacggcggactcgtgagggcggcggccggagacccttgcggatgatgggcgacagagtgatactattagatgagtttttacatgtcaggttaggtcaaatactaaaatgtctgaagaaacctgaagcgaatctggttaaaggcaaacatgtggtttgtgcgaaggtgaagaaagtgcataggacagtcaatccccaagatgatgttctgcacggatggaagccgccagatcagggactgatgaagttgaacattgatggttcttttcaacctgatacagggaaaggcggcctgggtgtggtgctccgaaatagactaggagaagtcatctttgcagcttgtggttacatccaacggtgcacaggtgctctagaagcggaactgatggcgtgtcgggagggattacttatggctctccaatggacactgctaccgatcatcatagaaactgattgccaggagatgctgaatttgctccagtccaaggagttggtccgatcggagttgatgtttttagtcaaggaggtgcacgacctcatgatgggaaacagggttgttagtcttgctaaggtgcataggaatcaaaaccgtattagtcatgttttagctaataaaggccgagtggaggaacttactcacttctggccagacaatagctgtaatgctatcgcacaactagtttgtgtcgatgctttgattgaataa

SEQ ID NO: 5922 - DNA, 222 bp, Oryza sativa
  Clone ID: PAT_MRT4530_12661C.1
atgccgtcctcccttgctctccctgccgctgcctcctccccctccctcccctgctatgatggctcgcggcccgagcctcgccgcgccgcaactgtccgcccaccgatgcctctcgctggatctggcgagctcatcgggggaagggagaaggagcctggggaaacgccggcggcggccgaaagcaagcttgaggttgacggcgaggtggttgatcccggctga

SEQ ID NO: 5923 - DNA, 1628 bp, Oryza sativa
  Clone ID: PAT_MRT4530_12662C.1
gggaaaaaaagatgtgtagaaaaaaaatgttgtgaaataggagtatgtagaaagtgggaaaaggcctcgctgcccaaggttttggctacaaacatgcacctcgaacagaaacagaggaacagcagctgctggctatacacagcatgaacacagagagagctaacaacaacctgagctaccaatctaatcaggatggccccggcgatgctttggatgggccaaaaagaatcaattttgactacatatttctatctggtgaaacctaaacgaactcctactgagagatttggacaggtggaaaaaattcagtacatccctttgaaaacggtgctggtccggcagatgcttgctccatgctcctcgtattcttcctttgtgtggcaactctcataaaattcagggttagaagcagctactgaacccccgaaccaagctgcataactctgtataggatgggcgaccacattgacttcaacaggtttcacctccacatggtgacgggcattagttgcggcaacacgctcatctactatcttctttatgtcattctgaagtctcttgtggaagtccttaaacattgtagatccaccagacaatactatattcttatacagatctctccttgtgtcaattggcgcagattgaacacagctatcaattagttcaggtagaggagtggagaagtcggcagagtaaatctcgggatggaagaagatctctggtccaagaaaacgctcatatccaatatcaattgtgtatgggactccagtcttgggcttaatagcagaccagtgtttgatatacttatcaggctttttgtcatgcttcttgaactccttgacaatgtctgaagaagtgtagcaatacatttctttcaccctacgagctatatccaaagaatcctcaggtgcaataagttcacctctttcctgtaaaagctgcaaaacaaactgtgtaacgtcacttcctgaaaatggaaaagacttgatgctactcccaattacgtagccgtttacaaccggcaccacatgtggagctccatccccaatatcaactactacaccagtatacaagggaatagcaaaacaaaacacagaaaccgagtcctcatcagaaatacttttcagaaaggcatatccagcagaaagactgaggacagattgaacagaaatatatagtccaggaacattgaaagtctcaaacataatttcccctgcacattcacgactttcaggtgtactgacaggactatcggtaagaaggaagtagtgctcttcaggattgcaccgtagatagttgaaaatgcactgttgccaaaatctttccattgtatcccagtcatcaacctgaccatgattaattgggtgttttctagtgtacagcccactagatttaaatagtgatagagcctcatcaccaataaaaaaatccaggtcagccatgacacctgcattgtactgtgctatccaatttgcactactgcacatctctgactggtccagaaaagactcattcacagctactacagtagggatggtgaaacatggctcagagttaccagagaatccaagtttgctataccctgtgccgttgtcgatgacgacggcggggcgcgtggcggcatccat

SEQ ID NO: 5924 - DNA, 1302 bp, Oryza sativa
  Clone ID: PAT_MRT4530_12663C.1
atggggaagttgtcaatgtgcatgccgatgaaggagaacgcggccagggacggtgccggggtcctgcgagacaagggccggtgggtcgttctgcaggtggcgggactcgccggtgagcttcgtgaggaggacgacaaaggggtcgcagtggaggctgccgaggacagcctaccatgcccgggccgccaccgcctctgtccgcgacgctgtgcctaccaggccagggccgccgccgccacctccgtccgcatcgaccacgtccggggcgccaccgctgtctccgtccgtgccgttgtgcctaccagggtaaaacagaaagcttccaagaggataacacaacataatgatgtgcactgtattgaaggtcctgagatagtagaaaaacaaccacttccaacagacgatgaaatgctcgcaatcgaatataagaaggatgatgatagcaatcaacaagaaggtgtacagtataatcatcagaatgtagtcaatgcagcttctcactacaatacacgaaatgatgatataactttgaagaggaaatgtcaagatggagaaagaggatcacctgggacctcaaaaaaaaagaaactgaaggtggcaaacactggaaagcacaccggttgcagcaacgaggataaagcccaccaagatcaggatcatagtggttccaaaaagttgaagtcaccatgtatcgatgatgccaagaaggtgatgctagctgaagccgatgttaccttggagaaagagcagatatcaaagaggtatgttaactatgccacttcaatcagggacaaccaaaccaagttgaatagcgaaacaaaggaggatgattgtaacactcaaagcgatattaaaaaggtatctagaagtgctcggcgtaagaaactcaaaagacaacttagacagaaagccaaagaacaattgaaagagaaagagcactgtcaagaacaaccaaccgtggctgattgtccatcgtcaaacaaccgagatgttttgccgtccccatcaagcaatcaaaacaactcgagcttgccatttgtaaggcatgaagcagatgaggaagaatctgatacatcggatgatattgttccagttgtggttaggcctggccacattcgctttgagtcagcaggaaaaaaaaagataaaccagagttaccctgactaccgtgttaatttaccatgcacaaatgccatcatacttgtccaagtagacatttgtgtcctaccttcaaaatttaaggtcatctttttctggccttaccttatgcttgaaacagagaagtatgtgaaaaatatataa

SEQ ID NO: 5925 - DNA, 367 bp, Oryza sativa
  Clone ID: PAT_MRT4530_12664C.1
gttgagaccgcttatgtaaaaaattaaggtatgcactaataattttgaactaaaaaatgaatacacctgtatgaaatggggttttgaggcactgaattatttaacagttgatgcctcacaattgttcaagaaaaaggggttacccccttaatttaatatttatgcccaaaacaaaggggaaatagaaaaggtaccggttttatttcttagtcttataatgactgtttaatccttcattatattgcaaaaaatgtttccacttttttaaaattttgcccttgcaaatggggaaatactgacccccaaggttttttaaaacctttcaggagagctattgcctgcaaaacattcttttgaaccaattttt

SEQ ID NO: 5926 - DNA, 1001 bp, Oryza sativa
  Clone ID: PAT_MRT4530_12665C.1
gcacgagggagcctcgcgccggctttggatttttcgttctgcctcgcgaccgacgataaaaatcgtgcgtccgatgaggcccttctcccctcatctccggcaagccgcggcggcggcggctgctgcggccactggcgctcctcccctcgccgcagctctcctcaagaattcttctgctccccttatccatggccggctcagcttcagccacacgtcgctgcagtcaccgaacaaccgcgggaaacgaacaggctgggcggtgcgtgtgctgccgctgacggaggagaacgtggagatggtgctggaccaggtgcggccgagcctgatggcggacggcggcaacgtggcgctgcacgagatcgacggcctcgtcgtcgtgctcaagctgcagggcgcctgcggctcgtgccccagctccaccatgacgctcaagatgggcatcgagacgcgcctccgcgacaagatccccgagatcctcgccgtcgagcagatcgtcgacaccgagaccggcctcgagctcaaccacgacaacgtcgacaaggtgctggatgagatcagaccatacctttccggcaccggaggtggaagccttgatcttgttcagattgatgaatccgtcgtcaaagttcggttaactggacctgcagcgggtgtaatgacagtacgtgtagctgtaacacaaaaactgagggaaaagataccatccatcctggctgttcagttgacagagtagaaacatgagttcagttatgcagcaactcaagagaaaacaaaactttgattttcagtgattttgtggtattcagtctcagtcttgtggttttgaatcaaaactgaagtactgaacgtctgaacctatcataccatctttaaatgcaagtgttctgactaggaaaaaccaaaataaatcagaagtctcttgtctgtaagatataatccaacaaaacattcagcatctattaattcaatgaagagaacaacaacccattttacatcaggtt

SEQ ID NO: 5927 - DNA, 494 bp, Oryza sativa
  Clone ID: PAT_MRT4530_12666C.1
cccacgcgtccgcagaaagccaaagaacaattgaaagagaaagagcactgtcaagaacaaccaaccgtggctgattgtccatcgtcaaacaaccgagatgttttgccgtccccatcaagcaatcaaaacaactcgagcttgccatttgtaaggcatgaagcagatgaggaagaatctgatacatcggatgatattgttccagttgtggttaggcctggccacattcgctttgagtcagcaggtatcttcatccagcaagaatctgatttatgataatattattttccgcattgcaatccattgtttatcacagacagaaaacaaacactgtcctgttcaggaaaaaaaaagataaaccagagttaccctgactaccgtgttaatttaccatgcacaaatgccatcatacttgtccaagtagacatgtaagcattaggacatttgtatgtatcaaacaacacatatatttggtatgttgatagtggcatctttag

SEQ ID NO: 5928 - DNA, 2893 bp, Oryza sativa
  Clone ID: PAT_MRT4530_12667C.1
gagcttacgtcgatgctttttttagctgatttttatgccagccaggcttttttttactgatggtggctgttttcatagccaagcaaaaaaagttcagaattgccactggaatatacagtagatgtattacaacaacacacggacaaggcagtgaatgtccccccctcctgaatcttgggaggatctgaatttctagtacagatttgatcagcttgtaaactgtttactgttatagacagctttggatcagaacactgaacacctaactccacacctttgacaattcagctgggggtgttcatttggctctctcctgcaagaattagtatctgggatatatacaaggaagcaaatggaggttgagggcattgtacaacaggaggttaacatggtagtcgtgacaccgtcagcttgccggaccgtcccgggtggtggcgagggcaaacccgcctcgttcatacatgcgctggatctcttcccgatactcagttagcgacttgtgtgggagcgcaggcgtcagctccaccacatctcccatgcacagtttccggttagggtcacttatgggcttgtggttaaccctcgggcgcaattcctctttcagtgggaagctgtaagggctgcatcttggactattggcccccactctctccatcagatcgactacagttgagttcgcaggaagctcttggacagacatcttatcatgttcaagcataatcacaaagatgggtccatcgtggttgcactggcgagtgtaagaataagggcagtcctccgaatgcgagggaaatggacatggtggcctaatggcatcagagcggcctaaacctgaggaccgctctttgctcattgcttcgcattgccatgtgagcacccatcttgcccattccaccatttggagtacaaaagagtgcttgcaaccaccttccttgtatctccagtgtgcagcaaatccatactctgcttgtagatgcatttcttttgttcggatctgaacttcaaatgggtgtatgccctcacacatgatgacagtgtgcaatgaccgatacccattcaattttggatgcaggatatagtccttaaatcgtccagcaactcggggccagagcttatggacaatgtcaagagcttggtaacaatcctgctctgtatcaaccacaagacgtagaccatgaatgtcatgaacatcatccatcgttaagttcttctttatcatcttggagtatatgctgtacaggctcttgtgcctcccagaaagactgtgatacgaaataccttcatctcttagacctttatcaagtttatccagagtagatgtaagaagtgcttcgtcaaaagatatgacaagtttggaggaaagctccttgtgctcctctgggttcaaatgcttaaagcaaatattttccagctggtctttccagctagcgattcctaaccgattagccaacggcacaaatatctccatagtctccttagcgaatctttgttgtttgaccaaaggcaaagcttctattgtcttcatgttgtgtagacgatctgctagctttatcagaactgctcttgcatcagccattgcaagaaacattgtatgcaggcggtctgcttcaacggttctgcttgcagtattgttgtcccgagcaagtttgctcaagtggcttaacttggagaccccttcaactagatcagccacgccggcaccaaacatccggaaaatctgatcataatccatgaagctatcatcaatggtgtcatgcaggagtccggcagagacgacggtcgcgtttgcgcctatcttggctagaagcacggcggtctccacacaatgctgcaagtacggatcaccactcgcccgcgtctggcctcggtgcgccctctcagcctcgaagaaggccttgacgacgagctcgtcgtggaagatgcggtggcgagcctgggcgccggcgaggaggtcgcgagcgtacggctcgcacgacggctccgcctcggagaggtgctcgtcgagctcgaacgcgagctcgccggcaccgacaccgacagcagccgagacgccgagcggcagcgcggcgaccggcgcgtaatcgacgcaggagccgagcgcgttgcgcacgaagctggagaagagccgctcgcgctcgcggccggcgagccaggacgccgaggggctccgtgacgccggcgaggaggccgggctgtggaacagcggcacggggctgtggtggagcatgtcccgccacttgaacggcgacgacggctgcgggtaggagtagcccccgcccccgcccccgccgccgacggccgtcgcctcgccggatctatcgtgccagagcgcgcccagctcgtcctgagccgcggcggcgcgaggggcggcggtaggtgaggagaagaggcaggatagcccaccagcgatggcctggtggcggtgggagctcgccggcgacgggggagccgcggtggcgcacggcgccgagccccgggagctcgcctcaagctccgacgacgacgacgacgtgtagaccgcccccggcgggctggtgtacacggcaatcgccggcacggacatcctcgccgcgacctcccccaacctgttgggggcctccagcttgacgtccagttgcagcgcgtgtatggccatcatgtatctatatctgaccttatcgctgctacttagtgccaccggcgaacctgcgttgcgcctagttgccgtcccggagctcgccgcaatggatctgttcgtgccattaccatcctcgacctggtctctgctagtaccatcggcgaacccacgcctcatcgatcttcgggcagatcaaaccgagcgaattcgcggcgggaggggagattttgcgcgtgtttcttgtgggttcgctcgcgtgggcgtaagggattgtga

SEQ ID NO: 5929 - DNA, 390 bp, Oryza sativa
  unsure (1)..(390): unsure at all n locations
  Clone ID: PAT_MRT4530_12668C.1
atgaagntaggatatgcgnangttgtggacaaatcagcaaatggatctgtatacgtgccgcgccgtataattaccgcttctgccgtcccgannagcggcgttacccgtatacatccaggcgaagacaanantgctgctcaaacccagaanttcgcgcgcctgtctcnnaagtggtggttggcanngtctctgnnaatagaaccgcnctcattgatggaccaaaccnaaagttatcaaatnaaccaatnngtgcatggcattggagacccgnnttgggcatnntttgcccaaactacccggagaaaccgaggcttgaggcagacgcaatcgcccacgtggcctggcaccttcggtgacgtcgggcccgagggtgaggtgtccgccctcctc

SEQ ID NO: 5930 - DNA, 279 bp, Oryza sativa
  Clone ID: PAT_MRT4530_12669C.1
ctcgtcgtcgcggtcgccggagccggagccggaggcggcggaggagatggggccggatgcggcgatggggacaagtcggcgcgctgccgctggaggcgctgctggcgctggggctcgaccagcgcacggcggagaacgctctggtcaacagcaaggtcaccgccaacctcgccgccgtcatagccgaggtgacgcgcggacgcttgctaccatcgctcgtgcgcttccaattcgattcgatgatgtgtggggttttattcgcgtttgatatggcgtcta

SEQ ID NO: 5931 - DNA, 1079 bp, Oryza sativa
  Clone ID: PAT_MRT4530_1266C.1
tcacactgcgccatataaaagagaggtggaggccagcacggcacaagggacgagattcaccgccgccgccaactccacccggcgccgcatccacgacaaccgagcgccaacgacgacgatggccggcacttcttcatcctccgtcgcctctccccggcgggctctaagattgtttccttgaacttaaaaaaccctcacgaaatatgttcctagatccatctagccaggctacgactttttaacgattgtcatttagctgttgactaatatgagcacaatatgttagagaagtctagtcgttcatgaaggtttttcctttgattccattggctgcttatagtgtaagagccaggtttggtcaaagtcaaggtcgaggaaatatacatataaagcagattaccattcaatatctgtatatgtttttgatgaaaaaaatagagactttcagatgtgatccgcacgattgttcgtccaaaaatagctcctgaccttttgatcaccgcgtgcttgtgggtgctcgatgcggcacagatcttgcagaaccaagttcgcgtgggatggggaaggagaagaaatggcggcaacagtggacatcgaactcgcaagaaggcggcagcagtcgccgctagcttgatgggaagacgatgatggtaaccactggctccgcacggcggtggcagcagcggctggtccagcgagcttgagaggaaagcagcggctacagcttggcgagctcgaggggaaggcggcggctagctacaggctccatgagcaggcgtcgtatgggtggcaagagggagaacgtgagaagaggaggatgggaagaaaggcagcgaccgtcgtcgagcaccgtgggaagtcgaaattctcgttttctccctcatgaggattcatgcagctcccccagaaagcaaaggaaaaaagaatgaccagacaaccatcgtcgccgagccgtggttgtcttcgtcgcagtcgtggccgagcctacgcagggtggtggcggcggccggctccccccgccccggccgccgcgccgcgcgccccgccgtcgcgttggtagggagcggcaatggtggcat

SEQ ID NO: 5932 - DNA, 433 bp, Oryza sativa
  Clone ID: PAT_MRT4530_12670C.1
gcaactgctaatagctatggcaactactattttctctcgtttttctatatacttttgtgcttatgctattatgtcagggttctatggcccaactatttaatccaagcacaaacccatggcatagtcctcggcaaggaagttttagggagtgtagatttgatagactacaagcatttgagccacttcgaaaagtgaggtcaaaagctggggtgactgagtacttcgatgagaataatgaattattccatgcacaggtacttttgtcatccgacgtgtcattcaacctcaagccttttgcgtacctcaatacagcaatactactggcctggtctacatcattcaagatttgtataataataaatatactaggaaactctatcaaatgcaactaggagcttatgatctccatggttaaaaaaaaaaaaaaaaaaaa

SEQ ID NO: 5933 - DNA, 372 bp, Oryza sativa
  Clone ID: PAT_MRT4530_12671C.1
atacttttcgatgcaatacctcccaggagacgctgggggttctttatgtcgcttccgggggggggagcctctctggtgttcctcctcatcaaggttttgcgaggagaagaaggcgagacagaaagaagttggttgtgacgaaggaaaccgcagaagccgcagccatggcgccatctcctgcagcagcggttggccccactttcgaggaccttgagcgcgacctgcaagccgcattgatggaccagaaccactcggccaccgacgatgagctcagcatgttccgtagcggcagtgctcctcccactgtacacggtgctcgcactgccagtggttccctatatcctgctgcacctgattcacgtcaacagcttt

SEQ ID NO: 5934 - DNA, 1237 bp, Oryza sativa
  Clone ID: PAT_MRT4530_12672C.1
gtgaaatcccttaaaggtgtattctggaataaagggttgcataaaagtttcataaaagcgagattttgtttgctttgataaagccaagtaagtggaggatactatttggttgtaattttggatacttctcttttagatatctttgcattcccattcattattagaaagtccagaatgttgattgggggttgaagatagatttgagaagaaactgcatacatggaagggcaaaaacatgtcatatggtgggagactagtccttctaaactcggttctttcaagcattcccctgtttatgttatccttcattgaaattccacgaggtatgcttgaaagattggattattttaggtcacttttttttatataatgatgaccgaaaaagaaaatatagactaactaagtgcaaagacatatgccgatcaaaatatcaaggtggactaagtgtccataactttgatatcaaaaatagatgcccgttaagaaaatgcctctttcggttggttaatggtgaaggtgcatagcaagaccttttgcgaaataaatacttaaagggtaaatctctatggtatgtccaacaagacatgtatttctcagttctaggcaggtgtaatgaaggtgaaagaccattttcttaggtttgggtattttagatatggcaataggactgacataaaattttgggaagacacatggtttggatcgtgtgctctcaaatatcaataccctacttatacctatgtggcttgaaagaagctatctaccgtagcagaggatatgagcacaaagccattgaatattcctttcagaagagccattgttagccaaaatctaatcgagtggaaaaatttgatcatcaggttagctaatataactctgtcaaatgaaaaggactgttttgtatggtcacttcataagaatggctaactttcggtcaactctatgtataacatgatcatgaactccaatattaggatccaaaataggattatatgagacttaaaggttccacgaaagatctaggttttatgtggtttcttcacaagaaagtaattctaacgaaggataacctggttaaaagaaaatgagggatacaaacattgttctttctactacgcacaggagaaaatccaacatcttttctttgagtttcatggagagtaggatactatgcgcaatggtgttacactcttggaatcagtagccaagggtctcttatttcactatgggtggcgta

SEQ ID NO: 5935 - DNA, 512 bp, Oryza sativa
  Clone ID: PAT_MRT4530_12673C.1
taatctcgagttccaagtgcgttagtaactgtggaaagccctgtgtttgatggtgtcctttcgcccaggacaattatggatcaattccccaacaattatcctgtcttgaagaaaccagagcgtgaaggatcccaaatatatcgcaatcaagacaaaacgctaacccttcgtcaccaccttccagggaaaaactcaagtattccgtgccctgccaagttgaatgtagtggctaatgcgtatcgcatctcaagggagcaagcccgaacctcaagaacaacaggggagaagagcacggtcccttcactcctagatttcaacaacaatactacccaggattatcgaatgagtccgaaagcgagacttcagagtaatgtaattgagaactagtatcggcgtagagtaaaataaaacacccaccaagtatgacacttggtggtgattcatattcagatatcagtagtaaataaaggcatacaaaatttcttaaaaaaaaaaaataaaaaaaaaaaaaa

SEQ ID NO: 5936 - DNA, 845 bp, Oryza sativa
  Clone ID: PAT_MRT4530_12674C.1
ttttttttttttttttaagaaattttgtaacctttatttagtaggggatatcgaatagaatcaccaccaagtgtcatacttgtggtgttttattttactctacgccgatactagttctcaattacattactctgaagtctacgctttcggactcattcgataatcctgggtagtatagtgtgaggtctaggagtgaaggcacctgtgctcttctccccatgtttgttcttgaggcttcgggcttgctcccttgagatgcgatacgcattagccactacatcaactggcagggcacggaatactagagtttttaccctgcaaggtggctgacgaagtgcgttagcagtttgtcttgattgcgatatattggcatcacattcacagctctgctttcttgcaagacagcatacatgttgtggacatgatccatacattgtccctggggcgaagggacacaccatcacaacacaggtcgctttccacaagttgactaacgccttcgtcagccacccttgcagggaaaaactcaaggtattccagtgccactgcacagttggatgtagtggctaatggcgtatcgcatctgcaaggggagcaagcccgaagcctcaagaacaacaggggagaagagcacggtgccttcactcctagatttcaacaacaaatactacccaggattatcgaatgagtccgaaagcgagacttcagagtaatgtaattgagaactagtatcggcgtagagtaaaataaaacaccacaagtatgacaccttggtggtgattctattcgatatcagtactaaataaaggttacaaatttcttaataaaaaaaaaaaaaaaaaaaa

SEQ ID NO: 5937 - DNA, 2843 bp, Oryza sativa
  Clone ID: PAT_MRT4530_12675C.1
ctcgggccggccggaaaaagagaccaaacgggccaaggagagaggagcagcagcagcgccaccgctcgcgagatctcctactcctcgtcgccgacgagccgcctcctcctcgtcgtcgccggcggcagagcaccggagcagccaccccatggcgtccccggacctcctcttcaacctgcgcaacctcttctacctcggcgcctaccaggccgccatcaacaacagcgacgtcccgggcctcgacgccgacgccgccgccgagcgcgacgccatcgtcttccgctcctacgtcgcgctcggctcctaccagttggtgatcagcgagatcgactcgtccgcggcgacgtcgctgcaggccgtgaagctgctcgcgctgtacctctccggagacaaggaaagtgcgattgtcagtctgaaggaatggttgagtgattcggcggttggaagcaatcctgttctacgattgattgctggaattatatttatgcatgagcaagactacactgaagctctcaagcacacacactctggtggaactctggacctgcatgcattgaatgtccagatcttcattaagatgcaccgttcagactatgccgagaagcaattaaagatcatgcaacagattgatgaggaccatacactgacacaacttgcaaacgcatggctggacattgctgttggtggctctaagatccgtgaagcttacctcatattccaagactttgctgaaaaatacccgatgacaggaatggttctaaatggcaaggcagtttgctgtatgcacatggggagctttgatgaggctgagactcttttactcgaagcattgaacaaggatgcaaaagatcctgaaactcttgctaatcttattgtgtgtaatctccaccttggcaaaccgtcatcaagatacctcagccagctgaaactatcacaccccgatcatgtgctagtaaagcgtgccgtatcagcagaagataacttcgagagagctctccaagccgtcgcttgaacacgtccgcggaaaacgcttgccagattgcagataacacaattgatcccccatgttccattttgagtgccttaacacagcgaaaattatgttgcatttgctcagtctgttttgctcaaatggtgatatactacccggccaatcttgtactctgaacccctgctgtataaacaaatataatgtagaatcttgaatggtgacgtttgtggtcagcatcaacattttgttaaattcaaatggattgttgttacaacaaaaaacaaatattcctggcgtggtctacatcatccaagggagaggttctatgggtttaaccttccccggttgccctgcgacttaccagcaacaattccaacaattttcatctcaaggccaaagtcagagccaaaagtttagagatgagcaccaaaagattcatcaatttaggcaaggagacattgttgcactcccagctggtgttgcacattggttctacaatgatggtgatgcacctgttgttgccgtatatgtttatgacgtaaacaacaacgccaatcagcttgaacccaggcaaaaggagttcctattagccggcaacaacaatcgggctcaacaacaacaagtatatggtagctcaattgagcaacactctgggcaaaacatattcagcggatttggtgttgagatgctaagtgaggctttaggcatcaacgcagtagcagcaaagaggctacagagccaaaatgatcaaagaggagagatcatacatgtgaagaatggccttcaattgttgaaaccgactttgacacaacagcaagaacaagcacaagcacaagatcaatatcaacaagttcaatacagtgaacgacagcaaacatcttctcgatggaacggattggaggagaacttttgcacgatcaaggcgagagtaaacattgaaaatcctagtcgtgctgattcatacaacccacgtgccggaaggataacaagtgtcaatagtcagaagttccccatccttaacctcatccaaatgagcgctaccagagtaaacctataccagaatgctattctctcgccgttctggaacgtcaatgctcatagtttggtctatatgattcaagggcgatctcgagttcaagtcgttagtaactttggaaagactgtgtttgatggtgtccttcgcccaggacaattattgatcattccgcaacattatgctgtcttgaagaaagcagagcgtgaaggatgccaatatatcgcaatcaagacaaacgctaacgccttcgtcagccaccttgcagggaaaaactcagtattccgtgccttgccagttgatgtagtcgctaatgcgtatcgcatctcaagggagcaagcccgaagcctcaagaacaacaggggagaagagcacggtgccttcactcctagatttcaacaacaatactacccaggattatcgaatgagtccgaaagcgagacctcagagtaatgtaattgagaactagtatcggcgtagagtaaaataaaacaccacaagtatgacacttggtggtgattctgttcgatatcagtactaaataaaggttacaaacttcttaattttccaaaaacctaaaaaaaaaataggaaagcctgcgcccctcggttatgaaataatgaaacaacgtgactatgggggcgtagcgaaacaaagcttgcttgataaaaaaaccaataggggggtacagctttttgaggtccaaactcgcacacagggtgaatatcatagtgtgcaggtacatgcttgtgcctaaagtactactcaggggcgggaccaaaaaattgttgcaaggggggagaccggtgttgatgtaac

SEQ ID NO: 5938 - DNA, 502 bp, Oryza sativa
  Clone ID: PAT_MRT4530_12676C.1
cctggggaacccccccaaatccccaattgtttaatttccctgaaaaaaacccgggtccctcacataacaaaaatttttactttaaaacccccatatttcccaaaacaaccccttttttaattaatcaaaaacccccgggtttaattcaaaaataatcaccccccccccaaaccccccttttttggggggttttttttggggactaattaagggggggaacccccccggggaaaatgttcggtttttttgaaacttcccttgccccatttgcaatcggggcaaaaacaattggggccccattttcaaccccctttttcctccccggggggaacctcctaaaaaggggtttttttggtttcaactttaaaaaacccctaagtgggaccttttttaaccccctggtttttttaaacacaatcccatttgccccccttttcccacttgggcaaaaatttattttcctaagggagggaaaaattaaccccttgggttcccccggcca

SEQ ID NO: 5939 - DNA, 345 bp, Oryza sativa
  Clone ID: PAT_MRT4530_12677C.1
atggcggcggggagagcgacggcagcggctggcggcggggagggcggcagcaacagcggcggggagggcgacggcgaaggcaggcgcgtgcggcgccggccgatggtgcatgcaggcggcggggatggcgatggcggcggggatggcgttggcagagggcgcgaaggcggctgcggtggtccctacgcggcgatggtgcggggctcgacggcgacggcggcggtctccctcagatctgcgcctcttggcaggatctggagggtggccggcggtggtggtcggcgacggctggcgacggcagcgatggtggtggtcgcggcagttggcagcgacgatgtcggctga

SEQ ID NO: 5940 - DNA, 522 bp, Oryza sativa
  Clone ID: PAT_MRT4530_12678C.1
agacaagttggtacggtgacataccgatgggtgtcttacaaatgcttgttggtatttcttacgaccattgataaatccgcaagcgcacggaataccgatgtagcacttcaccttcgggtgaccccaaaaggatatcaaactcagggaacggttactaggacgggattcatggttgtcaccacctgtcgtttacctctgacaaattcatgggatacacaacaaataaagagaagtttctccgaacccagagtagagtgtatcgacaactccggtactcctctagaattcctcttagaaagctacactagccgaggtagaagtcagagagagcgccaaccttccggtcactcctccaaagcttcccttcactctacctattttataacatacaaaagatacaatagagtctcttgtaattcagctcaaagttgtgggtgttggaatgaagtgagctcctccttttataggctccaaatgatggttacacctattgggatgaaatcaggagcgtacatgtggaag

SEQ ID NO: 5941 - DNA, 666 bp, Oryza sativa
  Clone ID: PAT_MRT4530_12679C.1
atgaggttcgcgtgcttcagcgccgcggccgtggccgacgaggcggaggccggggctcgccaccaccaccaccggagcggcggcggtggcggccggcggcatcgggggacgtcgtcgtcgctgcggagcaagttgtttggcggtaggacgacgaaggcgggcagcaagaagtactcttcggcggcggcgctggacgatgtctacgacgcggcggagtggtcgtcgtcgtcggtgccgtggtcctcgacgtcggcgctgtcgctggactcggcgcgctcgtcgtcgtcgtcgtcgtcgacgacgacgacggcgccttgctcccgctcccgctccttgtcgtcgctgtcggacgcgctgtctccgcctgctgcgaggcgcgcgccggagaggagggggaggacgccgcggccggcggcgggcgtggccgcggtgatcgtgtgcctcgtgatggtgatgctctgcggcagggtcggagccacggcgctcgtctcggcggcgttctaccttttcccgcggcggtggcggccggtgggtgccatcgaggcggcggagagcgcggcggcgtcaccggagcatgactggccgtcgtcggcgacggatcaggagacgacgacgaagaggaaggtggttaaggaggggttcttggcgcggaactgcaagaagtga

SEQ ID NO: 5942 - DNA, 763 bp, Oryza sativa
  Clone ID: PAT_MRT4530_1267C.1
gagaaatcgagaatcatgccttcccacggcgcccgacgacggtcgctgcctttcttcccatcctcctctcctctcgatctccctcttgccacccatacgccgcctgctcatggagcctgtagctagccgccgccttcccctcgggctcgccaagctgtagccgctgctttcctctcaagctcgctggaccagccgctgccgccaccgccgtgcggagccagtggttaccatcgtcgtcttcccatcaagcaagcggcgactgccgccgccttcttgcgagttcgatgtccactgctgccgccatttcatctccttccccatcccacgcggacttggttctgcaagatctgtgccgcatcgagcacccacaagcacgcggtaaccaaaaggcctggagctatttttggaagcacaaacgtaaggatcacatatgtacgttactaccttttcctgcaaatacatatacaccacttggatgtacatacccattctgccttgctttacatgttaattaacttgattgagcaaatgtttgctgcattgatcggccggtgcctcaaagtacaatgagtaagtgactgaaggtaattcattagccttttatgtctatatatgaccataaaaatgtatgcagggtgcatcagtcaagcaaaaagtatatggcaatggcacatttcttagggaagggatttatgagttcaatgtcaaaatcctctctatcagttgcttatgtagctaaaaatagggaagcaatatatttata

SEQ ID NO: 5943 - DNA, 231 bp, Oryza sativa
  Clone ID: PAT_MRT4530_12680C.1
ggaattaaatattatatagtatataactgagagaaattatcaaagtgatgttgatgaagaatatttgtcgaggaaacgtacttccgaaagatggcagaggctatctgattaatatgatccgttctcaacgcagcccacgatacatgcccacgcgaatccgcgggctacctttctagttggctttaaaatcgctacccacaaattatcattgttttggctaatacaccatac

SEQ ID NO: 5944 - DNA, 473 bp, Oryza sativa
  Clone ID: PAT_MRT4530_12681C.1
gcacgaggtcctccctcccttctctctctcccgcgcgtgacgacgaggagactcctcccaccgaagcgaacaaccagcgtgctctctcctccgaatccgccgtcgacgatgccatccgccgcggcgggcgacggcaagggtaagcggcggttagtggggatgccgccggcgagggcggcggcggcggacttcgcgatgggcggggcggcggcggtggtggcgaagacgggggcggcgccggtggagcgggtgaagctgctgctgcagaaccaggccgagatgctccgccgcgggagcctcacccgcccctacaggggcatcgccgacgccttcggccgcgtgctccgcgaggagggcgtcgcggcgctctggcgcggcaaccaggccaatgtcatccgatacttccccacgcaggcttttaacttcgcattcaagggctacttcaagagcatctttggctacgacaaggagaa

SEQ ID NO: 5945 - DNA, 581 bp, Oryza sativa
  unsure (1)..(581): unsure at all n locations
  Clone ID: PAT_MRT4530_12682C.1
nctcgggccggccggggtgatttaattcgtctccttgcatttttctggttctctgttgctgttgttctcttgtgccagcctttcgttttcctctgtttgcttcgatcgatctgaaactctcccatagttttactcgtctctgtctgacaaaattactactgtagattaattactcttttgtattaatatcatattttgcatcgaagcatgcaactggggttgcttggtcattttctgagcccgtgactgacgacgagacgaacaaaaacctcaccgtccagctctcgccaatcgatgctggtgcaggttgagtcggggagcgaggcggcggcggcggccatggcggcgaccactgccggaggcaatgccagcaccaccgcgagtggcacgagaggcagcggtgcatgcgagactgccacgagcgccgccatggatgggccacggtggccgccgaagccatcctccaggcagtgtaataaaggtaacgtaattaagatactgcttcgccgggtgtagggtatagctagctagggtttccatggtcgatcgacctagagctagtgcttgtgctgctcgcgcgc

SEQ ID NO: 5946 - DNA, 270 bp, Oryza sativa
  Clone ID: PAT_MRT4530_12683C.1
atgggtataatacaagaccccctaggaggagaggggacacggaacaacagaagccacaagccaatacaagcctacatacgccaagacaagctgccagatatcgacatcagagataagcctaggaaaaccccatatggtacctacgggaaccaaagagaggaatctagcgctatctctgatctcgtcgggcacagatttgaggaggaagactactctgttgtcgactacgtgatgatatttcagtccgttatgtcgacaacagttagatag

SEQ ID NO: 5947 - DNA, 497 bp, Oryza sativa
  Clone ID: PAT_MRT4530_12684C.1
gtctcgccgaggcgattagccgcctcttcttcccttgcgccgccgccgccgccgcgcactgaaccggagacgaggtctttcccaacccctgtcttcatcgtgcgcatccttgccgtgcgccatgtttagttgtcttaaccctcgacgcctcggagccggacgcccgctgcccacctccacaccaccggacaacctctatccctgccgccctcctctccatcgtgtgcttgccttctttgttatctacacgcccgagaagagaggattcctaccgcgtctttctgttgtgccagtatcctcatcgatgaatgattttaccacagcagcaaagtggttgccaaatgctggtattatcccaggtttgcttttccgtctcctcttctcaaatcctttatgtgcccttgttcagattgcatttactttctttttctcctttctgctatcaaataggatcaatgaattgttccgtgaatgcttattatattatgagaattttt

SEQ ID NO: 5948 - DNA, 268 bp, Oryza sativa
  Clone ID: PAT_MRT4530_12685C.1
tgcttcttcctacttcgtcttcttgctggtgtgttcgaggaggaggcggaggaggagaagctagcggctgaggctgaaatggctacgagcgggcttaggagctgcagatcggggggcgatccgagcctgctggcgccgtcggcgaacaggaacccactgcctgtctgagcctacgccaccacctgctggcgcgtcaccatggaaagggaccccgtgaagaataagtaccccttcggtaccttggatccccttgctttttccaaggacc

SEQ ID NO: 5949 - DNA, 373 bp, Oryza sativa
  Clone ID: PAT_MRT4530_12686C.1
ctgttctttctgtagccgctccgacagtgattctttttatacatgcgacatagagcactaatccgagtaaagctaaacgccgatattagatatctacatgatcagactccgactaattcacgcatgcatccaaatgaggctgcactttacatgacctacgagcacatctcgggaggctacatatggctatggtagatatgctgcccaggcgacaataggctcagaccggatgcacttttcagatccacaggtgccaagtcggatccattatgcacaggctcatccaagataatgccgcttccacaagagccgtgacgcctcaggggaccgactgtagtggctcaaatgaacactactcctcatcagcaagata

SEQ ID NO: 5950 - DNA, 861 bp, Oryza sativa
  Clone ID: PAT_MRT4530_12687C.1
gatctggtgaaatcgattgaggggaaatgtttcccgagatctcctctaccttttctcttttggaatcatcctctaaattgctttggaagttcgtggattcgaggtcgaatcggatcggtctctttcctccgaaccccgaggtttccttcgcgtcgccggtcgccgtgggccttcgccgctgcctccttgcccctataaaaggatccccggtgtctcctctacccaccgccaccctcgccttcgtctctcgtcgtcggaagcgccctagcgccgtgtaacctcgagtcgccgtcatcgccgtcgctccagccgtgcgccgccgccgttccggtcgtcgtcgtcgctcggggaggttgccatcgtggtcgccaagtcaccgccgtcctcgtccgccccttcgccgccgctgtagatcgccggagcaccgccgtcgtcatcaagccgaagaccgccgccgcttcttcctcgtcgccgtcgccgtccgttgatcttccgccgacgttttggtcatcggtgagttcgccgcgtcgcgctctacgtcctggtgccctccgttcgtgccgaagcgtcgttcgccggcgagtgtgcaagcccgagccgccgccggtggtgacgtcaccgctgacgtcatcagggtccgtctgccttgagccgccgtagacccgatcgatctcggccgtccgttttggatggatcgatctcggccgttcgttcccgtgaaccgcttttgtatagcatggttcattgcggggcaccagactgagaagtggcggagataagcccacggggggtcgctggggagtccatgccttgttttataagggggtaattatgatccaggaacggtgcgctgtggtggat

SEQ ID NO: 5951 - DNA, 1079 bp, Oryza sativa
  Clone ID: PAT_MRT4530_12688C.1
agagagggggcggcgccgacatgcgggccccacatggcaatggctcagggtggtggtccgtggtggaccgggtccacggaccggggagggggcggcgcaccacgaggtgcacacgtggcgccgacgtggcgcgcacgtggcgcccacgtggcagccatgcggccagcgggattgggtggccccgatctacccgagggtagatcggacagcaggggtagcacgcggccggcgcgcctgggcggctccaaccggcccggcggccatggtgcgtggcagcgcggcgcgacgcggcggcggcgcaaggcggcgagcggtcgatggcgacgcgacggcgacgcgggtggcgctggcggcggagcagctaggcggcggcgcgatggctaagcggcgcgggagagagaggaagggaggggttcctcaccgacgatgatgatcgacggaatgaagatggcgacgagcggccgagcttcgggatcacctaaggaatcaaaagagagggattagagagagagagaccatggatggctaggacgccggccgaaggcggcggccatggcaaagctcaccggcgtgcggtgcgaacggtgctcctgcggcggaaatcggtggcggaggggcggacggggtggccctcgggcttgcgaacccgacggaaatggtgaaaaagagagagggaggggcggtggtggtttatataggctcgaggggatcgatcgtggccgagatagccgcgatttcgcaggcggagtggggagaggtggggaggagagagaggcaggattcgaaattcgaatcccggccgtctcgagctcaagcgcgggcgggagagagagggagtgggcgcggggaactcggggaaggcagcgacgtgggcgacgtggcctaggaggcgagggagagacgggagcggcggttggggaggccggcctcctcctctggttggaggttggggacgggcccgacaggtgggccccacctgtcggcaaccccgggtatttagttcccacgcaaaaacttttcaccctgtcacatcgaatgtttggatacatgcatggagtattaaatatagaaaaaaaaaa

SEQ ID NO: 5952 - DNA, 1040 bp, Oryza sativa
  unsure (1)..(1040): unsure at all n locations
  Clone ID: PAT_MRT4530_12689C.1
atggcggcggacggcggcgcgctgaagcggctgttcgagaagccgttgccggagaacccgacgctgctggaggcgctgtcggcgtggaaccacacccaccgcaagaagctcgtcgacccggcgtccttcaccgagatcttcggcgagctccacttccaggagaagccgcccgtcgtcgactccctcgctcgcgccgccgcccgcccctcgccgtcgccgccgcctccgcccccgccacgccgcacggtgtcatggctcgacatcaccgacgccgccaccgccgacaacgacaacgacaagagcaaggatgactcctcgctcgacgccctcctcaagccgcccaggccggcgagcggcggcgccaccgtgaagcggagcgcgagcttctgcctcaagagctcgacgtcgctgctgctctgcaccgaggggctcgggtcggagagcaccgtggacgccgacgacatggtcaaggacggcgacggcagcggcgccgtcgtcgacagcgggatggacgtggacgacgacgccagcgacgtcgccgccgccgtggcgggcgacgacgccttcggcgccggagggaaggagaatcggccgccgccgccgccgccgtcgttcccgccgccgatacggtcgatcgggcgcggcgggaagccgagtgtgtgcttccggtcggtgcgcgcggaggggaggttcgtgctgatggaggtggtcatccccgggaaggatctcctgcgggcgactcgcgagggcggccgcctcaggctgcagttctccaacgccgccgccgccgccgccgccgccgtcggcgtcatcgacgacgaggagatgcatggacaagaagcagcagcatgcgtaggcggcgacacgttcgcttaattaactcctattataatctattattcttgtgctaactaatttggtcaagaagcactaattaaacatacttgtgatgcatatatatnatttcatatacatacaatactttgtcaggtcataggaacatgtcgctctgtacaataagaatgtacgatctgacctga

SEQ ID NO: 5953 - DNA, 144 bp, Oryza sativa
  Clone ID: PAT_MRT4530_1268C.1
atggagttcggccacgccgctgccaccatggagtccggcagatgctgccaaaatatgaactgcaacaagagcttcttatccgagacatcgctgcacctgcacgggcgtggttcagaagttgcacatccgtccactgctcgttag

SEQ ID NO: 5954 - DNA, 126 bp, Oryza sativa
  Clone ID: PAT_MRT4530_12690C.1
atggcggaaagaaataaaagcaagctagttgataggaaggttgccgtcatttatggaaagctaggtggcagcctatttaatgatatagacaccatcctaatcattggattgggaatggccttatag

SEQ ID NO: 5955 - DNA, 285 bp, Oryza sativa
  Clone ID: PAT_MRT4530_12691C.1
ttcgaattgctcccgtagacctcggaactactcgacgagtaccgtcgaccacggatgactcctctgctttacaagaccagtcacaccagacagtgatcgtttggtacaacttacacataccggttctacttctcgaccactacagacgatacaaaacatctccctacgatggttcattacgatcttataatgttcgacgatagtcgacatgagagatactgttacaaatatgatacaaacgacataccacaccagatactaaacttcatacaacctttttttttt

SEQ ID NO: 5956 - DNA, 536 bp, Oryza sativa
  Clone ID: PAT_MRT4530_12692C.1
tgcttagctagctagcacgacagtacaaatatatatactactacatctgaagaaattgttggtgtgttagttcatggctgctgctgctgcttcttcttcagcaatggcggcgaaggcggcggtggtcatggcgctgttcctggcctgcactctcgaccgggcatggacgccgaccggagcggcgaggacgatgacgatgatgatggtgcagagaggcgaggtttctgcggtggtggctgtcaatggcggcggcggtggcggtggtgaacgagggaataatggtggtgcgcagccggagcagaggaaggagttcgtcgggatggcggcgttcacgcggagcctcgccgtggcgccgccgccgccgccgagcgtccatggcgacagggaggtgccgagcgggcccgacccgatacaccacggcgcctcgccgtcgtcggcttcaccgtagagacatatgcgtgcatgccatattaatatagagagtgagactagtggtgcatggtgagtgtagacgtacgtgtcaagggaaaagtcca

SEQ ID NO: 5957 - DNA, 103 bp, Oryza sativa
  unsure (1)..(103): unsure at all n locations
  Clone ID: PAT_MRT4530_12693C.1
acacacagacaattaacggctggtatgatcgagatatagatgtcgataagtgaacctaccgtcctattcctcaggcgctattatyagtattgagggnaatgat

SEQ ID NO: 5958 - DNA, 460 bp, Oryza sativa
  unsure (1)..(460): unsure at all n locations
  Clone ID: PAT_MRT4530_12694C.1
tgcttcagcccgccgccgccaccgcgcctctcgtgcgggcccaccgccgccactccgctcgcgcggctgcgctncacgactcccctaccccgccgccacctcggatcgcctgtggccgccgactcccgccagagccgtcgtcgtcgttgccgagggaagcgggccgcatcgccgccgccgctctaggccgccgnctcctacacgcccgccgcttcccaccgnctccgccgacggcttgaccaaaattgtccctcacatctcccgttctcttagggctggcaatctctgctccgccgccattgcatcggaggaaggagaccnccgttggtccggcccgngtggaggacttttctgttttgncgctttggggttgtttncgggaaggagaaccanagttaaggaattcggttccggcgatttggcccatccctgagggaaacaagggcgggttnttgagaag

SEQ ID NO: 5959 - DNA, 402 bp, Oryza sativa
  Clone ID: PAT_MRT4530_12695C.1
atggcggcagcggcgttcaaccagaggtgggaaggaagctcacgatctcttcactttgccaatggatcagggattttctcgagtcattttgcagctggggttgagaagttgatgaggagcaatgtgcttgccagaatgcgagcatcacgtggcggcggcgatcctgatgctgcagagatggataagagggcggctggtcagtgcagttatgcagagtattgtgccatgttcccgcgaatagagatgggctgggatgctgctaggtggaccacaaaattggggaggatgaaggtacaaaaacttaggtacgattttcttgagtttccaacactcaactcgttttcaccggatatgtcctcagggaggcggagaagggcgaagggagtagatggcaatggataa

SEQ ID NO: 5960 - DNA, 344 bp, Oryza sativa
  Clone ID: PAT_MRT4530_12696C.1
ggagaaacattttttttccatgtatttgggggaacatgcccatttcaacatccatgtaatccgatgttgaattaagcaagcaaatttaagcatgcagagggcactgtttagcacacactggatgggttgctagctagctagctccatttaggtcccttttttttcatcatgattgacacttggtaaaattaaccaggatttagcttgctagctgagctggtctgaccaccatgcatgcatgcaagcaaggccaattaaatttaaaggtggccggccataccccacacagcacatattcggggggtaaaacaaaaaccaaagggaaatcctccccaactttgatt

SEQ ID NO: 5961 - DNA, 938 bp, Oryza sativa
  Clone ID: PAT_MRT4530_12697C.1
gctaagcttagcttagcttagcttctcctccccgcttcttcttcttgcccatcccactcgccggccgccgcaaccggagaggaggcaagaacggtggtgcgacaatgcagccgttgcggccgagcccggcggcgggcgggtgggcgggggtcgccggggtggggcccaccaccgtcgacgaggcctccatggagcggagcaagagcttcgtcaaggcactgcaggagctcaagaacctgcggcctcagctctactccgcctccgagtactgcgagaaatcctacctccacagcgagcagaagcagatggtgctggaaaacctgaaagattatgctgtacgagctgtcgtcaatgctgttgatcaccttggtactgttgcatacaaattaacggacctgtttgaacagcaagcttctgaggtctctacggttgagctgaaggttgcacgcttaaaccagcaaatcctcacctgccaaatcttcaccgacagagcaggcctcaggcagcagaagattggtggaacaacttttaaacatcataagcactatatcctaccatccaagaccctttcatggcatctgtcttcagagaacagcatttcgacaactggagcacagaaatatacatttacactaggggatactatatcgtctaaacctgcatcaaatggttccatgtaccttctaggcaaggacatacctgcttctcccatgcacaagcctctgcaaccgaatgggaacaccagttttgatgctaagaaaaatgttggttcaaaggtcagcatcagtggtgccattcctgttgatgaacaaaatgtagtaattctgcatcagcgcccaatcagttccatgttgttgctgtgctattctgcttctaagaagcctcggctttcagcagacaataaaattcatattcgaaatggagctgctggcttgtag

SEQ ID NO: 5962 - DNA, 447 bp, Oryza sativa
  Clone ID: PAT_MRT4530_12698C.1
atggcaagccacatcaacagggacgatgtgacaaacaaagatggagacattggtgcaccatataaaggcttcagcctagccagaagatcgggcaaccatactttgcttacggcaagtgtcttaacaaacttctatcggcaaatgttcaatgagagacttagtaatacagtgtaccggcacttgccatgctccctcaaggctgggagtattctctcaagggcaatagaaggcacaccagtggcaaagtttaaaaccagagaactaagaatgttcagctatattgagaccagtgaacctttaaacatatacaaggaggaggacaataaggacaagaaggaggaggcggaggaatcatcatcatcatcattgaaggatgaggaggaggaagaagaggaaaacaacgaggacgaggacacagaagaagaagtagcggtagtaaatgcatag

SEQ ID NO: 5963 - DNA, 631 bp, Oryza sativa
  unsure (1)..(631): unsure at all n locations
  Clone ID: PAT_MRT4530_12699C.1
ttgggtacccctccnaggnnccggccgggagtccagacattcatcgccaactttgaacaatacaccagcgcccaattccttccaaatctttcacaatgcctctctccggacactgcctctgcaaagccgtcacctacaaggttgacgatgagcctctcgttgttggctacgaccactgtgacgactgccagcgtcagagcggttccacctactctctcgttgctgttgtcaagaaggacaagctcaccatcaacggccccgtcaagacctactccggcaccaagggctcttctggcaacattgtccaccgtctcttctgctccgagtgcggttctcccatcgcccacgaccccgatgctgcccctgagatcatcgccctgaaggctggtactcttgataccgagatcaagaagaacctcaagcctgacaccgagatctggaccgtcggaaagctgcctttctgccaggaacacctcgccaagcctttcaagcacatgcccgagtaaggaattgcatgtcaaaatatgattatgatgatgtaacgagccgttaaaatgaggccgagcgcccgaaaataatatagtggaagaatacaattaccccctgaaaaaaaaaaaaaaaacccgcggcc

SEQ ID NO: 5964 - DNA, 215 bp, Oryza sativa
  Clone ID: PAT_MRT4530_1269C.1
cctatataggggttacagacaactagtatattctaaccaaaatattaactcatctttttaatcattgagaacaaatatagccatactgaaaggtactatatcttgtagtactcaatctacatagatatttgcatagataaaccggaattctttactaaatttaatctaatagaaaattcgaacaacatctataataataagtttattatatatac

SEQ ID NO: 5965 - DNA, 420 bp, Oryza sativa
  Clone ID: PAT_MRT4530_126C.1
atgtgcctcctcgtcgccatcctcccctacgccgccgcagccgaggcttccaagcacccgcagcacaccgcgctcgggtcattcctcctctccctctccggcgacggcgagaagctcgaccggctgcgccacttgctaagatccattaccgatggctctggccgtgtcatctccgatgctgattgggagcagctaaacgcaatgatgatccaagagcggctaatgataaccaaaaagattggcaggaaaagagcactgcctcctccatctgcagctccacaagacttggcagaattgtccaagagaaggtcagcctatgtgaagcgacagaggaaccaagttacaaacttgatgtcatatgtggagtggaggaacccaaatcctatcactggagaagttaccatgctaacttctcaatga

SEQ ID NO: 5966 - DNA, 510 bp, Oryza sativa
  unsure (1)..(510): unsure at all n locations
  Clone ID: PAT_MRT4530_12700C.1
ttttattggacctgtttgaacagcaagcttctgaggtctctacggttgagctgaaggttgcacgcttaaaccagcaaatcctcacctgccaaatcttcaccgacagagcaggcctcaggcagcagaagattggtggaacaacttttaaacatcataagcactatatcctaccatctaccggtcataaaagaactcaagctgcacgcctgcaaacagacaatggtcaggattcaaaacctaaaccttatccttcagccaagaccctttcatggcatctgtcttcaaagaacagcatttcgacaactggagcacagaaatatacatttacactaagggatactatatcgtataaacctgcatcaaatggttccatgtaccttctaggcaaggacatacctgcttctcccatgcacaagcctctgcaaccgaatgggaacaccagttttgatgcttagacaaatgtttgttcaaaggaccagccttggnttcatgcatatgtcgacatttaat

SEQ ID NO: 5967 - DNA, 2145 bp, Oryza sativa
  Clone ID: PAT_MRT4530_12701C.1
atgtcgatgtactcggtcatcgcggccggggacgaccaccccacgccggcgtcgtcggtggccgcggaggctgccgatgggagcgccgctgcgggcggcggggcagcggtccagcccgcggccctgccgccgctgcttccgccgccgcagatggtggtgctggcgctcgacgcgacgagggaccaccgggaggaggagatcaggatggcgctcagggcggtggtcacgcgcggggacatcctccgcgccggcggcgactccctcctcgtgctcggcgtgctccacgccatcaccaatcccatgaaagagatgtcaaatagatgtgcctactgcaattctgtgctgttggtcatcaatattggggcaacatctcgttgggtaggacaacctataatgtcattgggataccaaaccaaggcatgtattgattcttttgccgggacgaacttgcgattactaagtgatcaggttaaggcgaaagctgaattctaccaaaacaagctccgtcatgacgtggaggagctaagcaaagtcgggattaatgtgacccttaaggtatctcctggatcaccagccaagtttgtcattatcaatgaagtcaaatccagcaaagctgcttgggttgtactagataggcacttcaggagagatttcaagtacttagaaaagcacattgcctgcaaggtggcagtatttcaggataacttggtggtgcagccattgaagataattaggacaattccaccgagcaaaagcatgggggaagtaaaggctctgcagcacctagcagtatcactcgacctgcgttcggagacattagatactgacactcatagtgtgttgaccaagtcatcacctgtaagttattttgcctctctaagctatcacgagatgcatgaaacatccagtgtggtcgggagcagcatgtcatatttgacaccatcaatgagcgccatgtctctcacaacgattgacggaactgattccttgtccaacggtaaaggtgttgaaggaaacatgttctaccactatgattcatcagagcgaccagttctgtgtgctggttgtggtctaaagtcagttctttacataaaggaatctatgaaattccccttctcagagattcaagctgcaacgtctgaattctcaaatgagaatttgctgggtgagggtgggtttgggcatgtttacaagggccaactcaaggatggccaggtcatagcagctaaagtacgcaaggaagcaagctcacagggctatactgagttcttctctgaagtacaagttctcagctttgcccggcaccgaaatattgtcatgctgcttgggtattgttgcaaagaaagctacaacattttggtgtatgagtacatatgcaacaaatcccttgagtggcatttatttggtctaacagtaccagtatttcttgtcattattgtcagatacttggctcccgaatatgctgaatatggcatagtttctgtcagaacagatgtttatgcctttgggattgttcttttccagctgatatctggtcgcaaggctgaacctttggtcgagagtcttgcactacatgaactaattgatgagcgcattgcagaaacatacgatacgtatgggctgtatcatctagcaagagctgcatatctttgtgtcaggataaacccagaacagcggccttctatgggagaggttgttcgtcttattgagtcagaaaatgaacacatcagagatttgtcccggcaattcatcccacactttaccaagtgaagcagtattcagagagaaatcgtctgctttgagttcacccttaataatactctgccactgtagtgatttctttttccatctctctctcgttatctgttcacatgcatacaacgctgtatgtttgaggaatcagcgcttcactttctgatagttctgtcttatctttgccaatgaaagaaaagcatcttgtcatgttattgtcctttgtgttactaacatcaaattttggggctactgtgtaggtgaagagtgtgatctgtagagtacgaaagaagagtgagccgtgctatgttgtgaccattttattagcatatatctaactcagcagtttagtttctgctaatataaagatatgcatctaggcagctgttttcc

SEQ ID NO: 5968 - DNA, 274 bp, Oryza sativa
  unsure (1)..(274): unsure at all n locations
  Clone ID: PAT_MRT4530_12702C.1
gacccagcgtacggaacgacaacgaggcggtgggaaccgagtggnaggactacactagtcgaagaccatnaggcagtacatggcagagatcactggcgcacgcaacgctgatcctcaatgataccgccatgnagaaaaaagaacaataaaccccgactgncgcctaaaaagaagagctagagggaagaaacaaaaacaatnaacgaggngagacaacaaacanannnnnntnaaaaaaaaaaaaaaaaaaaaaaaaaaannnaannnnnnnccc

SEQ ID NO: 5969 - DNA, 480 bp, Oryza sativa
  unsure (1)..(480): unsure at all n locations
  Clone ID: PAT_MRT4530_12703C.1
agatttcaaagctttatgatgagatgcatatccgtggacttctcccaaccaattggattggaaattggaaacgatcagatcctgttgttgtaaacaactggaacagaaaagatggtcatatgaagacgtacagtcagtgctagctcatctttgaatatgctttccatacttgtaagtgctggtcacttgtggattatgtgagaaagctcatgagggtattgctgacctgaagaggaatcgtttgttcgaggaagctttcctggataaggacatgccctagaggagaacctggtagcttcaacaaaacttttttatcactaagtacagtgtatccagaagttctcatgaatcatgccagttgaatgccagcttaaggaaagaatggattcagatgatcctttttgtgctaaggtgaaaacaaaagagaagcagttgcagaaaagatactggctcanaatgcttattgatttggtggaaagc

SEQ ID NO: 5970 - DNA, 102 bp, Oryza sativa
  Clone ID: PAT_MRT4530_12704C.1
atgaagtcgcttggagttcgccgtgtgcgtcggggaaatcgccagagagaaagaggacaagtatcggagatgaagattagatcgaagcagaatcaaagataa

SEQ ID NO: 5971 - DNA, 312 bp, Oryza sativa
  Clone ID: PAT_MRT4530_12705C.1
atggtggcatgtgcggtgtcgacgggtgactgtgggcgggagacgatgcggcggtggatccggttgccgctctgcgccccatgcgcgtggatccagctatggcggcgcggtgcgggcggcgcgtccgtggatccggtgcccccttcctcccgcgtggatcctgcacggatgaagactatgggcaggaggcaagatggcggcaaccttcgcggcgcttatggaattaatgccaaatcaatgcacgctatgatttcgcagtttctggaccggcggatccggcgacatggagttgatttctatccggtgaattaa

SEQ ID NO: 5972 - DNA, 797 bp, Oryza sativa
  Clone ID: PAT_MRT4530_12706C.1
tcaggcttttgttgtttgaatgtcactgtagccttcctcgccagcgccgtcgctggagcgcggggacgggacgggcggctgcttccagatggccggcgacaacgccgggcatggcgagctgcccctcactcttctcaggaagaactcgagcaggaagcagccgtcgagcaccagcatctcggcgaactcgtcggcgcccatggagtagagggattgggaggaggcgcgcggcggtcacactcttcactgctggtctcccatcccgccgccgacgaagcagaggcactccttccgtggcggcggcaggcacggtaatcctaactcctccccatctccggcggcttaccccgctggatcggccgaggctcctaaccactccatcaatgccatccacagccgcccactggctgtcctcgagggctcgtgcacgccgggctggagctcatgctgcggcggcggcggcgtgccttgggcagaggacgaggagacgcgccgcctcagggagaccatacaccgacgagatcctgcagtacatgggcaggtcgtgcaagcaggagcacgagctcacctcgccgcaggccagcggcggcggcagcagcaggccggcgtcaaggtatctccggccaatcgacatcgtgctcgacggccacggcttgatgaaactgccgccactcgagagcccgtcggcggccacaacgctctcgtctactccaagcacggctgcgatgcggcctcgtcgaccaccgccgccgaccacctgctgctccactaccaccaccacacggactgggccatga

SEQ ID NO: 5973 - DNA, 1086 bp, Oryza sativa
  Clone ID: PAT_MRT4530_12707C.1
cttcttcatcttcttgctagctacaaatgagagcttagcatgtgtagtggcacaagctcactcactcactcactgacagtatcggttgcctagctatagcctagctagcttcacttgacctaggtagatatagtagttctttggcttcttgcctaccgcgttcttggtgatcgttggtgttctagctaacttcaaatggggctcgagcttgagctgtcgtcggaattggccgcgctccggccgatccgggtgacggcggcggcggcggcggctgggagcggcgccgcgacagcacggccggacgacgccggtgtgccggaggagagtgggtcagctaccgtgcggcaaggtggtggtggtggtggtggtggcccctccttgtccgcggcgcgcggccggcggtggtccaatcgtcagatggaggcgtcactccgacgtcggccgggagcgcgctgcggccggcgacgggtgtacccgccggcgccgcggaagccgaggcccgcggggaagaggatgacgaagcgctgctgctgcggcggcggcggcggcggccggccgcggcgggccgttcttcccggtgccgcacgacctcgccgccgtgttcgtggcgcgcgccccggcggccaccacctcgccgccgtgcccgccgcccgccaagaagatccgcgtccacgccgtggggtgatccgtctcgctcgccgtcgccgctgaacgacgacgatctcgctagatcaccttcgcgtcgatctgaacgccattgccacagctggaagagtgggatagatactactcgaatctccaagaatggccatgaattcccatacgtacgacatgtgtgtgctgccccgacaagtttggttagtttcagaatttgcagtggcttaatttcttctttctgagacaagaacatcatgtccaaataatcgaattgtaaatacttcttgctcagactgcgcgaaaatgtcatcgcgcaggtcagaacgaagaattcaagatcaactcctgcaaaatcgctgttcacagttgatcatgttgatatatataatttgctccaaattgttgttaaaaaaaaaaaaaaaaaaaaaa

SEQ ID NO: 5974 - DNA, 649 bp, Oryza sativa
  unsure (1)..(649): unsure at all n locations
  Clone ID: PAT_MRT4530_12708C.1
cggccgcgtgggttcatcgacaaccatgacaccggctcgacgcacactgtggccgttcccctccngacaggtcatgcagggctacgcctacatcctcacccaccccggcaacccatgcatcttctacgaccatttcttcgactggggccacaaggaggagatcgagcgcctggtatcgatcagaaaccggcaggggatccacccggcgagcgagctgcgtatcatggaggctgacagcgatctctacctcgccgagatcgacggaaaggtcatcacgaaggtcggaccaagatacgacgtcgagcacctcatccccgaaggcttccaggtcgtcgcgcacggtgacggctacgcagtctgggagaaaatctgagcggtggagaggcacaattagcagattttatttacctgcaattttttccaccctcgacgtataacatatacatgtgatggcaacgagttgtatgctgtatctgatctgaactatgtacgcgattgtccacaaagtactacctccgtaaataaagtgaggatatggaacatgcgtttgcatgcatggttttacaaataatggtatgcaataaaattttcactgcttatgcatttttaaaaaaaaaaaaaaaaaaggcgggcggtctaaaggaccaaa

SEQ ID NO: 5975 - DNA, 1564 bp, Oryza sativa
  Clone ID: PAT_MRT4530_12709C.1
atcaatcatccatctccgaagtgtgtctgcagcatgcaggtgctgaacaccatggtgaacaaacacttcttgtccctttcggtcctcatcgtcctccttggcctctcctccaacttgacagccgggcaagtcctgtttcagggattcaactgggagtcgtggaaggagaatggcgggtggtacaacttcctgatgggcaaggtggacgacatcgccgcagccggcatcacccacgtctggctccctccgccgtctcactctgtcggcgagcaaggctacatgcctgggcggctgtacgatctggacgcgtctaagtacggcaacgaggcgcagctcaagtcgctgatcgaggcgttccatggcaagggcgtccaggtgatcgccgacatcgtcatcaaccaccgcacggcggagcacaaggacggccgcggcatctactgcctcttcgagggcgggacgcccgactcccgcctcgactggggcccgcacatgatctgccgcgacgacccctacggcgatggcaccggcaacccggacaccggcgccgacttcgccgccgcgccggacatcgaccacctcaacaagcgcgtccagcgggagctcattggctggctcgactggctcaagatggacatcggcttcgacgcgtggcgcctcgacttcgccaagggctactccgccgacatggcaaagatctacatcgacgccaccgagccgagcttcgccgtggccgagatatggacgtccatggcgaacggcggggacggcaagccgaactacgaccagaacgcgcaccggcaggagctggtcaactgggtcgatcgtgtcggcggcgccaacagcaacgccacggcgttcgacttcaccaccaagggcatcctcaacgtcgccgtggagggcgagctgtggcgcctccgcggcgaggacggcaaggcgcccggcatgatcgggtggtggccggccaaggcgacgaccttcgtcgacaaccacgacaccggctcgacgcagcacctgtggccgttcccctccgacaaggtcatgcagggctacgcatacatcctcacccaccccggcaacccatgcatcttctacgaccatttcttcgattggggtctcaaggaggagatcgagcgcctggtgtcaatcagaaaccggcaggggatccacccggcgagcgagctgcgcatcatggaagctgacagcgatctctacctcgcggagatcgatggcaaggtgatcacaaagattggaccaagatacgacgtcgaacacctcatccccgaaggcttccaggtcgtcgcgcacggtgatggctacgcaatctgggagaaaatctgagcgcacgatgacgagactctcagtttagcagatttaacctgcgatttttaccctgaccggtatacgtatatacgtgccggcaacgagctgtatccgatccgaattacggatgcaattgtccacgaagtacttcctccgtaaataaagtgaggatcagggacatacatttgtatggttttacgaataatgctatgcaataaaatttgcactgcttaatgcttatgcc

SEQ ID NO: 5976 - DNA, 466 bp, Oryza sativa
  Clone ID: PAT_MRT4530_1270C.1
cccaagaaaaagcaggggcgggcggcttctccttttttaaaaaaacaaatgggcctagcaagggttccattacagtatatgcccttttttaggggaacaaagggccaacccgccccagggtttcaatttaacccagcgggaaatagttaataaaaaaagggcccccttgcaacacccttataagggtcctcaagggggggggctacttttttccaccccaatcttgcccccaagctacacaagagtagtaggagggcccccccctgacagggcccgatcaaataaacagcggggggcccaagcacccccaaagcataggggcgggcttttacccattcattttgggggcccatccaaaaaaaaggggctccttagctgccttcgtttggaaaaaaaattcggggttaaacaaaccctttgggaaagcaagaacattggttaggtcttccggaatcttccacccttt

SEQ ID NO: 5977 - DNA, 168 bp, Oryza sativa
  Clone ID: PAT_MRT4530_12710C.1
atgggcacgcctcgtgttgacgcgtgcctgaaattttctataccgcgttgcgttgacagaatatccattgcggattcatcatgtactaatgctagttctcgagcttttgctgatgttttcccgccattttccaaccgaacagacgatgtgttaggttattgcagctaa

SEQ ID NO: 5978 - DNA, 2335 bp, Oryza sativa
  Clone ID: PAT_MRT4530_12711C.1
aaaaatggaaatgtgctgattttttttttagacaggaacaggaaatactaaaaggcaaaggccattgtacaggttattccaatactactacatattccaacctctttctgctatgttccaagttccgacctgtttaatcagataggaacaacctaatgtgtcaatatagctgatccagcaaagttcagagttccaaatctttcaggaaccggccggatatccgagaaaattgatacacagagacacagaatcagagtccagaatcctacattgttgtacaactcgtagctgttttctgtttgtcactgttctacaatatactgcagcactgcttttagctgacagttttgaaaggggttgcaaccttcaggctatcaacaatgtcagtgacagagccaatgcccactgccaccgagatcatcaagcacaccatgctcaggccttgcaggagataccacctccctcccctggtgatcttctcctgcgcaatgtgcatgctgatggggaagtaaacagtcagtggccagaagctgaaggcgccgaggagccccagcaccgcgttgaagaacggtatcatcatcgccaccaccgtcgtcgcgatgactacgacggtccggaggacgagcttgtacggcgccacggtcaccgatcctcgctggatcagcggcacgtttacggtgtactcgctgttgatgaacttggcctccggccaccgggaggagatccatctctccattgtcgcaaatatgggctgtgcataaacctgatatgctccgatgagatggaggatgaggcacatgttggcaatgtcgacgagccagaagggccccataccggacgccgtcaggatgttgcccggagcatctgaaccgaacgcggcgtacccggcgcagccaacggagatgtagaagatggtggtggctccaatcccgtacatcgctgccttcttcatggtcttgttctccggtggtgacggtttcagtgtgtcctggatctcaattagcacttctgcaaaggtgtaggcgaaggcgatgttccccagtgcgagcagtacgttccagagcttcttgctggaggacgccgcggtggcgccctggatcctgccgctgaggtggccgccgtgcgacacccactccgccacggacaggccgaggccgatgaaggagtaggcgaacgacatgacggcggcgacgacggacagccaggtgatgtgctccaggcccgggaactgggacagcaccacctgcacgatgctgaacgccagcatgagcaccgtcgccgacgtgttgtcgcaccgcgcggcggcgccggcgccgttccgatggatgcaatccgacctcctgatcgcgaccatgcttatggttgcggtgattgtgtagccgaccatggtgccccacaggttgacgtactgcgcgattccgcacatgaacacctctctaggactgaggtatgatctgacggcgtccatgtatgtgcggttcctggtgccggtgacggggtgcggcgcgcggtaggcgttggcgagcagagtggaggtgtagtaggtgacgcaggcgaagccggcgagggcgagcggcccggccacccaacccagctgcgccacgctccacgccagcgccagcacgccggagccgatcaccgccgtaacaatgtgcgccgtcgccgtccataccgtccctgtccgctcgtgctcgccgctctcgacgtcttccggtgcggcgttcttgttcatgttgtcggcgagccccgtaggtgtcacgagggagagtgcgcgaggagggatgcggccgaggcgtgaaccgttaacgaatctggacggtaggccgtatatatagggaggccgcgtgtgcctcccaccgccgtcctcctgctcaaacgcctggtcgtcgtcggcgaggaggcggtgaagctcagcccaggtgtcgctgccaccggtcgtccagtgcctctgtgcctgggcaggggccccacttatttctattataagcgggttcatggggtggccgcttgcacccctagcactgttagcacgggcttctagtgggcgtcgaaggaaagcatgctcgctgaggagaagatgtgtggcgtcttcttcgaggcttcgagctttgcgatgttcatccttgtaacagccggccaagcggatgcgaagcgtggagtagtcaacaagagcctcaagaggcaagtgatcaggaagctgtccacaggtgcttatcctcccccgcttattttgacctataagtgggttcgcggctgacccacttacacccctacctacacgcaggagctcgatcgggccgtgtatgagcggccacggctggggcggtgccgccat

SEQ ID NO: 5979 - DNA, 156 bp, Oryza sativa
  Clone ID: PAT_MRT4530_12712C.1
gaggcgacggtgcaccgcgaggaggtcgggaacggcggggatcagcgaccggaggtggcaaacggcggcggtctcgggttgatggcgaaagtgcggtggaaagaggtggtgcgcgtggcggcggcgttacggaggcgaagaggggaaatagagtag

SEQ ID NO: 5980 - DNA, 345 bp, Oryza sativa
  Clone ID: PAT_MRT4530_12713C.1
atggatgatgataaagtcaatgcatggatggcaaagaagacaatgagcacgatgtttttggggcccaagggcaatacgaccacaactacgtcaacacaactccccattgatgtagttgtaggaggtccactagcagcgtcgttgaacatggaccatgagcttggacactacggcccaagagaccgctatcgggaccctccatcagcaaggaggatagaggagcttggtgacagtgttgagcatggagggtgtagtgcagagataattgaaggaagtacgtacaacaactgccatggaagctcctatgatcgatggcatgacctagagaagagcaccaagatgtag

SEQ ID NO: 5981 - DNA, 298 bp, Oryza sativa
  Clone ID: PAT_MRT4530_12714C.1
gtgctgccagcagctgcaggacgtgagccccgagtgccgctgcgccgccatccgccggatggagaggagctacgaggagagcatgccgacgcccctggagcaaggctggtcgacgtcgacgaccgaagactacggcggcgaggggccgtcgccggagcacgggcactaccgcgaggggtcgccagacgagggctactacggccaacagcaccagcagccgcggatgacccgcgcgaggccgaccacggcgaggcagtacgcggcccaactgccgccgatgtgccgggttgagccccac

SEQ ID NO: 5982 - DNA, 532 bp, Oryza sativa
  Clone ID: PAT_MRT4530_12715C.1
ggggaaagccgggtggttcaacggagtagccttctttcgggtggaacaagcttacttagtgtgaaccccaaacatacttagtgtaagtttgtaaaggaagcccacataagaagaaaggtatgtggccatgtacagtggcaagttccaaagacagaacccttaactgctatgggtaaccccactttggcaggaaagagttcctatctgccgtggctctcccaaactggatggttctacataaggctatgatcgcaatctgcaagagaagaggctccagaggcctcaagcaataacagaggagatggagttcggtcaattcactgcccacgccaaataacagagagctgaccaaagacagtgttatgaatggtgggcaggaatcctctttaatggcaatccagataaagaataactaaataaataatataaataatcgcaaccattgcgttgcgctatgtacgtaaaagtttcttataataccagttcggaagctaagaccaccccctcaagagggtctttctaaaaaaaaaaa

SEQ ID NO: 5983 - DNA, 810 bp, Oryza sativa
  unsure (1)..(810): unsure at all n locations
  Clone ID: PAT_MRT4530_12716C.1
ttttttttttttttttttttttttttttggttcaatcaggttcccaagctaagtcctgcataggttgcagacagggataagccaattgatgatcccacagcagtggagctaacaatctccaggatggtaatcttgctgtcttaaaccagtcagcaaagaccatcatttggtctacccaagctaaaatcactaccaataacaccattgctacgcacttgagtagtggaaataaatctcatcctaacaaacccttcaaactctttagaagtttctcggtggagctttgactatcccacagatacatatttccctagggcaaagtttggatggaacaaggtcaccggcctaaaccatcatattatttcttggaaaaactcaagagacccagctatcggtgtgtattgcaatgagttagaccctactggtgttgatcagactagcctttcgccattgaaactccgattcctctgttcttcagtttcgtcaggttactgtagcaatctgaaattctcgcttcagaaatcagaacgtgcgagtgatacacagagctgagtggggaggattgagagataggttagctaatcacaacacggggcacggtataaacttcggccaacgacaaccgcggttaatgccgtccgaagtggaaccataatcctgatctcgtgatctctactctctagagcgctaattaaatttctaccggaagttgaaccctagccatcccaaacatgctatatccgtctctcgattcgctcgatcggcgacagcgacactcgcaggggcactgnagnaagaggggtgacgaga

SEQ ID NO: 5984 - DNA, 384 bp, Oryza sativa
  Clone ID: PAT_MRT4530_12717C.1
atggccatcatgcctccgaaggctggccaagggcaccagagcctatcagcccagagcccatcaaacccccggatccaaccaagggctccagagcccattaagcctccagactctagaggctatcaggcccgcttgatgcacctggccttcggagccaaccaaggtcttcggagttggccaagattacggagcgctgaggaagccccaggccggaggcgaaggcggaccccgagagcgcagtgggccgtaataaatacgcactacgcacccgccaaccatatctggcgtcattacagggacgggccagcacaggccactacccggaaagcacggctttgcccgggtaatagccagcaccctcgggaggcgttatcgccttcttaa

SEQ ID NO: 5985 - DNA, 187 bp, Oryza sativa
  Clone ID: PAT_MRT4530_12718C.1
cgacctgatgatctccaccgccacctccatggcggtgggtacatcggacgacgacggcccacctatcaagatcactatgcggtacgccaacgcggaggagtcgcgtggcgcgtgctcgacagctgggcgagaacgcagtcgcgcgtgcgcgcgacgactcgagcgccggcacgacggatgccgctga

SEQ ID NO: 5986 - DNA, 636 bp, Oryza sativa
  Clone ID: PAT_MRT4530_12719C.1
atggcgaaggacagcaggtgcacggatcgctctgggtaccgcggccgcggccgcgactcccccaccctcacggtggcgtcctccgacatgatcttgcggataaggctgaggtgcctctctgccgtgatgcgcaacgccgggagcacaggtcaccagcgtcttgggccatgggtgtggcctggccgaccccccgattttcgcgccctaggcgcccccatcatcagcgcgaatgccctcagggggccaatgtccggcgtggtgctgggggctactgtcggagatatgggcccgggggtatgcaaagtgaggggaagttaccttccggcccttcctccgcgcctcgcgagtcgcaggagcagccagggggcctcggggtgccacgtcacacacctcgggccctcgcgctgcctcgccccgaggccctcgcccaaccgccacgtggcggggggagcaagcggggaggagacccaagccaagccgctatcattgcgcgcgacgccccaactgcccctcaccgtatttaatgcggcggccgtgcccccatgttgcctctgcatccacgcggagtggagggctgtcccccgtgttaggtggggggcgacgatgggtcccactgaagggcggaccgccacttag

SEQ ID NO: 5987 - DNA, 350 bp, Oryza sativa
  Clone ID: PAT_MRT4530_1271C.1
tttttttttttttttttttttttttttttttttttttttttttttttttttttttttttttttttttttttttttttttttggggaaaaattggcccaaaataaaaaaaaaaaaaaacgggggaaaaaacctttcccattgggaaaaggggcaagggtggaaggtttttaccccttgggagggtccaggccaaaaagggaaagttttttaaacctttcaaggggttggggctaaggcctagcacattgggtttaaaaaaaaccaccccttaaaggggggaaaaagtgggggaaagaccccccttggggggaaaaggcctccgaaattttgtcgggggaaaggggttaacc

SEQ ID NO: 5988 - DNA, 563 bp, Oryza sativa
  Clone ID: PAT_MRT4530_12720C.1
cctatccagctgcaacctcggatggaggacaaccttatctggcggtggtcgaacaataccgccttctcgatctacctcgtcggcttataaagctttcttcacggggcaacacttgttcgcgtgtaccgaccccctctagcatgcgcaagcgcttgcgaagtgctggtttttcctctggctggtgctgcaaaagtgttgttggatcgccgatgtcatgttgcgtcataccatggagagccacattgcttgccccttctacacccaggagcaggagacgcgaaccatatcatcatcgcttatgtcttcgactcttcgctcgctaggtctagttccaaatcctcgcgccgctggatgggctgatgttgccctagaccatcatttttgggtccaagaccggtggccgcaaacttggcatcgacttgcgagggaccatcaccgccccttcgattctattgtttcgttgacatcctggcaactatggtagaagtgtaatgcgtgtcttcgacgctgtcctatcgtcagttctgatcatcgtcgagaggattaagcaagaaggaaggcta

SEQ ID NO: 5989 - DNA, 138 bp, Oryza sativa
  Clone ID: PAT_MRT4530_12721C.1
attattagctgctgagaactcacggtcaatacagtggacatttacattacgcagggtaattgcgtgcggagtcgaaacaaagatgtctgtcgaactgtgcacaagttaaaaattgaacgagatgtcctaggaacgctc

SEQ ID NO: 5990 - DNA, 450 bp, Oryza sativa
  Clone ID: PAT_MRT4530_12722C.1
atggcggcggggccatgccgggtggcggcggtccttggggcggcgtctacgcgcggtcaaggggaggagctggcggtcgcgcccgtggtccaggcggtggcaggcggtgacgccgatggtggtagggcaaaaggaaaaaggagggggagaaagggagctctgctccttgctgtttcgggaaaagttgaaggagggagagggaatatttttgcctgtagtttggtgtgggcgaaggggaagcctcgaagtgcaaagccgcccctgcttgcacgcgatgtgttcggtgaaatgcctctgggacgcacagcagaaggggttgaccaggactgctctgtcaaagagcagaatgtccttaacatcagcactgcctgcttgcaaattatatgcttacatgaattaatgggtatggaagcattatcagtatataccattgatagactagctagctga

SEQ ID NO: 5991 - DNA, 1371 bp, Oryza sativa
  Clone ID: PAT_MRT4530_12723C.1
ccacagggcacgataccgccgtccgttcgcggcgcgacccttcgccgccgcgccgccgcgccggcgctatgcagcgcctccaaaagcagctccttcccgccctgcgcgccgccttccctctccctgcctcccacttcagcagccgccttctctccgcctccaccgccaccttatcccccacccgcttcgtcgacgaggacgccctcgtcgccgcctgcggcctcaccggagccgaagccctcaaggcctcgaagcgtctacagaaggtaccctcaaatctagacgccgccctcaccttcctcgcctttctcgccgacttccgcctctccaaagacgacatcgccgccgcaagctcacggtacccgcggttcctccatctcaaggtggacgaaaccctaacctcccaagtagcccggctccgggatatcggcctatccactcccgagattggccgcctcattaccatcgccccctgcatcctctccaatcctcgcacgatctcccgccttgaattctacctctcctttttgggctcctaccccagggtgcactccgcccttcggaacaattcctcccttctacggcgaaacaacatcgagagtgaggtcaagcccaacattgcattcctggagcagtgcggcctaactacttgtgatattgccaagatcctcatgtctggctctaggatactcattatgcagccagagcatgtcaaggaaattgtggcgtgtgcagacaagttcggtatgccccgtgagtcagctggtttcaggtatgccctgatggctgttaccggcatcagcccagtgagggtcagcgcaaaacttgatttcttgaggatggttattggatgctcagatgcccagctacacattgcggtgtctaggtttccactaatcctgacatactcagaagttaagctgagccgctcactggaattcctgaaagcggaggttgggttggagcctcagtacattgtgctccggccagcattgctcggctatagcattcagaaacggctgatgccgcgttatcatgtcatgaaggttctgaatgaaaagggcctgctgaagaaagacactgatttttactctatggttaaaatagttgaagagagcttttttaagaagttccttctcccataccacaggtctgttccaggacttgaaaaagcttatctggctgcccgtgaagggaaaatgtttcctgaaatctaaaacagagatgctggaggtttattctgcctaggaacttgataatgttctgcattttacatcttgctcagttcttagatgatttctagcgatctgtatttgtgatttcatctggctttttgagacaaacatctaattttagtgcactcttgttctc

SEQ ID NO: 5992 - DNA, 268 bp, Oryza sativa
  Clone ID: PAT_MRT4530_12724C.1
gacgaacgccgccgacgccgccgcgctggagccgccatggcgccatggccagagcacgcccaggcttgtggtggagcagctactcctcctcttcccttaccaccgcatcgccttgtgtcgccacgtgtcattccacgtcatcgagtccacatacaccgagtccacccatacactctatgccactgacaacgttggagctgaagagcatttcgcttcagaacacgctgtgcaaggacagtactgggatcaaggcaagtgcactctttga

SEQ ID NO: 5993 - DNA, 296 bp, Oryza sativa
  Clone ID: PAT_MRT4530_12725C.1
cagaaaaccattgaagttcatcatttattccccatatgtaaaaatgccttcctgacaaaggaaagcactatttttttagcacccccccagagtcatacacacagctggctttagtaccctaaggaccagttttcggggccctaggataacctacccagtagcagaccccccctgcccctttggggatgtccacgttgaaaaacgccgggagggttgcccgcgggccctccaagtccccttctcggcagcgggggaacacctcggccatggggggcccaacatggggggcgccgagc

SEQ ID NO: 5994 - DNA, 267 bp, Oryza sativa
  Clone ID: PAT_MRT4530_12726C.1
tgactgctggtctcaatggaagtagtctccataattttttaatcatttctgctcatccgttcagttagatgtgcaattgttaatctgattgtatattctgccattaagcatagtgaaggttaccatagaaaattttattcttgtatggcgacttgattgtactgagtgccgatggtatggctcaagtagaagtggttgcgatcaaaacaaaattgaaaacaccaacgaagacgaatccatcgtgcataacatatataccactacaaa

SEQ ID NO: 5995 - DNA, 1520 bp, Oryza sativa
  Clone ID: PAT_MRT4530_12727C.1
cccacgcgttttttttttttttttaaaagcagaagcatctttatttattaacgcgacgccgaagcaacacgaagagcgcaaacataagttgagcagacacgcccatggttacaaaagtttggacagcaaaacaaagttaaccagctgcatacctaagcatggattgatagatagctcacatgcttaatcagagttaagcagctagcttacgcgggcttagttactacttcgccggcacctgctcgataacccatggcttcctctgcttcgccgccttcttcttctcctcccacctctcgtcctcgggctcctcctcccacttcttcttcttcttcttctccggccaggacggcaggatcaccgcctcattctgcgccagcaccagcttcctcatcgccttctccgggacgccgaacgcggcggcgagctccgtcccgagcagggcgcggagcacggaggagccgccgacgaggaactgagggtggttccgccgcgccgacgtcgtgaacccgaagaacacgaacggcccgccccgcgacgccacctggcagaacgggaagtagcgcgggatgtagaacacgtcgccggcgcgcaccgtcgcgctcatcgccttcgacccgttcgggaacacgacctcgatgcagcccgtcccgctgagcacgacgccgtactccgtcgccctcgggttcacgtgcggcgccatcatcgatccggcggtgaggttgacgagatagacgccgatgtcggagtggccgaggggctcgtagtcgtgcttgtcgacggcgacgctggatccgtaggcgttgcggaagccggtgccctgctcgtagaggttgtacggctccggcgcgcgcaccgtcttgtccttcttcttcttcggctgcgcggccacggagttggacggcgccccgcctccgaccactccgaggagacggcccacgagcttcgtccacgaccacgtcgacgacgcttcgtccaccaccaactcctcctcctcctcctcctcctcctcgcctctgcccactggcctccactgcccggccgccgcgccgcgccgtgctccgctgtatccgactcccacgccgccttggccgccgctcatcacgggctccgtggtgtagtacatgataggcccccgcccggtatccaccagtaatgtttgatccaaatcctcgaaagtggtgttgaacgcgataacgagcgtcttggggtcaaagccggcgatcaccgactgcgggtgccttgaaccgccgccgccgccaccaccaaggaagaaggcctgataagggccgaagccgatgttatcggaggcgtcgatgctgcagatgatcttcagcctctggcccttgccggagttgaccatgtagaacgtcgagccggcgtcgatgtggaggacgtcgcccatcttgaggttcttctccacgagctcgtccttgtgcatccatcccaccttcacctcccctagctgcacgcccacgcgtccgcggacgcgtgggcggacgcgtgggcggacgcgtggg

SEQ ID NO: 5996 - DNA, 1745 bp, Oryza sativa
  Clone ID: PAT_MRT4530_12728C.1
atggccgccgtggccatggatgcaaagattcctcctagctatctagagagggccatatcgatcgatcactttactcactgcaaaactgcgacggccacggataattgcataatgcgaatcaaaccatgggacagatcagtgatgcacaagtgttcatctgcagcatatcctcttcaatcacatggtacagaatcaagaacctccgggggccggctggttaggagaagtggagctatcaaacgggagcccaaaacgacgatgggcgaccaagtgtggaacatggattgttttcgattcgaggaagctgctgctgtcaccggcctaggcactatcctccgcacaaacgcagaattaaacttatgcagtcaacaggaagatgggaggacaactacactatacacgcacgagcacattgatatcaacaaattaaaagccacggatgataacgatggttatctcatgaacagagcatgcaacagccggccacagcttgccaaccgtgcctttaacttggccaccattatctcatccttcccatccattgtgttgattattgcaagtgcacagtgtagtagtactgcaccaacgacgtactaccacagatcaaaaaaaaatcagtgtcaggagacggtggagggatataggaatcggcagcgaacatatatatcgatccatccagatttacggtggagcgggatcggacggtccagcgcaacccgtggctgtgtccatcgccgatcgaacggctgccagcaaaacgggagcccaatgattaggtcgagattgggttaggagacacggcacgcagccgttcctatcctcctggatccatgggagagagagccagtgaactcatccagccaccgcgcacgcatgcatatggctccgtccaccggaggcgtcgcggccagggagcacaagcggtaggaccatccaccatccacaagaccacaaccatgagcgcgcgacgccgcactctcgtcacctgtcacgactcacgaccatctcgcgcgatttgcagagcgcaacggtactataccttcgtcgtcaatggatcgagtgtggactttcgtctttatcaacctgcgactaaggagaatcaagcaccatttagtggtttgttcttagaccgactcaagcgattgagacagaggacgacgacgcgacggttgcgacggccctgccgtgctgaccgacataatgcctcgacaagccacgccttttctcaattaagagccgggagacggggagatgataccggtcgcgatcgagaccgatcgatcgccattaaaattggagcgtgcatcgcgctcgtgcacatggatgtgctcgatcgattgatcggccgatgcacggtcaccgcgagcgatgatgcaaccggccgcgggagagcatgcaccgaagtggaacacgatgctacgaaatccagtggtcctggattgacatttgcaagatcattcttgcagctacaagctggactgatcgatcccatttcgtcatgcacggcacagcagcctgcatatatgggaagtcgtagatccagttgccatcagatcattctttctgcaatgatatcactcatcaatccaagtcgcagaacaaccggacaccgatcggtatacgtatgtgccatgatcatatctttcgatctgaccgagggaaatgtcgattggctagctgttggttccgtggcatttccacgcagcagagagatgggagctggagagatgtccttgacggtgcaa

SEQ ID NO: 5997 - DNA, 750 bp, Oryza sativa
  Clone ID: PAT_MRT4530_12729C.1
atgtcggtttgggagaggggaaccgacattggacggttaaggcgcgagctggcgctcggcgcttgcagccaaagcggtggcaggaggatgacgccggcgaggaggaaaaaggggaaaaggagggggagaaaggggcttgcccctttgccgattcgggaaaaagagggggaggggaacgggagcatcgcggcagagggaggaggggcgcggctccgtcccttggcggcttgcgcgcggaggggcgggggccgggcgatgacgacggtgatgacggcggggcggtttggagcggagcggcgacactggcgacaggcgcgtgcagaggctaacggcggcggcgaccgggcggtcggccaccacggcacgcgcgcgcgggaagcaacgggcggcgtccgcgcgggcgcgcacacgctggctcgcgaggacgagcggctgcgcggctgcgcggctgcaggcgcggcagagcgaggggaaagggagggggcgctcggcgcggcggcttacgcgcacgcgcgcgcggcgtgtgggcgaggctgagcgggggagcggggagagaggcgctcggggcggctctcgcacgcgcgagcagcgtacgggcgaggccgagcggggggagggagagatgggagagcgagagagagagagagagagagagagagagagagagagcgcccggggagagagggggccggggaagaggggaagatgggccgagcgagattcggcccatcgacctcgggggagacaaaa

SEQ ID NO: 5998 - DNA, 1538 bp, Oryza sativa
  Clone ID: PAT_MRT4530_1272C.1
agttaaagctgattctgtattatcacatttcttcaagacatcagtatgacagatggtcataaagaccgtataatattagcgatataatgtgcattcataccttttttttttcctacaaacatgaatccctaactactgtatacatctctcaactctggagacaaaaagaaattcaaaaaacgcaaaagaaacaaagtgtgttatgacaacaatatcaaactattttcttctgatatccgagcacttcatcttcattgacataccaactaggtacatgtccagtctatcacaattcacaatgcatctgcatttctaccacctctcttactaactagttcacaaagtcggcaaggcagtgtgtcaaggctcatttcacgcgaccttccaaagttacccagggtaccacacctcctccatgcatggtattctgcataggctacgggatcatttgcaacagctttcacatatgatgccaactcacggagtgagctgaattttgaggcatctataatagaattgggaggaatgaagtcccagacattgggtgccccgaagtatattggcactgacccagcctccaaggcatagaacaatttctcggtcacatagctttctgtcttagtattctcaattgcaagaacaaacttgtaatgtgacattgcgcagtgaagatgatcccaccagtgtggttttccattatcattggttgaacaaactggatacatggataatgccatgtcaggaccatcaacattattcaagcatttcccgaaagagtggtgcggaaccaatgacaggaaatcttttgcaaccttgtctctatgaggaagacaccttgaagatgaccagtaaataagtgcatcatttctcttttcagttgatacatggtaacttcggctagtgtggaatgattttccagcatatgttacttgcacatcatctttagcatggtaacctataaaaatgtcctcgaaaccagttggtttcctagcagcctccagatccagatatacacgaagaggcaggcctttcattctctgcggcggcggcgtggcgccctcgaagagcagcgcgtcgggccggtcgacggcggcggcggacttgctccacacgcagctcaccccgcaccggcacgtgtacaccccgtcgagcgcgtcggggatccacgtccaccccttgacgagcaccccgacgtggcgcgtcctcacgccctcgcacctcccgccgccgccgccgccccacccggccccgccggtgatcgacgcggccgccgccgcggtcgagttggcgccgtacccgggcgcccccacggcgtcgagcttggcgcggatgcgcgggcacccgacggcggcgtcccagtcggcgaaggccgagagaagcgacgtgaacggcgaccgctcgcgggtgccgacggcgtccagcgccgtggcgaagagcggcggcgccggcgcggcggagtaggaggagatggacgggagctcgaagtagccggagacgaggaggaggaggatgacggcggaggccagcatcggggccat

SEQ ID NO: 5999 - DNA, 288 bp, Oryza sativa
  Clone ID: PAT_MRT4530_12730C.1
cccacgcgtgcgaccacgcgtgcgctacgacggagccctagccctggccctcgacttccggtcccgcaaccccgacgcgcagacctagtcacacgccgacaagaccctagctggcggctgcacatgactattgtgaactactatgcgtccgcgtgatcctccaccgaggaggtaactcaccttccgcaatgggaggcagcagctatcaacaagcaaatcatgggcacgataggcttctgagcggactagtttatatagcttggccaacttagctgctcgccaacagtt

SEQ ID NO: 6000 - DNA, 1302 bp, Oryza sativa
  Clone ID: PAT_MRT4530_12731C.1
atggcgacggtggacgtgctgacgtcggaggtggtcgtccccgccggcgagacgccggcgggcgccgtctggctgtccaacctcgacctcgccgcgcgccgcggctacacgccgacggtgttcttctaccgccacaacggcgagccggggttcttcgcggccgacgccatgagggacagcctcgccagggcgctcgtggcgttctacccggtcgccggccgcctcgggctcgacggcgacggccgcgtccaggtcgactgcaccggcgagggcgtggtgttcgccacggcgaggtccgggcactacgcgctcgacgacctgatgggcgagttcgtgccgtgcgacgagatgcgcgacctgttcgtgcccgcggcgccggcggcggcgagctgctgcccgcgcggcggcgcgctgctgctggtgcaggtcacgtacctgcggtgcggcggcgtcgtgctcggcatggcgctgcaccactccatcgccgacgggcggagcgcggcgcacttcgtggagacgtgggcgagcatcgcgcgcggcgcgcccgccgcggacgcgcccgtgccgccatgcttcgaccacaggctgctcgccgcgcggccggcgcgcgcggtgctgtacgaccacccggagtacaagcccgagccggcgccgccggcgcgcgccgccacggcgtccacgtacgcgagcgccatcatcacgctgacgaagcagcaggtcggcgcgctgagggcggcgtgcgcgggggcgtcgacgttccgcgcggtggtggcgctggtgtggcagtgcgcgtgccgcgcgcgggcgctgccgccggaggcggagacgaggctccactccatgatcgacacgcggcagcgcctgtcgccgccgctgccgccggggtacttcggcaacgcggtgatccgcacgtcgacggcggcgacggccggggaggtggtgtcgagccccgtggggcacgcggcgcggcgggcgcgcgcggcgacgagccagggcgaggactacgcgcggtcggtggtggactacctggagggcgtggacgccatgaacctgccgaggagcggcgtctcgcgggcggacctccgcgccatcagctggctgggcatgtcgctcgccgacgccgacttcgggtggggctcgccggcgttcatgggtccggcgatcatgtactacagcgggttcgtgtacgtgatgaacgcgccggggaaggacggcgccgtcgcgctggcgctgtcgctggagccggagagcatgccggagttcaggaaggtgttcgccgacgaggtggcgcgattggcatga

SEQ ID NO: 6001 - DNA, 239 bp, Oryza sativa
  Clone ID: PAT_MRT4530_12733C.1
aatagtattaataacaaaaaagctgattataggttataggacatttatcagtaattacatacacttattactggaaattctcaccatatattacaatatgtacatacttatacaaccaacatccaggatacatactatgaactgtaaaagaaattattacgataataacatgatatactattcgtaaacaacgctattagtaacttctatatattaattacatatacagattgcactat

SEQ ID NO: 6002 - DNA, 160 bp, Oryza sativa
  Clone ID: PAT_MRT4530_12734C.1
gggaaagctgtagcccagaggtaccgggcgggaatcgccgggccgaccgatgggtcagcacacgatgaccgccacgacatgcggtcggtcagccgagcatgtcggccacgaactgctgcctcgccgccgcaccactggtgcttttaccgctgcctcgacg

SEQ ID NO: 6003 - DNA, 898 bp, Oryza sativa
  Clone ID: PAT_MRT4530_12735C.1
ttatttcttccgttggagcaccaggtggagctcgccgttgacgtcgacggggaagacggagtacaccagcaagtccgccgtcgcgaacaggtgggtcggcctcacccgcacggcggtgaacaccggccgatggtgatccggcgagaactcgagcacgccgtacgacgacccgcccggcttgatgaggtagtacagcttgccgccgcacggcgtgaagctgcagatcgtccgctgccctccgatgtcgtactcgtgcttcgcccacgacgccagcgaggcggcggcgacgccggcgtggcagcatgggcggagcactcttccagacggccccctctcgctctccctccatgacccatccctccctggctcggctccctcgcgccgctccccatttccaaaccctaggcggcggcgcggcgaggcggcaactggcggcgagaactggaccgcgcacagcacgttgctgcccctctcgaccatgaccaccgtgaacccgccggcgccggttggctcgccggttgatatcgcgcagcaggccttgatggccggcggcgcctgcccgaacgacggcagcgcgacgctcgtgacctcgccggcggcggcggcggcttgcgggttccacaggaaggtggcgagggttgccgggtcccaggtcagcacccagctgccatgcgaggtcgcccagctccgcttggtgcggagaagctcgtcgtcgacgtcgcaggggcggtgcacgccgttggcgacgttgtacagcgtcgtcgtgggtcgccctccatcggcgtcgtcgtacgagacgaggaacagagacggcgccgccggccgccggcttgtcgacggcgacatatatggtaggccgagatcactaaacacaattgtcaattgtggcggcggctga

SEQ ID NO: 6004 - DNA, 1249 bp, Oryza sativa
  unsure (1)..(1249): unsure at all n locations
  Clone ID: PAT_MRT4530_12736C.1
catacaccacgtcggtcaatgagctgtgggtccggccatagaaaatgtacacgaatactcccattaccagccataccccaactctcatccatgtccctccacccaagtttactaacaagtatgtgttcacgaggatgcacatcaccggcaacaacggaacgaaggggcagatgaatcctccagagtgaccaaatgagtgcctcccgtcatcttggtcgatatagcagaggacaccgagaccggctaggaggagtaggccaccaaaaacacagaagaagcatcgcaaaaggaatggcaagaatgtgaaagaagctgaagttgtgaggaccacaacccctacacatacagatgatatgctgcaaacagctgctttccgacgctttgactcctccacacttgtgtcttgcttcttctcgataagggtgtcatttattgattctaccacagatgacaactgttcatgattcgcatctacaggaggacccctaaccttttcctcatcatattcttggctcaaacggaatgacgcttccagagaagatggcaggggtacctcatctggaggagcatatctgaggatcaagatggacacagcaactatagtgaatgcaaggagtgtgcccacactgaccattcctgccagttgtgacacatccatcaagaaggccagaccccctgcccatatgccagtaacaattgtgctcttgccagggacgcgtggccggacgcgtgggtgacatcagagaagaaggatggcaaagcnccatcgcgtgccatggccatcaatattcttggctgtggcagaatcgatcccatcaaggttgagcaaagagcaagaacagcaccagttgtaacaaggtacatggcccagtgcatcccatgtcttgcaaaggctgatgatataggggtatctgggtccatagcgaaatatggtaccagaccaacgataacaactgaaaccaacatgtataaggaacagcaaactgacaatgctgttcctattcccagtggcagatctcgttggggatttttcacctgttgttaggatgaaagaattcccatttatcaatactggcactgatctagcaaacagatggatattaattggggaaatatgatcagtccatacctcctcggcagtgctagcaactgaatcaaagcctatgtaggcaaagaaaacagttgctgacccagcaagcattccgttcgccccataagggaaaaacccgccagccaccttatagccgac

SEQ ID NO: 6005 - DNA, 1483 bp, Oryza sativa
  Clone ID: PAT_MRT4530_12737C.1
ctcgccacatcttggcggcggcggcggcgacggcgctggtgttgctatgctgttttcatctgccggcgacggcgatgatggcggataccatcaggtacgggccaccgagggtgccccaccggctgggcaccgtcatcgccgtcgacctcggcaacaccaactcctgcgtcgccggctacggcgacgaggctgatgcgccgccgctgttccggctctgcatccccacctcggtcgccttcaccggcgacggcgacgccctcgtcggcgaggctgccaagaaccaccccgccgccatctccggcttcaagcgcctcctcgggacgaggtttggctcgccggaggtgcggcgagctgccgagcacctgccgtacaagatcgtcgactggtgcacgatggctcacatcgaggtgaacgccggcgccggcggcgcggcgaggagcgtgtacgcctccgacgtggcctccatggtgatcgccgagctgaaggctcgcgccgaggctcgcctcgccggcggcgggaagaaggtccacaacgccgtcgtcaccgtcccctactacttctccgacggcccacgtgaggcggccatgaacgccgccaggatggccggcctgacaaccgtccggatcatcgacgagcccaccgccgccgccgtctcccacggcctccaccacggccgcctgcgcgacggcggcaacgtcctcgtcctccacgtcggcggcggcacctccgccgctaccgtcctcacctacgacaacgccgtcttcgaggccgtcgcgtcgcgccacgacgcccacctcggcggcgatgacttcgacgccaggatcgccggccgcttctcccagctcatcaagcgcgaccacggcggcggcgtcgacgacatcgcccccgcgaagctgaagtcgcagtgcgagctcgccaagaggacgctgagcagccacgacgtcgcccaggtgaacctccacgccaccaacctcgccaatggcgccttctccttctccgggtcactgacgagggcgcagttcgaggagctcaaccacgacctgttcgagaaggtcatctccctcgtggacgcggcaatggcggaggccagacgcgcggtggcggggttcgacgtgatcgatgaggtggttctcgtcggtggaagcacaaagattccgaggattcgagagctcatcaagaactacttcgccgggaaggaggcgacgggcggtgcccgaccacgagcccgggtcgcccaaggtgtcctgcatcgggaaggtcctctccgaccgcgagcgcgcgcgccgccaccgccggtggtcgctcgagacgaggccccgcggcgagccggtggtcgccgtcagatagggtcgccaatggatcgctgttaccatgaattttagctgaatttgaaatttagactctcttgtgtacaactactgttgtattaatcgttgatataagagatgtagtgacataatagatgcaaaaaaaaaaaaaaaaa

SEQ ID NO: 6006 - DNA, 159 bp, Oryza sativa
  Clone ID: PAT_MRT4530_12738C.1
atggcggccggcgacgagatggaaaggtcgggctcggagagagaaaagccgatccgattcgacttcgaatcaaacactttccaagccaatttagccgatatttccaaaggggaaaaggaattgagctctgaaaaatccgagaaaatttcagagagttga

SEQ ID NO: 6007 - DNA, 1307 bp, Oryza sativa
  Clone ID: PAT_MRT4530_12739C.1
atggtgcgcatggggagtgggaggagcagcggcggtagcagcccttgtcggcagcgcccgagctggagaaggagacggggagcaggaggagcagtggcgacagcgtccctcgtcggtgggatcggcagcgctggagctggaggaggagccggggttcaggaggagcagcggcggcggcggcggccctcgtcggcggggttggcggcgccggagctggaggaggagatggggatcaggaggagaagccgcggcggtggccctcgtcagcagggcccgtcatggatgaccttctttggtaacgggcctttattgcggcccgtcacggatgaccttaacgggcttcaaccgcatcccgtcacggttgatggacatggggctgcagcagctagggcgccgacggtggcgcgcgtggccggaggatggtgcggccagcgacggcggctcccggggcggcgcgagcttcccccaggcggcgcgcaggctagaggcggcgcgagctcaagacgtggttctccggagtccggaccactccacgtgggggcggcgggttcagcgtcgtcggcggaggcgttagctagcagcggcggggaacgggttgtcgttgtcaccgaggaggcttttttttttttttttttcttcagagttctgagttctgagttcactcagcacgtcctcttccggcagattacatgcgaagcaatgtagaatacaaagcagaacacaggcaaaaaaaaaaaaaaaatcaaaaaacgccggacagagcacacatgctgctgcacagttacaagcattggagggaggggccgctactacttgacgatgaaaactggacagctggcgttcctgacgcagtaatcactcactctcccaagcagagcccttttgaacaggccatagccatggctccccatcacgagcacgtcggcgccgagcttgtccaccccgccgacctcctcctatcctccccacagccggttgccgcagacaccgcgcgggagtccgccgttgccgacgcgcgcgggaagatctaccgccgccgccggctgtcgccgatgcaagcggccagtactccgccgccgccggccgtagccgatgccgccgcggggagacgatgggggaggggcgccggggcaaggccactcgaaggcggcgcactcccccttgggcgagtgcgcgcaccggcgagggggcatgcgccggcgccgctggaaagagagggtgccgtcgttgccgccgtcgctgggacgtcggtcctgtcgccggctcccttcctgctggatccggcggaggggaggccgtgccgccat

SEQ ID NO: 6008 - DNA, 422 bp, Oryza sativa
  Clone ID: PAT_MRT4530_1273C.1
ggcccgtcccccgctgtgtttcaagccggcgacgacgtcctcccacaggacgaccggcctgacgaacacaggtgttttacaaccaactcctctttctccccattgattacacgccactcactactgcaatggaacacagtctctagatacttgtactggaggtaacgacctcacccgaacatggtcgtctgagaagaagacaggaaacgatcgctcctcaggcttctgctcaaggctcgctcgtgcccatgccctcggaatgtcattccaccagatgctcatcaaccgcgcgcttgaagggaagccctatctgcagaataaaaatgtcaacctttctggcttcaacttcaacacgtggcatcaagcggagtacgttggcatagcatgtgagcctctctgcctcgttggcctggacattgtgt

SEQ ID NO: 6009 - DNA, 216 bp, Oryza sativa
  Clone ID: PAT_MRT4530_12740C.1
atggactttttcctaactatgaggattgcccaagcactcaagaccacggttggtggcacagtggagcttggcggcggcggcggcgaggtcgacggccgcagccatggatctagcgttgtctctgatctcgccgagcacagattcgaggaggaagactaccctgttgtcgactacatgatgatacttcaatctgctatgtcgataacagatagatag

SEQ ID NO: 6010 - DNA, 2824 bp, Oryza sativa
  Clone ID: PAT_MRT4530_12741C.1
atggcgagtaaaaaggcgagtcctatcctctatctctctctctctttctgtgggccccacgctataggtgaaagcgagagaaactattcagctaaccaaattttcctcttaagtaatgcgctctcgccgtgcggctctctctcgtgagcaacagcacgcgccgcggtcggcctccccttcaattccttcggctttggcccgggcgggtgtgtgagtgctcagctcctatcgccgattcgtcgtcctcctcctcctcatcctgctcgatctggtaattctagtgttgagggtctgaggagctgaaactagcacgggtaccctggcagcatgcggtggctggctctctcggtagacatcttccgcaaagggatctccttgaacctgtactgccgggttattctgtaaattgcctccattattgctctactccaatcctgatcttctagtctctgaagtttgggattgaagatctggttgctggcattgctgtttgggtttctgtggttgcctggcaattctttcaaggagaacgggcaggagtactaatggtgtggcaaccggtggctcagacgagattccgcgtgtttaaacatgagaatggaatcgctgtgagagttatagcttgcttccagccatcccaagattgccaggccgagtacttccgccatcttcttaagcccgtgacgtagttcgactccctcccttccatttgctgttgaatagaacctgtgctgctctaagtttttctgaagcaaaagtaaagcaggagaatttcctgttcatctcaattttctggtcagatcctgtttgctggttgtttcttgatgggggagaaggttaatccctggtgccattggtctaatcccccatggaccgagagctctgcaaacaatctccacccacccgatgttagcctcgacaacacaaattcagtggcgttgccaacatatctgaacagcgatggctacatttattctggagttgctgcatctatgccgtctattgcagcatcagttactgacagacctgtttcattctcttctagatttgtcacaacattggtacccagtgtaggcttatcaacagctgagacactgagaaagagacctctggttttctttcataatgtgaataataccttcactgtaggtcctctcctgagcaaggggacattggatacagttccagagctccaaggtagcaatgagaccaatgtaactgatgttggagcacaaaatactgagtgtatgcatgagaatactgaggagattgatgcactcctgtgttccgactcagatgaagggtgcttgaaagtgcaagaactcaacaacagagtcaggaaatacccaatgcagaatgacaccatgagtgtggagtcggtagcaagcgctggtgcttcccaaccagcaaagaaaagaagactaagctctggtaccgacagatctgtggttgacacagccagctcagcaaggcctgaccactccgttgatcagaaacatctcagccatgacgacgacgcacagtcgtgttgtattggtgaagtggaaagcgatcaccagtttgctctgagggaaggtgaagaagcagaaggtgatgatggccccgatgatcggaagcggagaagagagaggatccaagagactgttgctgcactcagaaagatagttcctggaggcattgccaaagatgccacagccgttcttgatgaagcgatatgctatctcaagtatctaaagctcaaggtcaagacactgggagctgtttccctctagctcctcgatcgatgacggttctgttctggttcctgaacccaatacctatctctctctccatatatacaagtaatgagctaaaactatagcagcaataaggtgaaatgaaactcagccagttccattcggtgattctgaggactactggagtgaaagctcaatggtgctttgcttgcaagggtccaatgatttgagtggttacaatgaagattcagtattgcagtatattactagtgaattgatggtggcagccatgtattccatcttcaagtgtggatcaccgaccactgcaccttcatccatccatccactgatggagagtactacctagcagcaagccggtgtcacatctttcttctgggtcagttcagtgcagtgcctcttggtaggcacctcctccctctcataaaaaaggctctcatggcgttgatggcgcaataagtaaaacagggaggctaagctataaagatcttttttctcccctccattgtggtgtgatccaaagcaaaggaaggaaggaggaatgaatgaatgaagtccatgcaaagtcgatggctttttgacccccaaaggttgagagatgagatggcggggccgcgcccgaggttagttcgggctccttgtgtgtgtttgtgtgtagctagcagagtgtgcgtgatggcgtcgtccctcgcgctttttctgcctttctactagtactatacatatatgctactgtatactgtactcctatgtatgaatactgcatgtgtttgtgtttgtgtttgatcccccgctaaaaaaaaaaaaacaaaaaactagtaaaataaaaaaaaaaaaactcgagggggggcccgggccccattcgccctatagggaggcgatacgcccgctcatggccggcgtaacaccgcgggacttggaaacccggccgtaccccactaatcccctgcagacttcccttttcgcggcggggtaatacagagagcccgcccaatcgcccttccacatgggccacctgatggcaatggacccccctgaccgcccataagcgggggggggggggacccaca

SEQ ID NO: 6011 - DNA, 510 bp, Oryza sativa
  Clone ID: PAT_MRT4530_12742C.1
atccatccatccactgatggagagtactacctagcagcaagccggtgtcacatctttcttctgggtcagttcagtgcagtgcctcttggtaggcacctcctccctctcataaaaaaaggctctcatggcgttgatggcgcaataagtaaaacagggaggctaagctataaagatcttttttctcccctccattgtggtgtgatccaaagcaaaggaaggaaggaggaatgaatgaatgaagtccatgcaaagtgcagtgctggtggcctggtgctgcatgcgtcgatggctttttgacccccaaaggttgagagatgagatggcggggccgcgcccgaggttagttcgggctccttgtgtgtgtttgtatggtggcgtgtgtagctagcagagtgtgcgtgatggcgtcgtccctcgcgctttttctgcctttctactagtactatacatatatgctactgtatactgtactcctatgtatgaatactgcatgtgtttgtgtttgtgttt

SEQ ID NO: 6012 - DNA, 1063 bp, Oryza sativa
  Clone ID: PAT_MRT4530_12743C.1
tttttttttttttttttttttcagaacagtcgaaggaattttatatcattaatcaattcagtccccataggaatcgaaaaaaaattcaaacgggatacaatatactacagtacttgtcagatccatacacccctctctagtcctgatctaccgactcaaggccattgcgcttcagtgaccgtgcttaattatacgccgcgataactagggtaactgctaatcacgaaatcttcatacttccatggtaatcaactcaaggtcaggctcggcgaaatcaactcaaggccgttaatgcgacgagaaccatcttccaactcgaccggccttgcagcatcggctaccgggtgaccacatggcgatcaatcgatcgagctctcaattctcaaatcgcagacgtgacgtcgtggcgatgatcatcagcgcgagtgcatgtgtccaaggcttcccagcgcgagccaatcctcgcgcctctccacggccgccttcgctttcttcgccggcggctgctcctcctccgccgccgcagcacggacgacgtacgacgaccgcgcggaggcgggggtggccttgcgcttcgccaggaaccgcttcagcgacgccttcctcgcgatcggcatgtccaccagcgcgggcggcgcctctggcgcgccgccgccgccctgcgccgccgacgcgaaccgcatcagctcggccgccatggccggcgtgcagcggtcgatcaccaccaccttcccggcgtagaagatcgtgaactgctgccccccgccgtccacctcgcatccgggttcctggaccacaggcgccgcggcggcggcggcggcggcggccatgaggccactcacaccttgagccaccggcgccgccgtcgacggctgcgaggagttggccttgacgtactggctgagcacgccgcacgcgacggcgaagcggcgggtcatgggatccgtcgacgccattgccgtcttctagcacggacaactaagcacaagcacaaagagagacgagaagtctaactttattgcgaacgatctgtactgtccgccgcccgaattcctgcagcccg

SEQ ID NO: 6013 - DNA, 381 bp, Oryza sativa
  Clone ID: PAT_MRT4530_12744C.1
gcttcatacattaccttgcatgtttgcaaaaggacatttcaaaattttatcttccaaaatgccatcgtcttgcccgaggggtagatttagcattataagagctatgcaacgggcacattgcacattgccaccaattcttgtcatgatttacaagagaataagcgaacgctaccctattgttggtattatagccccccgtttaaacttgccatgtcgacactctcacgcaacaaaaaagagcatagttttactttctgtcgactcaagaagcccggatcaactgtacactagcaactgaatgtgctgataggaatagaagattcatatcttgactgacacttcagctggcacattgaggccaaaaagggcagacccaccatg

SEQ ID NO: 6014 - DNA, 225 bp, Oryza sativa
  Clone ID: PAT_MRT4530_12745C.1
atggcgcttgcgccgatggagcgtacgctccgtgacgccgggggcgccggccgggccggacggttcccattcatgagatctgttgctggtggtggctccatcggagtgaggtggcatcgcatcgatcgatacatcgtcccccagatcatcgcaagagccctcccatttccacaaaggataattaatcttgatgatgatccagcgactgctactgtatttgcgtaa

SEQ ID NO: 6015 - DNA, 2564 bp, Oryza sativa
  Clone ID: PAT_MRT4530_12746C.1
atgaacgggggcggtcgccggcgatactcctcggagcagctcatgttcgacgtccccgccaatgccgggggcggcgccggcaagtggggccagcgcggtggggtgcggcgcggggatggggagatcttcgtgtcggtggagccgacgacgccggcgcggctgcggggaggggaggcggcggctgcggcggcgggggagtcgccggggcagaggcagcagctcagccccgggctgctcgatctccacgccttcgacaccgagcttatcagcgattttcaagtgccagggattggcatgtatgatggtgcccaaaaatttggctatggcaatggaggctttgatgattcagacccaaccttcgctccaaataaacagatgagcaaatccactgtttttgctgaaagtaatttcctcaaggccttccctgagaaagagaaggcagctcctgttgcgaaaatcaaagtggtggtccgcaaaagaccacttaataagaaggagatatcaaagaaagaagaagatatcatagacattgaacaacagtcgaactccttgactgttcatgagaccaaactcaaggttgacctcactgaatatgttgagaaacatgaatttgtgtttgatgctgtcctagatgaagacgtttcgaatgatgaggtttatcgagaaacagtggaacctgttgttcctgctatttttaatcgtacgaaagctacctgttttgcttatggacaaactggtagtggaaagacctacaccatgcgtccactgcctctcaaggcctcccaagacattctgagattgatgcatcatacatatcgcaatcaaggctatcagttattcgtgagcttctttgaaatatatggtgggaaattatttgatcttctcaatgaaaggagtaaactttgcatgagggaggatgggaaacagaaagtttgcattgttggtttacaagagtatcgggtgtctgatgttgaaaccataaaggagttgattgagaaaggcaatgccaccagaagtaccggtactactggtgcaaatgaagagtcatcaagatcccatgccattcttcagcttgctattaaaaagcgtgttgatggcaatgactcaaaaccacccagattggctggcaagttgtcgtttattgaccttgctggcagtgagcgtggtgctgatacaacggacaacgacaaacaaacaagaattgaaggagctgagatcaataaaagtttgcttgctttaaaggaatgcatcagagcactagataatgaccagacccacattccatttcgaggaagcaaattaactgaagttttgcgggattccttcattggggactcacgcactgtcatgatatcatgcatttctcccagctctggttcttgtgaacatactctgaacacattgagatatgctgatagggtgaagagtctgtcgaaaggaagcaacaccaagaaagatttgtctttggctgctgcacctttaagggagtcaagtccttccctattggcttcagctgtgccctctttctcatcagccgaggtgatgaatgatatcactgaaaggagcaactttggttggaccaagcaacagtatgtcaaagagcaccaagcaccaacatttgtggatagaatgcaaaaggtgaaagaagataccgaatttagtctgtcaaatggtggttatttcaaggaacaaagaacaaagggtagtgtgccagtgggcatagctgaagtacctgatacagtgtaccagcagggaaggcaaccaactaggaaggctcgtgatttaacttcagacaataatatgagaaattccattgcttatccaattattagaagggttgtaccagatgaagatgagcatctgaacgaactcctccaggaagaggaagatttggtgtctgctcatcggaagcaggtggaagagaccctagacatgatcaaagaggagatgaatttattagttgaagcggatcaacctggcaaccaactagacgactacatcacaagactaagcggtatactctctcagaaagctgccggaattgtcgacttacaggcacgtcttgcgcagttccagaggcgcttaaacgagaataatgtgctgctatatgcccaatgcccttgatcataggaagtacctatttgtgatgagaataacgtgcagtatatctgtataccagagcccttgatcagaggagttgcctatttgtcttcactacgaggctaatcagaaaagttggctgtgccactgtttgctggtatgctccgtagagatgcggccttgcctggccaatacagctgcagttcagaacccatagacgcaagacaaacgcagaactagatggctagtttactgcactttgggatcggccgacttcgtaagctatttgtacccgagttgcgccagttgtgtccttctgttacatccttgtgtatatcgtgcaaatcgtgtcgtcacaggattgtcctgttatttgttgctcaacaaatacacttttttttgtctgatgtatgatgaattcagagttttgtgataatccattttgcacccaaaaaaaaaaaaaa

SEQ ID NO: 6016 - DNA, 428 bp, Oryza sativa
  Clone ID: PAT_MRT4530_12747C.1
gtgtcggagatgctggaggcggggcatgcgctgttcaagaacctcgccgccgacttcgaggaccgcctctgctcgatccacaaggagaggagagggtggagaggtgggaggacgagatccgggagctgcgcgcccatgacgccgccaatgagcaggcacgctccctccgccgccaccgctctcgtctgccgacgtcgcaccgttccagcccgtcgacgccgcaccgctctcgcccgccgacgccgcctctccgcaaccgtgctcgcccgccaccgtcgccgcttcgcctgctctggccaccattctggtgcggcgacggctccttccccagcggcgacggtgcccggttgaagaggtgccccttgggccgccctgcgccgtcgcctccggccggcttgcctagtcgccagaagataacagtagagtga

SEQ ID NO: 6017 - DNA, 440 bp, Oryza sativa
  Clone ID: PAT_MRT4530_12748C.1
aaaaaaggaagacaagggtatatatgcaaaatgttgcggtggttgtggttgttacaaattattacacctcggtaaaaatttgtttggctatgtgtactactgctcgatctactgtggcatgttgcaagggcgcggtgaaaaaaaaaatcgaaggtgaaaaattaaagatgtgctcatcaagtgaagtggcagtgaaaaagcaagagagctggtgctggtgtatgccggaatttttcccatttctctttttttttctcttttctctccttcttttatatgttttgttttgttttttctaattacctaaactgtccattatgtattacctgagtttttttttcttcctttcccaaactgttgttaccgaagttttacagtgtatactcgcgacatattatatgttacattcttgctattcttataccaaaaaaaaaaaaaaa

SEQ ID NO: 6018 - DNA, 1323 bp, Oryza sativa
  Clone ID: PAT_MRT4530_12749C.1
atgggaggtggccgtggtggagctccggcgacggcgagcgcgcgtgcgcggcggcctcatcagcctcgcgtgctgctgctgtgcagcccgtgcttgggccacctcatcccgttcgccgagctcgcgcgccgcctcgtcgccgaccacggcctcgccgccacgctgctcttcgcctccgcgaggtctcccccctcggagcagtacctcgccgtggcggcgtccgtcctggccgagggcgtcgacctcgtcgcgctgccagcgccggcgcccgcggacgcgctcccgggtgacgcctcggtgcgcgagcgcgccgcgcatgcggtcgcccgcagcgtcccgcgcgtccgcgacgtcgcccggtcgctcgccgcgacggcgcccctcgccgcgctcgtggtggacatgatcggcgccccggcgcgcgccgtcgccgaggagctcggggtgccgttctacatgttcttcacctcgccgtggatgctgctgtcgctcttcctgcacctcccgtcgctcgacgccgacgcggcgcgcgccggcggcgagcaccgcgacgcgacggagccgatccgcctgcccggctgcgtgccgatccacgcgcacgatctgcccagctcgatgctcgccgaccggagcagcgcaacgtacgccgggctcctggccatggccagggacgccgcgagggccgatggcgtcctcgtgaacacgttccgcgagctcgagccggccatcggcgacggcgcggacggcgtcaagctgccgccgacagctgagctggcgctcggattggagcttagtcagcacaggttcatttgggctatcaagaggcccgaccaagatacatcgagtggagcattctttggaacagctaatagtagaggtgaagaagaaggaatggattttttgcccgagggattcattgagaggactagaggggtggggcttctggtgccgtcgtgggccccgcagacatcgatactcgggcatgcatcaattgggtgtttcttgacgcactgcggatggaactctacgctagagagtgtttccaatggagtcccgatgatcgcatggccactctatgcggagcaaaagatgaatgcagcaatgatggaggttcaagcaaaggtagccatccggattaatgtcggaaatgaaaggtttataatgaatgaagagattgcaaatacgataaaacgagtgatgaaaggggaggaggcagaaatgttgaagatgcggattggtgaactcaatgataaagcagtatgcgacggcagcgataggggaatgggtgtgacggtgaggacaaccgatggatgcgttgtgtga

SEQ ID NO: 6019 - DNA, 623 bp, Oryza sativa
  Clone ID: PAT_MRT4530_1274C.1
atgtggccagctgatcttatcccctcccccatcagtgaagctaatagatggttcgttggacatgatttgttccttgacatgatcaatgtgttgcccaagctccagatgacacggtataatgcttctgctctgggcaggttgtattccaaagtaggtctttgtgctgcccagttgtatgtttcagcgtcatatcgctcttatctggtgatttctggcccatcttgtcaaggatatgaactcttatcaatgccagcattgagtgcagctgtttgggtttacaggacaaagaagatagaggggaggggcaaaagagaaaagcccgtggaaaatgggctggcgcctcattgactgacgcctcccacgtgttccggcccccaagcccgatgcggccagctgatcgttgcccctcccccgtctgccctgtctgttttctcgtttcttcgggacctacggctcatgcttgctcttgtcctatgggcggtccatgttacgcggctgagtccctcccagtccccttgcaggtttctgtgggccaactggttcatggttcctcgggcccgattggtgcccggtcatgtgctgggtggtccccatgctccagatgacacgactgcaaggaccat

SEQ ID NO: 6020 - DNA, 121 bp, Oryza sativa
  Clone ID: PAT_MRT4530_12750C.1
gtcttctcttagtagcctgtgaccttgcctctttatggttcgatcatgcgcgccaccggaaggcaccagccggtcacattggcgtgagaactcccagggcgcgattgcgatcgatgacttc

SEQ ID NO: 6021 - DNA, 1191 bp, Oryza sativa
  Clone ID: PAT_MRT4530_12751C.1
tcagttcttggtcggcgagagctcgaggatccggccggagagcgccgtgacgagcgccgccttgaacccggggtccctcgtcagcgtcgccgccatctgctcggccaggttcttcctcgccgccacctccgtcgacggcccggccgccgccgcctgctcttgctgctgccggacgacggcggcggcggcgctcggtggcggctggtgctgtgagtgcttggcggcggcggcggtcttgctgccggcgtcgtggtgcggcggctgggcgtggttgtgctcgccctcgtacgtggcgacgaggacggtgttgtcgtcggcgctgcgctgcaccttcttcttcaccgggcacgccggcgcgaacgagcacctgaagtaggctcgcgggcacgggttgtccttcgtcaccttctgcccgtacttccgccattgatacccatccttcaccacgaggctgaggtcggaggggtcggcgtggacgaagcgcttggagaccttgggcttgcagtcctcgcggacgacgcgcttcgcggcggcggcggcggccgccgacgtgcactccatctggtcgggggaggcgtaggccgcggctgcggcggcggcgacgaacggaggggatggcttgcggtggtgggcggcgtcgtcgaggctgtcgacgctacggatccgcttcctcgatggcgacaccgagccgccctccgacgtcgacgactggtggttcccggcgttgaccgccgccgccgccgccgccgacatcatgtcgttgacctgtccctgcagctcggtgtacttggccaccaccgcccgaagcatctcggtcagcttcttgttctcctcgctcgctcgccggagctccgcctccagcgcctcaacctcgtgatccttcttgaaggacaagaagttctcctccacgagaaccttaatcggcgccgccggagccgatgatctcctcgccgtcgacggcaggccgacgttgaggtccaagctcagggaagtctgctcaatccacgaatccatgaattgaatatactgaaaatcaagaacaggaggaggaggagaagaaggcgaagaaggcgagagccgaaatgcgcatgagctagtgaaggtgccatggcgacgacgaggaggaatatatagccaagaaggtgggcgagaggggactgactggctcggaggaggaagcatcttagccat

SEQ ID NO: 6022 - DNA, 645 bp, Oryza sativa
  Clone ID: PAT_MRT4530_12752C.1
gacgtgcactccatctggtcgggggaggcgtaggccgcggctgcggcggcggcgacgaacggaggggatggcttgcggtggtgggcggcgtcgtcgaggctgtcgacgctacggatccgcttcctcgatggcgacaccgagccgccctccgacgtcgacgactggtggttcccggcgttgaccgccgccgccgccgccgccgacatcatgtcgttgacctgtccctgcagctcggtgtacttggccaccaccgcccgaagcatctcggtcagcttcttgttctcctcgctcgctcgccggagctccgcctccagcgcctcaacctggatcgatggacacaagatcgaacaactaattaatcaaactttttttcaatattcccaatcaaattctcatcgatgtcgtcgcagctgtcaatctctccacgcacctcgtgatccttcttgaaggacaagaagttctcctccacgagaaccttaatcggcgccgccggagccgatgatctcctcgccgtcgacggcaggccgacgttgaggtccaagctcagggaagtctgctcaatccacgaatccatgaattgaatatactgaaaatcaagaacaggaggaggaggagaagaaggcgaagaaggctcggacgcgtgga

SEQ ID NO: 6023 - DNA, 159 bp, Oryza sativa
  Clone ID: PAT_MRT4530_12753C.1
atgcatgcagccttggtttatggcgcccttgtagaacgtgaactcccgcgcgcatgccggccgcaggcggcacacgtcgatatcgatgtcggccgcggcgtgcgcaccgcctacaccgctgccgcacgcccggaggagatataccggtggagacgcgcg

SEQ ID NO: 6024 - DNA, 450 bp, Oryza sativa
  Clone ID: PAT_MRT4530_12754C.1
ccggccgggacggccgccaccccgcttaggtattaggtcttctccgcctccgatttctccctccgccgacgaaatgatcggcctacatggttccatcagtaccattgggcgctgtttcgccttgactccgctactctctctggcgatgagcaactacctggatctaccactatggaagtactgtcccaccaacataagtccatcgccaaccacgaaatctctgatacgctcctagatgaaggtgaacaatgtgaataagaacaatgcacagattgtcgcacatcaacgagattgtttagcgtagccctacaatgatcaataactactgcaatctgtgtgcgctaccagagcataacaggttaccacaccatgtacaaggaataccgctgacactactctgaatggtgctctggaacagatgcacaccgacatgtcctctcatccccatgt

SEQ ID NO: 6025 - DNA, 354 bp, Oryza sativa
  Clone ID: PAT_MRT4530_12755C.1
atgccgggtgccgctacttgctcgccaccgtccaccgcgtcaccagctgctactcctctcttgtcgccattcatcacgctgtcggctgcagcgtctctcttgccgccgctgtttgggcaccgcagtccgccatctgcctggccatggccactccggactgctctacagattgcaggcggcgccctcggcgatgagaccaagcaggcggaagcgtcacctatgccctcagcgtcggcggcgacgactgaatggtcttctgggttgaagatggagaacggactggcactacgaatgattggtgccgtcggatgcgctacgcacggtgatcccgccttgaacgtccctctgacgtag

SEQ ID NO: 6026 - DNA, 288 bp, Oryza sativa
  Clone ID: PAT_MRT4530_12756C.1
atggagctcgagttctacgtggtggagttggactgttggagctcgagctcaagcaacagaggaggtagagctcgagcattgaggcaaaaaaaagagttggagctcgagttgggaacaatggaggatgcaaagcttgatatcggggaggatgaagatcgaaacctgcaagaccagttaattcagtggttcacagtggttcttggaggagagagcagcaagagagagaagctagagaagaagagcgggttgaaagtgaaatatgttgcaaagatatctggcacaaattga

SEQ ID NO: 6027 - DNA, 1714 bp, Oryza sativa
  Clone ID: PAT_MRT4530_12757C.1
atgaccaacgtggaggggtcaaaggcagatgaagatggtgatgaggttggcgaggaaggccatgcagggtccttatgtagcattgttgccgatgtcaaggagccagaagctgatgaggtagacaatgatggcatcgaggcgggtagagcacagggtgatggagtcgccgaagattcgaacgaggtcagtggagaatctgacgatgagaacaatggcggcgataatgaaggggtgctgacgaccgaggctggcgaatgtgtacgggatgccaaggtcctagacatagggggtcgcgaaaaccctaaccccgtcgtctccacggccaccttatataaaaatccgccgccgccgccatcctccctcctcccctccactcccccacccccagagaaccctaatccacaccctctcaagccagccatggcggagcgcggcggcgagcgtggcggcgagcgcggcgggttcggccgcggcttcgggcgcggcggtcgcggcgaccgcggagggcgccgtggcgggcgccgcggcccgcgccaggaggaggagaagtgggtgcccgtcaccaagctcggccgcctcgtgaaggaaggcaggttctccaagatcgaggagatctacctccactccctccccgtcaaggagcaccagatcgtggagaccctcgtgccggggctcaaggacgaggtgatgaagatcacacccgtgcagaagcagacgcgcgccgggcagcgcacccggttcaaggcgttcgtcgtcgtcggcgacaacaacggccacgtcgggctgggggtcaagtgcgccaaggaggtggccaccgccatccgcggcgccatcatcctggccaagctgtccgtggtgcccgtcaggaggggttactggggtaacaagatcgggcagccgcacaccgtgccgtgcaaggtcaccggaaagtgtggctctgtcaccgtgcgcatggtgcccgccccgaggggttcgggtattgtcgccgcccgcgtgcccaagaaggtgctgcagttcgccggcattgaggatgtcttcacctcgtcccgtggatccaccaagacccttggcaacttcgtcaaggccacctttgactgcctgatgaagacttatggattccttactcctgacttctggagggacaccaagttcgtcaagtctccattccaggagtacaccgacctcttggccaagccgactaaggctcttatgattgatgcacctgtcgagaacgtagaggcttaggatggcggagtaaagagagtctttgctagctcggacttgtctgatgcactttgttttacaatagttaagaaccggttgtcatccttggattgtgctgcgtctggatgtttctatttcctgtcaagttttggatcatggtactgtgatactgcttttatcaatgaatgctgcataattattatgttatcaaaaaaaaaaaaaaaaaaaaaaaaaaaaaaaaaaaaaaaaaaaactctgggtctcccgtacgcgtatttgaacgctgagaaagaaattttgcattatggcagcaagaactgctgtcttatcctcaacctcaacttatgtcttaaaaaatccaaattttgaattagcgaaccttaatttatgtgctctggaatgtttaggtttctcttccccgtgtttacaattctcatatccatatgaacgcgtacagcattggtgcattttgcgagttttactctctgtt

SEQ ID NO: 6028 - DNA, 381 bp, Oryza sativa
  Clone ID: PAT_MRT4530_12758C.1
tcacatgtctactaggtctttaccattgtgaaggactggaggtgggtagtctaccctataattcaccaactcactcttacacctgatctcttcactcgtgcgcggtcgacgttctcgcacgcctgcgaggtcttctactggtgaggaagcgtccgtagaccgctcgctaccgagaggatccggctgctctgtcgccgagcatgcgtccccgggtccctctgccgccagagccagggccacatcccgttctagcggttggcgatccttgcctctttgccatggcatgagagagctctgcagcgatggccacggcatgagaggggccctaccgtttagctgctgccctcttcgctgggccgtccacagcttctcttcgcccat

SEQ ID NO: 6029 - DNA, 339 bp, Oryza sativa
  Clone ID: PAT_MRT4530_12759C.1
atgagccctttcttccttgacgtcggttggccagaaaccacgttcttctgggtgtttgcgcgcgcgcgcgcgacgtggtttggtgccacactgccaatctgccggcatgttgaggtgggcaggaagtgcgcggcgcaggcgcagcgaaggcgtgcctttctgtcggcaatgattcgtcggaacgtatcatcatggaccgacgtgcttgctaattaccccgatgatgcgttccagtgccatggctttcgactctcaaagcctgaactgcaagtggtgacctcagatgacaaggagaacacctcaacggtgacctcagatgacaaggagaacataagctag

SEQ ID NO: 6030 - DNA, 1272 bp, Oryza sativa
  Clone ID: PAT_MRT4530_1275C.1
atgttcacttgccgcgcagaaaaacgtagtagcaaaagatcaatgcagattgccgctggccaggacaacacaggctaccaacgaaaagcagctagcgatgcaggaagtgctggtggcgtaaaagcgttagcgcttttggcggtcacctcctgcaaccacgccccaagcatcttcgccggccagccggccggtctgcctgcacttccggtgactcgtgtacgagcacccaaagtgcggtgtgcgctgtactggaaaaacaggacacgggcttatggccgcgtgtgccccgtcaccatcagtcaatcgcggtttgttggtggctctagtgatccatattattgtgcagccaacaacaccatccacgtatcgtccgggtacttgaccggggccgatgaacgcatgcatgctgtgcatggccgttggactagaaaaggcagcgaacgacatcgcgaacgcggattggagtcaaccgagttgactgcagtcaactccccacgtcagctgaaatcgggcaaaatactgcactgggaccttaagtactctggtattgcgagtctagaaaagcgttatatttgtattgcggttgaaggactaataggagccctgtccatgaatccaagactgttccagtttggtattgctcgcttcctcacgcaggcccatgtagctcatccgcacaggcctagcgcgggccaaacgcaagcttccgacagaccgcaggacgcggccgagggtgcgcggcccgagaggcagaccaaaatccgccgttgctcgtgctactgtgctaccgtcgcgtgcaacgcatacgagtgggacctttcacctctcaatcgttcacgtgaaatccgcgaaaaacgccttccgggatcaagatcagctcgactcctcggagtgtcaacggcctcacctggcgttgagtgcgaaagacaagaccgtttggtgcagcagatccattcgttaagcaggggggaatcagatcttttacgaagagaaataggagaaaattttgcaatggggagcgcaaaaacgcgagcggaacactgtactactactactactggtggcacgtcgcgggctcgcggcgcagtgcagcgcagggtggccacggagcgggcggggcggcaacaagaggcgtatgcgtcgtcgctttcggcccgggtccctgagcgcgcgcagcgcatgaggcctcgacggcaaccggaatctgaacagtacgaaaacaaggaaaaggaagttgtaaagggggggaaaaggaaacggaaaaaactccaa

SEQ ID NO: 6031 - DNA, 324 bp, Oryza sativa
  unsure (1)..(324): unsure at all n locations
  Clone ID: PAT_MRT4530_12760C.1
gactgtgattataccccatagagagattgtnctcttttctgtgagagaaagagaccgcgaaaatattggagatttgagagtgatatanccccgctggagagggggtttctctcttctggacccnaatatatatagaacgcgagagagcacccccccaatatccgcgaaattctctgaaaatatctctatagataatatcagacgcgcgctcttatatcccactctttggggaaataaatatatatatatataatatataatataaataataataaaaaataaaataatataataataaaaaaaaaaaaaaataaaaataaaaaa

SEQ ID NO: 6032 - DNA, 503 bp, Oryza sativa
  Clone ID: PAT_MRT4530_12761C.1
aaaataatagaaagacccatcggggacttgccagttcttgggaaggtctctggtgtcttgggcttaaagaagcaaaattcctagctgtttctaccgccaaagccgagtatattgccgcaggccattgttgcgcgcaattactttggatgaggcaaacccttagggactatggttacaaattaaccaagttcctcttctatgtgataatgagagtgcaatccgcatggcagataatcccattgagcatagccgcgctaaacacatagccattcgttatcattttgtaagggatcaccaacacaagggggatatcgagattgcatatattaacaccaaagaacaattagccgatatcttcaccaagccactagatgaacaaacatttaacaaacttaggcatgagctaaatattcttggttctgcaaattgcttttgatgttgtggacacataggtgatgaatgtgccttggatggtatctctttaatgagctgtgactaggtgg

SEQ ID NO: 6033 - DNA, 180 bp, Oryza sativa
  Clone ID: PAT_MRT4530_12762C.1
atgaccagcctgaagaattccactggcaagcggttgaagaggttgtggatgctggaagggaacagatggaggggaagctgggactgggaggagaagaggacgctgctcgtcaggaagtcagagaaggcgggtggggtcgtcaagcgcgagatggcgatacctgataagaatggactgtag

SEQ ID NO: 6034 - DNA, 1428 bp, Oryza sativa
  Clone ID: PAT_MRT4530_12763C.1
atggggtccttcccggcggcggaggagacgacggcgacggcggcggcgcggccgcacgccgtgatggtcccgtacccggcgcagggccacgtcacgccgatgctgaagctggccgtgctgctccacgcgcgcgggttccacgtcaccttcgtcaacaacgagttcaaccaccgccgcctcctccgcgcccgcggcgccggcgcgctcgacggcgcacccgggttcaggttcgccgccatcgacgacgggctcccgccgtccgacgccgacgccacccaggacgtcccggcgctgtgccactccgtccggaccacctgcctgcccaggttcaaggcgctcctcgccaagctcgacgaggaggccgacgccgatgccggcgccggcgccggcgacgcgcggcgcgtcacctgcgtcgtcgccgacagcaccatggccttcgccatcctcgccgcgcgcgagctcggcctccgctgcgccacgctctggaccgccagcgcgtgcggcgaggctgacctcagcaatgggcacttggacacgaagatggattggatcccgggcatgccagccgacctgcgcctgcgcgacctcccgagcgtcgtgcggagcactgaccgtgacgacatcatgttcaacttcttcatcgacgtgacggcgaccatgccgctggcgtcggcggtgatcctcaacaccttcgacgagctcgacgcgccgctgatggccgccatgtccgcgctgctcccgccgatctacaccgtcggcccgctccacctgacggcgcggaacaatctgccggcggacagccccgtcgccggcgtcgggtccaacctgtggaaggagcagggcgaggcgctccggtggctggacggccggccgccgcgctccgtcgtgtacgggagcatcacggtgatgtcggccgagcacctgctggagttcgcgtgggggctcgccggcagcggctacgcgttcctgtggaacgtgcgccccgacctcgtgaagggggacgccgccgcgctgccgccggagttcgcggcggcgacgggggagaggagcatgctgacgacgtggtgcccgcaggcggaggtgctggagcacgaggcggtgggggtgttcctcacccactccgggtggaactcgacgctggagagcatcgtcggcgacgtgccgatggtgtgctggccgttcttcgccgagcagcagaccaactgccggtacaagcgcacggagtgggggatcggggcggagatccccgacgacgtgcggcgcggcgaggtggaggcgctgatacgggaggccatggatggggagaaggggagggagatgcggcggcgcgtggccgagctcagggagagcgccgtcgcgtcggggcagcagggcggccggtctatgcagaacctcgacaggctgatcgacgaggtgctcctggcttga

SEQ ID NO: 6035 - DNA, 1494 bp, Oryza sativa
  Clone ID: PAT_MRT4530_12764C.1
atggggtccttctcggcggcggaggagacgacggcgacggcggcggcgcggccgcacgccgtgatggtcccgtacccggcgcagggccacgtcacgccgatgctgaagctggccgtgctgctccacgcgcgcgggttccacgtcaccttcgtcaacaacgagttcaaccaccgccgcctcctccgcgcccgcggcgccggcgcgctcgacggcgcccccgggttcaggttcgccgccatcgacgacgggctcccgccgtccgacgccgacgccacccaggacgtcccggcgttatgccactccgtccggaccacctgcctgcccaggttcaaggcgctcctcgccaaacttgacgaggaggccgacgccgatgccggcgccggcgccggcgacgcgcggcgcgtcacctgcgtcgtcgccgacagcaccatggccttcgccatcctcgccgcgcgcgagctcggcctccgctgcgccacgctctggaccgccagcgcgtgcggtttcatgggctactaccactacaaacacctcgaccgcggcctcttccccctcaaaagcgaggctgacctcagcaatgggcacttggacacgaagatggattggatcccgggcatgccagccgacctgcgcctgcgcgacctcccgagcttcgtgcggagcactgaccgtgacgacatcatgttcaacttcttcatcgacgtgacggcgaccatgccactggcgtcggcggtgatcctcaacaccttcgacgagctcgacgcgccgctgatggtcgccatgtccgcgctgctcccgccgatctacaccgtcggcccgctccacctgacggcgcggaacaacctgccggcggacagccccgtcgccggcgtcgggtccaacctgtggaaggagcagggcgaggcgctccggtggctggacggccggccgccgcgctccgtcgtgtacgtcaacttcgggagcatcacggtgatgtcggccgagcacctgctggagttcgcgtgggggctcgccggcagcggctacgcgttcctgtggaacgtgcgccccgacctcgtgaagggggacgccgccgcgctgccgccggagttcgcggcggcgacgggggagaggagcatgctgacgacgtggtgcccgcaggcggaggtgctggagcacgaggcggtgggggtgttcctcacccactccgggtggaactcgacgctggagagcatcgtcggcggcgtgccgatggtgtgctggccgttcttcgccgagcagcagaccaactgccggtacaagcgcacggagtgggggatcggggcggagatccccgacgacgtgcggcgcggcgaggtggaggcgctgatacgggaggccatggatggggagaaggggagggagatgcggcggcgcgtggccgagctcagggagagcgccgtcgcgtcggggcagcagggcgaccggtctatgcagaacctcgacaggctgatcgacgaggtgctcctggcttga

SEQ ID NO: 6036 - DNA, 308 bp, Oryza sativa
  unsure (1)..(308): unsure at all n locations
  Clone ID: PAT_MRT4530_12765C.1
gaattattatactgcacttaattattttgctatagtcaacttacaaatataaacatttcatatgaaaaatggaaaaatagtcatcggtgacgggctttagttaatgcccgatagagattaagtatatagcccgtcactgatgagtcatctcanaacgggcctcaagttatggcccgtcacggatgatggtcatctatgacgtgccacgacttgaggcccgtttgagatatggaatgttatctcaatcgggcctaaagttggtgcccgtcacagatgatggtcatctgtgacgggcaccanctttaggc

SEQ ID NO: 6037 - DNA, 1817 bp, Oryza sativa
  Clone ID: PAT_MRT4530_12766C.1
ccgtgtaataattctttaagcaaaatgcacaaatatagcaaaaatacatattatttctcaagccatgagcacctcgtcgatgagcctatcgatgttgtgcacggaccggccaccgggcttcgccgccgcgacggcgctctccctgagctccgccacgcgccgccgcatctccctccccttctccccgtccatggcctcccgtatcagcgcctccacctcgccgcgccgcacgtcgtcggggatctccgccccgatcccccactccgtgcgcttgtacctgcagttggtctgctgctcggcgaagaacggccagcacaccatcggcacgccgccggcgatgctctccagcgtcgagttccagccggagtgggtgaggaacacccccaccgcctcgtgctccagcacctccgcctgcgggcaccacgtcgtcagcatgctcctctccctcgtcgccgccgcgaactccggcggcagcgcgggggcggcgccgccgtcgcccttgacgaggtcggggcgcaagttccacaggaacgcgtagccgctgccggcgagcccccacgcgaactccgccaggtgctcggccgacatcaccgtgatgctcccgaagttgacgtacaccacggagcgcggcggccggccgtccagccaccggagcgcctcgccctgctccttccacaggttggacccgacaccggcgacggggctgtccgccggcacgttgctccgcgccgccaggtggagcgggccgacggtgtagatcggcgggagcagcgcggccatggcgcccatcagcggcgacgacggcgcgtcgagctcgtcgaaggtgttgatgatcaccgcctccgccagcgacatgctcgccgtcacgtggacgaagaagttgaacatgatgtcgtcacggtccgtgctccgcacgaagctcgggaggtcgcgcagccgcaggtcgccggtcatgcccgggatccaatccaccgtcgtgtccaagtgcccattgctgaggtcagcctcgcctgccaaaacacgtacaaattttttagcatggatagagaattgaattaggaagttcgccatggatgatctacttttgagggggaagaggccgcggtcgagcaggtgtttgtagtggtagtagcccatgaacccgcacgcgctggccgtccagagcgtggcgcagcggaggccgagctcccgcgcggcgtggatgccgaacgccatgttgctgtcggcgacgacgcaggtgacgcgccgcgccgcgccgtccgcggcggcggcggcggcggcctcgtcgtcgagcttggcgaggagcgacatgaacctgggaagccaggtggtgcggacggagtggcagagggccgggacgtcctgggtggcgtcggcgtcggatggcgggaggccgtcgtccatggcggcgaagcggaagccgggggcgccgtcgagcgcgcgggcgccgcgggcgcggaggaggcggcggtggttgaactcgttgttgacgaaggtgacgtggaagccgcgggagtatagcagcttcgccagcgtcagcatcggcgtgacgtggccctgcgccgggtacggcaccatcacggcgtgcggccgcgcctccgccgccgccggcaacgaccccatctcgccgccggctaaaaaacagcgacgacattctacgtgtctagctctgcaccgtgcgtcggtatgcacacgccgtgcggctggtcgccgccggccgcgatggagcccatgtctctgtatgcgtcactgtactcgtgaacctcgtgtggtcactgaaccgtgtcctgtttactgtttcctgcagcccgggggat

SEQ ID NO: 6038 - DNA, 720 bp, Oryza sativa
  Clone ID: PAT_MRT4530_12767C.1
atggtggtggagcttgcggcgacagcggacggaggaggcatggggcggcgcgacggctcggcggggaaggagacagcggggacagcggcagcgcgcccccgtgagggcggccgtggatccgcccccaagcagcaggatccggcctccctagcctggatctgggcggggcactgtcgggccgacggcgacggaggcgtgactagcggctggctgtggcgccgtggctgtggttgctgtggctatggcggtggtggctgtggcgaccggggtcgttactgcggtgtgaggaggcacggcggtctcggatggctagcctggggcgtggcagacggccgcatctggccggcacggcaatgtttggaggaggggttggaggctggctcggcgcaaagaggggcggctaatggtagcggagaccggcatggagcgaggaggcgtggtcgacggcggtggaggccggcttggcacgagaggcgcggccggtggcaggagaccggattggtgcgagaggcgcgtccagcgctggaggaggccggtgtggcgcggcgcgatgagacgcggccggtggtggaggaggcgaccttggtgcgaggaggagctgccggtgggtgtggcgtggtctacggcaaacgaaggctagcaggcagggggcgccggtgcagtggtcccacatatcggcagaggttgagcgatggtggagggttggtgcatcagctgtag

SEQ ID NO: 6039 - DNA, 293 bp, Oryza sativa
  Clone ID: PAT_MRT4530_12768C.1
atgatttaccccgtgcgcgcgcgtgggagcggccgtgccaccgacactcgcgtcacgggcacggaggagaagacggggccagccgccagcgcgggaggtcaggtgtatcgagcgaacgccgtcgcggtcagggcctcataaaacgcatacaagaagaagaagaagaagaagaagaagaagaggaggaggaagaaggagggcgaagttttccctcgacgcggagagggggacggcgaccgcgcaacacaaaaccgttgcgctgtacgtgcagtgcagccgtgcaggtgaagtgc

SEQ ID NO: 6040 - DNA, 390 bp, Oryza sativa
  Clone ID: PAT_MRT4530_12769C.1
atggggaggaggaggaggatgcggacgacgccattaatgcctccgagggcgtcgctctccagccatctcctgctcagcgctcagcccgcccagcccatgccccccctgctccgctcctgcggcgaccgcgcgccctcttccttcctcagctgccgctatcaatgccgcctacccaagtgtgatgaattgatgctcttggccgtcacgaccagtgttgtacttctgcacgttattaatgcccaggctgcgagcatatacaacgtttgcacgatgccgttcaatgcgacgcagtcgacgggcgagttcctcctcccctccccgttgtgggatgtggatgggatgggtgatggaatgggggcggtacacggggtggcatggcacgtcgggtga

SEQ ID NO: 6041 - DNA, 413 bp, Oryza sativa
  Clone ID: PAT_MRT4530_1276C.1
ccaagggcccagcagcatttttgggaaccccgcttttaaaaaaagggccaaaagcggcccttgaataaaaaaaacggccaaggaaaagggcttttgggaaaaaaggctaattaaagggggcaaatttttttttgctttggggggaagcccttttccttgaataaaagcccaattcccccatataaaaagaaagggggggggccccaaaaaggaccccccttttttccccgggccgggtattgggttcaaccagaaagggggttttataaaaacccacaaacggggggggtggggggggcaaccaaccaaaacggccatgattttgcctttaaaggaaataaaaaaggggctaaccctccttaaagccagggggggggttggcaaacttgaaaaggggaaaacccaagggccct

SEQ ID NO: 6042 - DNA, 2923 bp, Oryza sativa
  Clone ID: PAT_MRT4530_12770C.1
ggtgcaacgtcttctggtagcaatgaagacctcgagcttcgagagcgctagtagcagcggcggcagcggcggtggcggtggcggcggtggcggcgagggctccggctcgttcaacctccggaacctatccaagctcatcctgccgcctctcggcgtgccggccggcggccacgcccagtccggccatgccggccccaacgacaggcgtgtcatctcgcctctcgactccagatacaggtgctgggacacgttcatggtggtgctggtggcgtactcggcgtgggtgtacccgttcgaggtggcgttcatgaacgcgtcgcccaagggcggcctcgaggtggccgacatcgtcgtcgacctcttcttcgccgtcgacatcgtcctcaccttcttcgtcgcctacatcgactccaggactcagctcctcgtccgcgacaggcggaggattgccaccagatatctgtcgacgttcttcatcatggatgtggcgtcgactatcccgttccaaggccttgcctacatcgtcaccggcgaggtcagggagagcccggcgttcagcctcctcggcatcctccggctatggcgtctcaggaaggtcaagcagttcttcacaaggctggagaaggacatcaggttcaactacttctggatccgctgcgcccggctcatcgcggtgacgctgttcctggtgcactgcgcggggtgcctgtactacctgatcgcggacaggtacccgcacagggagaagacgtggatcggcgcggtgatcccggacttccaggaggcgagcctgtggatccgctacacctcctccgtctactggtccatcaccaccatgaccaccgtcggctacggcgacatgcacgcccagaacaccgtcgagatgatcttcaacatcttctacatgctcttcaacctcggcctcaccgcctacctcatcggcaacatgaccaacctcgtcgttgagggcacccgccgtaccatggaattcaggaacagcattcgtgctgcctccaatttcgtgggccggaaccacctgccgcctaggctgaagcagcagatactggcctacatgtgcctcaagttcagggcagagagcctgaaccagcagcagctgatggatcagctccccaaatccatctgcaagggcatctgcgagtacctcttcctccccgtcgtcaaggacgtctacctcttcaagggtgtctcaagagaagtgctccttctcatggttacgaagatgaagccggagtacataccgccgaaggaggacgtgatcgtgcagaacgaggcgccggacgacgtctacatcgtggtgtccggcgaggtggaggtgatctactccgacggcgaagccgaggagcgggtggtggcgacgctggggacgaggggcgtgttcggcgaggtgagcgcgctcagcgaccgcccgcagagcttcacgctgcggacgcggacgctgtgccagctgctgcgcctgcgccaggccgcgctcaaggaggccatgcagagcaagcccgaggacagcgtcgtcatcatcaagaacttcctcaagcatcagatcgagatgcacgacatgaaggtggaggacttgctcggggaggacgccgccggcgagtacgaccacggcaacataccgtgcaatctgctgacggtggcagccaccgggaacagcagcttccttgaggatctcctgaaagttggaatggatcctgacgtcggtgactccaagggaagaactgcactgcatatagcggcatcgaaggggtacgaggactgcgtgctggttctcctcaagcaagcgtgcaacgtaaacatcaaagacgcgcagggcaacacggcgctgtggaacgccatcgccgcgaggcaccacaagatcttcaacatcctgtaccacttcgcgcgcgtctcgagcccgcaccacgccgccggcgacctcctctgcctcgccgcgcgccggggcgacctcgacacgctccgggagctcctcaagcacggcctcgccgtcgactcggaggaccgggacggcgccacggcgctccgcgtcgcgctcgccgagggccacgccgacgtcgccaggctcctcgtcctcaacggcgccagcgtcgacagggcggccagccacaacgagcagcaggcggcggcggcggtgtcggtcgacgagctgcgggagctcatgaagacgcgcgagctcgcgcacccggtcaccatcgtcgtcgactcgccgtcgccggccgccgcagccgtcatccgggaggtcggctcgtcgggggacagccggaatgggcggcgccagagcgcgagatcagacggcgcgcactggccacgggtgagcatatacaggggccatccattcgtcagaaaccgtagctcagaagccggcaagctgatcaacctgcccggcaccatggaagaattcagaatcatcatagaggagaaactgaaagtcgacgcgaggaagacgctgatcatgaacgacgaaggagcggagattgactcgatcgacgtgatccgggacaacgataagctgttcatagtgaccgaggagcatatgacagcagtagcatcgatggactcggtgtctggatcatagcatattcgagtttgctgaataaggccttgtccagcttggagggatttgagtgggaatgtttttgcatcacaataggtgtaaaactagtctccccaatctgttccttttagggattaaccgaacaaagcctaatcaagttttctattggcgacaatccaacaatgtgagaagtgccaatataattgaagtgattaatggttttgtagtgtattggattaggagatagatatgccataaacagattcacaattgctactacctccgtttcaaaattgtactccatctattttatattataaaacgttttgattttttttaaaaaaaaaaaaaaaa

SEQ ID NO: 6043 - DNA, 140 bp, Oryza sativa
  Clone ID: PAT_MRT4530_12771C.1
ttttttttgggggggtattaacaggtttgtacataaccagattactctgaacgtgaaagattcaaggactaggtggaaaaccgagtcgcatatcagggtacaagttagacatgacagtacttgcttgcgagtacaaggat

SEQ ID NO: 6044 - DNA, 180 bp, Oryza sativa
  unsure (1)..(180): unsure at all n locations
  Clone ID: PAT_MRT4530_12772C.1
tgtgtgncttaggaacagcttctggtatatgatttgncttggtgtttgtgtganccnatgtttcatactaatagcncgctactgtgagccgaattcacgttgctttctgggtgaattttttgttgcttcctgtctcctcgttggtgcttatatctctatacgtatcaatccgtgccttag

SEQ ID NO: 6045 - DNA, 682 bp, Oryza sativa
  Clone ID: PAT_MRT4530_12773C.1
cccacgcgtccgttggggatgccaactgccaatatattcagttatattcttaaaattgtctatcagctgaaccaattatgattgttaggtgtattttgcctaccttgtaaattctggttggcaaccgtgtacgtgtgttatgatcttatggtgcacactttgcagacatttcatcatatatcaagttcttctttttcatagtttaaatactaaatccatgtgttatatatcaatttttaatggtgaagtcttgttaagaagctaagttgggagccctgccaaccaatcccttgatcttgtgatcagtgatttcaagtcgtctagtcgggactagtcgtaagggcaccgactagttgagattagtcggtgactataggctaggggtgcccaggataatatatagatgattataagtacgaattaccatagtatactagtatagtatagtacaaactaaggataatcagattttcacagttgacagttcacacttgacttaaggtcttaaaagttaaatcatttacctgtcctaattgcaataagtccttcattttttctcccctctctttcgtgactagatctagatgtctgggcagggttagtccgttagatgaggggtaaaggccttcttgggctgggcaaaaagccctgccactgaaaggtaaagtctaccacatatttt

SEQ ID NO: 6046 - DNA, 299 bp, Oryza sativa
  Clone ID: PAT_MRT4530_12774C.1
ggtattccttccatgaaatacatgtgcgaggatgggaatttttacagtgactgtactacccccaatggccagtgtactggatgaaactaatcctacatgattttctttccctgacctaaagtttgaataaactttcccccctatggtgggtaccatgtggaaacctatttacaccacccggcctacataattttggtcgtcgccataaagttgaaatccttttaacagtaaaatgtagaagaaaaaaaataaaactaactttctaagtaattatttacagataattaattaaccccagc

SEQ ID NO: 6047 - DNA, 359 bp, Oryza sativa
  Clone ID: PAT_MRT4530_12775C.1
tttttgtttttttttgtctggtgtgttatatgtatttagcaataaactcatgcgtctcagcttcgagcatgtgcggactgtttaattttgcatgccatcgttaacaactctctggctccaaactacatggggctacgaacattagaagttcatgcaacctaattggatccaagttatatggaccctatagatttattggaagctaatagaaatggccgggatggggaacacgagagcgtcgcaagagcttgtgctcgattggggttaagcgtaccaagccgccttcacagacaccgtctttagtgcctgggctgttaagcgcttgaagttcacctgcatgttactttgggcccccctgc

SEQ ID NO: 6048 - DNA, 2311 bp, Oryza sativa
  Clone ID: PAT_MRT4530_12776C.1
ccgctgatccccttgtgcgcccacccgccgatccgcgtgtccgccgcgccctccagccccatctcccgcagcgtctcctccgcccgctcccgcttcgccgccgcgctcatcccgctcggcagctgcagctgcgccgagtaccgcaccgcctcccgcaccgtcagcgtgttcatcagcacgtcgtcctgcgtcacggaactcgttcttgtagaacccctggttggcgtacttgtggaacgcgatgtagtacatggggtacttccacaccggcttgggcaggtcgtcggggaggcggaagaagccgccgttgagcatcatgacgccctggatgccggcgccggtgatgatgcccatgaggaagtccggcacggcgctggccacgatcatcatcagcccctccaccaccatcatggtcgtgaagagcaccaccgcgaagtaggcgaagtggtcgatgctgctctggagcccggtgaggtagtagccgatcgcgcccggcgccaccgagatgagcgccaggtacggcgtcgccgacagcgtgttcgctatcacgaatgaccccacgccgtagtgcccgttcagcctctccctcccaaatatatgggtgcggctaatagaaagcaacaaaaaaaagaaaagaagaaaagaaaatgggacactgtgagtgatggccatggctgacgaacctggatggatccgtagctgtggccgatgttgtagtaaatggtgccgacgcagaggcacagtgcgatgtaaatggcgaaacgcagccagtaatagcccaggtccctgtacatgttcacgaacgacctcttcgtgagcacccaggtctccaagtggacggaggatttgtaggagttgacaagcgtgtcgattgcttgagcagtcgtcatcttcttcccgtccatgccttcctcgatatcctgattgatggatcgtttagaagatactaagttattcgggatcattttatttattcaataattcagcagctttcatatggtttaattgccatcgtcttgatctcgtcatttgctactcaccttgtcaaagtccttgtttatagtcctcaggaagtggtctgaagggttcatcaatgatggacaagggaacccgctcaaagcaaaaaactgggcggtgtcggcggcggggccgaagaagacggtcttgccgtaggcgaggaggcagaggccatggaagaggccgaacacctcggtgctgggctggtgcacggcggcgacgacggtcatgccctcgcggcgcgccatgcgggcgatgcggctgacgacgtggtacgacgcggcgctgtcgaggccgctggtgggctcgtcgaggaacagcagcgccggccgcgtgaggatctccatgcagatgctcacccgccgccgctgcccgccgctgatccccttgtgcgcccacccgccgatccgcgtgtccgccgcgccctccagccccatctcccgcagcgtctcctccgcccgctcccgcttcgccgccgcgctcatcccgctcggcagctgcagctgcgccgagtaccgcaccgcctcccgcaccgtcagcgtgttcatcagcacgtcgtcctgcgtcacgtacgcctgatccatgcgttccacgagatcatccattattcaattattcatcgtgcatgcagcaattaattcgtgcgtgtacacgttacctgccaacgcatcaagaagtgtggacttgccgcagccggagggccccatgatggcgagcacctcgccggggcgcgcgtagccgttgaggccgcagaggatggggacacggccgctcttcccgccggcggcggacacccacaggtcctcccacgcgaggacgacgccctggtccggccggcgcaacgacggctcgcgggcgacgccgccgccgccgccgttcaaacatccagaacaatagcatctccaactgcacgtgaatactcccgcaccgtcagcgtgttcatcagcacgtcgtcctgcgtcacgtacgcctgtggcgcgatccattcatgcgttccacgacacgagatctcaccatgcttgcatcattgctcgaatctttatcaaagaaaaaacgagatcattcgtcgccgatcgactcaccgacgtgccgaacgccagcttctgtctccggccattgatcaggatgtctcccttctggctcacgctggagcctaaccttcctgtacccagaattcatgcaattcgatcggtgatattcggtgtctcggaacacacgcaagccgaggtgatcagaagagtggcatgcatcatatgtaagggaaactattttaatccctcgagggataatcaaa

SEQ ID NO: 6049 - DNA, 591 bp, Oryza sativa
  Clone ID: PAT_MRT4530_12777C.1
ttaaaacgcgcccccctctgcaggaattcggcacgaggggttgcacaggttacccttcgcttgatcgatcccatcaaagagtgacggaggtggtggagtatggtggtcggcttccgccgcacgatctcgttccccgcgcccaaggcggcgacggccgcgaagggtgaggcctaccgcgtccggtcggcgagcctgccgtgccggttccatcctctggtggtccagcttgacgaggatgtggcgacgatgagggagctggtgggccgcctggcgtcggccgcgtcggcgggctccgtcgcgggggccgcggagcagctcgggcgggtgctggtgtcgctctccgagctgctccaccacccgcaggcgcaggagccgctccggcggctcgggcggtcgccgttcgcggagcgcctgctcgacaatttcctccgcctcgccgacgcgcacggcagcttcagggcggcgctcgtcgcgctcttcgcgctccaggccgaggcccgtgcctgtctgcggtgctaggacccggcgcacctggtgtccgaggaccgcgcactgccacggttttgtaagaccttcgtgttcttgcttcat

SEQ ID NO: 6050 - DNA, 2520 bp, Oryza sativa
  Clone ID: PAT_MRT4530_12778C.1
accaaagttaccaagatattttcagtaatatatatatatatatacataatctatattgggtagactctcgagtagtacaaaaacatttttccttttcttttctcaaacaaaaaaactgacatcatctcacccttgcatatacaatgttcacatatatcacaccactaatatatcagatgcctatgggtaaaaaccactgccccaatcgatgttggatcaaaggcttcctgccgagccattctcggcgatgtgcaccgacggcgcgtcgctcctgaacctgagcctctgcaccatgggcttcatcttctcgatgagcttgacgatgacgaagaagagcaccctgtacagcaccaccatcccaccgaggatggcgaggtcgacccacttgctgtaccccagctgcacctgccagtagtctcgcaggatctcgtggccggtgatggtggcggcgccgccggcctggttgttggggaaggtgagccccaagaactcgttcttgtagaacccctggttggcgtacttgtggaacgcgatgtagtacatggggtacttccacaccggcttgggcaggtcgtcggggaggcggaagaagccgccgttgagcatcatgacgccctggatgccggcgccggtgatgatgcccatgaggaagtccggcacggcgctggccacgatcatcatcagcccctccaccaccatcatggtcgtgaagagcaccaccgcgaagtaggcgaagtggtcgatgctgctctggagcccggtgaggtagtagccgatcgcgcccggcgccaccgagatgagcgccaggtacggcgtcgccgacagcgtgttcgctatcacgaatgaccccacgccgtagtgcccgttcagcctctccctcccaaatatcttcatgtcctcgacgaaagatgggaagccaccgatggccatgaaggtgaggaaggcagcgacgaacatgagcatggagccacgagcctggatggatccgtagctgtggccgatgttgtagtaaatggtgccgacgcagaggcacagtgcgatgtaaatggcgaaacgcagccagtaatagcccaggtccctgtacatgttcacgaacgacctcttcgtgagcacccaggtctgcgtcagaaagctcggtctctcctccttcttcaccactgcccctccggtggcgcgtatgtcttggatgtgatgcgtcactttctccaagtggacggaggatttgtaggagttgacaagcgtgtcgattgcttgagcagtcgtcatcttcttcccgtccatgccttcctcgatatccttgtcaaagtccttgtttatagtcctcaggaagtggtctgaagggttcatcaatgatggacaagggaacccgctcaaagcaaaaaatacccaatgtttgagaacagttctcattttgtccttactaattttcaggcacaaggttccgatgtaataatctgtagatttgtttctttcaaaaatagtttttagatttgtagtaatggctgaaataatgtgtactttctgggcggtgtcggcggcggggccgaagaagacggtcttgccgtaggcgaggaggcagaggccatggaagaggccgaacacctcggtgctgggctggtgcacggcggcgacgacggtcatgccctcgcggcgcgccatgcgggcgatgcggctgacgacgtggtacgacgcggcgctgtcgaggccgctggtgggctcgtcgaggaacagcagcgccggccgcgtgaggatctccatgcagatgctcacccgccgccgctgcccgccgctgatccccttgtgcgcccacccgccgatccgcgtgtccgccgcgccctccagccccatctcccgcagcgtctcctccgcccgctcccgcttcgccgccgcgctcatcccgctcggcagctgcagctgcgccgagtaccgcaccgcctcccgcaccgtcagcgtgttcatcagcacgtcgtcctgcgtcacgtacgccgacgtgccgaacgccagcgcttgcctccggccattgatcaggatgtcccccttctggctcacactggaacctaaccttcctgccaacgcatcaagaagtgtggacttgccgcagccggagggccccatgatggcgagcacctcgccggggcgcgcgtagccgttgaggccgcagaggatggggacacggccgctcttcccgccggcggcggacacccacaggtcctcccacgcgaggacgacgccctggtccggccggcgcaacgacggctcgcgggcgacgccgccgccgccgccgttctccgccgcgctgatctccagcgacggctgccgcgccggcaggaacggcggcggcgcgaacgaggagcggccgctgccgaaggggaacccgtcggtgctgcgcacggaggcgctcatgtcagagacggcgtcgaactgcggcggctggtccacgtcgtcggcctcgcggccctgcggccgcggcgggctcggcttccacctcggcacggtgggttggtgctgcccggacgccat

SEQ ID NO: 6051 - DNA, 436 bp, Oryza sativa
  Clone ID: PAT_MRT4530_12779C.1
gtacaccaccggggacaatctcgagcttctcccctctccggatgatggatcaagacttgggctccctagatctgaagttaagctcatcacatcaaatctagctgttggtgatggactggaatgggacggagcagctcaagctcaagcttgtgttgggggagcaactcagcgcagagaagctcacactcaagcccgcgtaggtggcaaccaccacgacaatgcgtcggcgacgaccatgacaagcacgccatcctccgacttgaaccgaactactcgagaaggctacactggcagtgccttagtcctccttgttgcagcgcaccgtgaaagcgggagagagagaggaacaaggaaggagaggagaagtaaaaaaaagaaaaggaggaaaaaatacctatgtattttgggcccattggcaatgagtgtatatgagtga

SEQ ID NO: 6052 - DNA, 492 bp, Oryza sativa
  Clone ID: PAT_MRT4530_1277C.1
atggaagggggctcgagttcatcgtcgacgaatcggcggaagggaaaggggcgtctccctctgattaagtgcccttgttgcgattgtgagacaatcattaggcgtgcggctaatacgcctgagaataaagggcgcatattttacacttgcccttgccatcagcgagatggaattggatgtcgcttttggtactgggaggaacaatatgaggagtacttgattaatactgggcatcttgcatctcgtgctgtgcatattcagagtccatgttctgctgtgcgtgttcagacaaatgcaatggttcaacagggtgcacaaccatatgttgaaaatgatgcagagcaaattgctgagcagattaaagtgcttgttaggaggatgaacttgttgatagacattggtagggatattgttgccttattgagatgtgtagtagctgcctgtgtggttgttgcggtgacaaatatgtatgctttctttaggagtggttga

SEQ ID NO: 6053 - DNA, 393 bp, Oryza sativa
  Clone ID: PAT_MRT4530_12780C.1
atgggtgagcgcgcggccggagtaggcggaggggcagtgtcagcgtgcggccagagcaggcagagcggcggtgtctccgggagagcgtggcagcggcagcggcaagcggttggcgagcacggcggcgggcaagtggcggctctgggcgtgggcgatgatgggtggcgccgcgggacgcgggacgcgcaggtggtggcggcggcgggggacacgaaggagggtctccaccgcgccgtgcatgccgcctacgtgtccgctgtccacgcccgcccactgcttgcccccacctctatccgtccatcccgcgccgccgccgccgcctcgttcatagtcaaaactgctctggattgggtcgaggggggtaaattgtctggtattgaaagttcagggtga

SEQ ID NO: 6054 - DNA, 1939 bp, Oryza sativa
  Clone ID: PAT_MRT4530_12781C.1
ggaccaatgtggttccattgcttgcaagaacttgatgcatgcggcttgaacaagaatgaacaaagatttgtcgtgagcttgtgaggctagtagaacaaggtgacaagaagagcctatcgaagtataagcaagatttctggggaggactgggaagtatagaaaaggcacagggaggaaatggtcttgttgagttttgagcagaaaacatcaattatagaggagtgtggcaaggagatatgttaaggagatgggcaagaagggaggctggatcactgcactcaagaaggctttcacctctggccctaaggacaagcctacaaatgggcagctggtagcgcagtactctcaccagcacaggagcggcggcggcggcgccgccgccgcgagggacaagaagcgatggggattcgggcggtcgcggcagcacgccgagccgtcgccggcgggcgcgctgatcaacatcccgctgtaccgcgagccgagcagcatcgagaagatcctcgtcgacgccgagatggagcagcagcaccggcagtacagggcgcattaccagatcacgccggccaagccagccacggtcaccgcgcccgccgccgccgcgtcgctgccagcgccgccgccacctgtgtcggcacgcgagcgccagcgccggcgtgacgtcgacgacgacaagcccgccatcgtgctcccgctgcctccgccgtcgccgcccccgctcatcaggaggttcgaccatgacagggagcagcagcagaagctgcaacagatgcagcagcagacccgcgccgagaccgagtggcggcggccgcaggcgcagcggcgtcgcgcggcgaggccgaggggccccgccccgccggaccgcgcccgcgctgccgccgtggcgatccagtccgcgttccgcggctacatggcgcggcggaactaccgctccctgcgcggcctgatccggctgcagggcgtggtccgcgggcccagcgtccgtcgccagacggcgcacgccatgcggtgcatgcagatgctcgtccgcgtccagtcccaggtccgcgccagccgcgtcgaggccatggagcgccgcaaccgccaccaccacgccgccatgctccgcgacgccgcccgctggcgcgccgcctcacaggacggcggcatctgggaggacagcttgctgagccgggacgagatggacgcgcggacgaagcggaaggtggaggcggtgatcaagcgggagcgcgcgctcgcctacgcctactcccaccagctgctgaaggcgacgccgatggcggcgcacgcgatcctggcggacctgcagtcgggccggaatccatggtggtggacgccgatcgaacgccggcacgaggcggaggcggcggcggcgctgctatcccggcaacgcgtggagcacgtcgggaacggcggcggcggcggcaggcatgtggctgtgacggcgacgccggcgcggtcggtggtgtcgtcctactcgacggcgacggcgacgacggcggcgaggccgagggcgacgcggccggcgaaggtggcgtcgagctacggcggcggcgggagcatccgggacgacgagagcctgacgagctgcccggcgttcggcggcgcactgcccaactacatgacgccgacgatgtcggcgtcggccaaggcgagggcgcgcgcgcagatgctgcggcagcagcaggagaagcaggcgcaggcggcgcaggagaagccgaggttctcgttcggcctcggccagagcatcggcagctgggccaagagccccttctggaagggcggcgccgccgccgctccgccgtcgatctcgtcgcgggttgccacgccggctgcgtccgtcgccggcaggcaccggccgacgcggtcgtcggtgagcgagctcagcgtcgactccgccgtgtccatgccggccgggatcggccggaggacgttcaagtag

SEQ ID NO: 6055 - DNA, 183 bp, Oryza sativa
  Clone ID: PAT_MRT4530_12782C.1
atgggccaggttgggctgacccctggttcggcagaaccaggaggttcggctgaacctcccctggcgccgttggatccaggttttggctggacgatgagaggtgggccgttgatggtgacagctcagtacgggaactcagcagtcagcggtggcttctcgaagtaccaggagggcatcggatag

SEQ ID NO: 6056 - DNA, 1382 bp, Oryza sativa
  Clone ID: PAT_MRT4530_12783C.1
atgctgctgcgtcttccgtgcgcgcgcggccccgcgccggcggccgccgcccggtggagacccccggggcgggcggcgcggacggcaccacgtctcggccgagggcacgccgccgcttcgtccgccgacggcagcggcgctccgagctctccgctttttgttctctgccattcccaagctctgaccctggcgttgccgccgcagtccctccactacgactacgatcctttggccgacctccttggaccagacgtcgacccgacctcatcccaaagatctttcaatgccggcgtcatcttggtgacttggctaatttggaaagagcacaatgagtctttgaggggcgtgcagtctctccggaatactgctccagttgcagagaaggggaagctgaggtcctgggttggtccaaatgggcaatactatcgtgagctgccttgccctagctgtcgaggtagaggatacactccttgcaaacagtgtgggatagacagatccagtttggactgccctatgtgcaatggcaagggcattagggagtgtgtgcaatgtgctggagagtgtgttatatggcaagaatctattgatgagcaaccatgggagaaagttcgttccagttctcccttgaaagtaaaagaggatgatgaagtcgacaaactggagataaagattaacacatcaaaaagatcaaggcgtacttacccatctccatcccctgaagttgccctgaagattagcagatctttaagaagtctgaatgctaaaacaggactgtttactaagcatatgaagattatacaccaagaccccaaattgcatgcacaaagggttgctgcaatcaaaaaaacaaaaggtactgctgctgcaagaaagcatgcatctgaaactcaaaaggcattcttcagcaatcccgagaatcggcttaagagaagcattgccatgaaaggggtgaaattcttctgcagcaaatgtgggcaagaaggtcataggagcttctattgcccaacagtgagagaaatttcaggcagagcgcatttcagatgccgattatgtgggggaaagggtcataatagccgaacatgtggaaagccaaagtcagagaatgagtgtcaacgacaacctcggcactgcagccaatgtggtgaaagggggcacaaccgtcgtaactgtcccagatccaccaccgttgaggttgaggatgtcaagatttactcagagtaaaaacaagataatgttcatagttcagggatttattcatgtagtttctgctcggcaaaggggcacaataggcgtacatgcccgaaaagaaaggctagcatagggcagcagaaagattgaaatatacatgttaatccacatagcaatcttatggtgtttgctgg

SEQ ID NO: 6057 - DNA, 175 bp, Oryza sativa
  unsure (1)..(175): unsure at all n locations
  Clone ID: PAT_MRT4530_12784C.1
cgcacacacacacctccattcgctccccgccgcacaacacngagaaaccccccacccttcgctcgccgccgccgccgccgccttccgccgcctcgaaccggaccaaccaacgacggctcgcttccctccgaggcggtaggccgcctgctcccggcggtttccttttttggccctc

SEQ ID NO: 6058 - DNA, 364 bp, Oryza sativa
  Clone ID: PAT_MRT4530_12785C.1
tcgaaaaaaccaacccaaccggcggcggattggccttgttagaacgatgggcgggttggggctggaccaaaccaacaggtttcttgggaccggcccttggcgggatgagcttgttcggcgggttggggaattcggggggcggattaacatgcgccggaccggtaagaacgcgccccaaaacatttgggatggacctgaccggtccaaggtcctggggccgttcttggagcaaaccccattgtacctgaccggagaggtcccgggagaattccggtgggacaccgggggggttttgggcgacccggagaccttcgccaagaacaaggaacttgaagggatccacttgcggtgggcgatgcttggg

SEQ ID NO: 6059 - DNA, 263 bp, Oryza sativa
  Clone ID: PAT_MRT4530_12786C.1
gccgacgaattaaaaacatgtgcggggattttttaccatgggggaaggtcacaatacacagcttggtttttctttctcaaagtaaactacacatttgtatacattagggagagacaccgtggtggtcttaaaaaaactgcacatgatcattcactcgttgtaccatcctgtctatccatctttttaccatatctagcccttcttatattcccaatgaactcttcaaaatatatctcaccatcactcatttgtatctgcctttt

SEQ ID NO: 6060 - DNA, 384 bp, Oryza sativa
  Clone ID: PAT_MRT4530_12787C.1
cagcacgtgcacttcaatgttgcattggaatttgctcctggtagaatgcaacaattgtagaagcaccaaaggattgtagaaaggaataaaactatatcatttataccttgtggatcctctgtgagaggaccttccaaaatgtgcctctcgagttccaagaagtcatcagactcatccagttagaggtttgaccggatcgtttctaggattgacctatctaattcgtgcccctgtttgtggttactctgtttttcagtaacggtgtgttgcaatctcactagttgtgcgctttacaatattctcacttgttgtttctagccactggaacaatcttttcctttgtaaaattctgtttccatttcacatttctataggaattccaat

SEQ ID NO: 6061 - DNA, 378 bp, Oryza sativa
  unsure (1)..(378): unsure at all n locations
  Clone ID: PAT_MRT4530_12788C.1
gttttgtgtaatattatctagcttgtaataagaggatggaggtgctgtttcattacatattctatttttattcatctaccaacaaggctgtgatcacacactttctattttgataccattgtacaaaatgaaaaagggtaggtaggtggcttctattatttgcgagttgttgaccttggccattatatttcttaactgttttatgttacagtgaatcaggattcagggtcaaaatcatatatatggaacaccattcttgcggtattcctagatataaatagtttaagtttcactgccagccttttttttttcagcaaagttagcttcagtcaactctgttgngaattgnctngntnagnactagatggaccttatgaa

SEQ ID NO: 6062 - DNA, 364 bp, Oryza sativa
  Clone ID: PAT_MRT4530_12789C.1
ttcctttgcgcgtggccaacgagggggcaccgagcagcgggcggtaggcggcgtcgagcagcgggcggcgggcggcggcggcggctcggcttcctcggctcagcggccgacaacgacgacggccgcggtgggagcggcgacggcgggcggcgggagcggctacggcagcggcggcggctcggcggccgacaacgacgacggccgcggcgggggcgacggatccgatgccgccgccgacggatccggcaccggtgacgacgatgggtggcggggccgattggatccgccaccggcgacgacgctgggcggcggggggacgggatcccgctgcgtctacgactgttgtggtgggagcagctaccgt

SEQ ID NO: 6063 - DNA, 654 bp, Oryza sativa
  Clone ID: PAT_MRT4530_1278C.1
ccggccgggatccttctcatactcgatcttacagcgaaagcatatcgattagaatcccaccacaatgcacaccgttttcttctatgctcgccttgctattgcaggacgtggcgccatggcgcagctagatgctgctactccagatcactggcattatcatctgcaagcgcatctcatggtgcatcaacttatgcttataccatgatgtgagttcctacggcaagagagcacaacagcggcaacgcccttcttcctatcatcccaagaatgaactgttacactgcccagatatgtttgagatccgatgtcaacatcttacgatgatcccttagcaatctcactgaccaggacattactagcgtgcacgacatcgtgcaacagctacagctacaacagtttgctgacgccgacttccatcaggctcacgctcaagcccaccctatgttgtccctacactggccgtcaatatgcgggatctacacaagctacaacactgctccctgtaatgttcccaccggcgagagtgatctgctactgaattgtagcagtatattagtataggacagcacaataaagtcctgcatcatcgtgtgtgacaagtgaaacatcggggggataaaaatctgaataaaaatgtcatgcaaggttaaacaa

SEQ ID NO: 6064 - DNA, 3260 bp, Oryza sativa
  unsure (1)..(3260): unsure at all n locations
  Clone ID: PAT_MRT4530_12790C.1
atggcggagagcgatggcggcgaggctagcccgagcggtggcggcggcggagaggggagccccgatccccggcggccaccggctcggccgcagctcaccaagtcgcgcaccatctccggctccgccgcgtccgcgttcgacagatggggcaccagcaacagcagcagcagcatcctagttcgccgctcctccacagcgccgctcccgccgggcgcggcgccgcgggggctgctcaccgtggccgtggacgagccctcctacgcggcgcccaacggcggggcggccatgctcgaccgcgactggtgctacccgtcgttcctcggcccgcacgcctcgcggccgcggccgccgcggtcgcagcagcagacgccgacgacgacggctgctgctgctgccgacagccggagccctacccccgccgcgccgccgcagacggcgtcggtctcgcagcgggaggaggagaagagcctcgcttccgtggtgaagcggccgatgctgctggatgagaggagatcgctctcgccgccgccgccgcagcagcgcgccccgcgatttgatctctccccgtatcttgtactaatgctggttgtaactgtcataagtttttccttggctatatggcagtggatgaaagctaccgtactccaggaaaagatcagatcatgctgtagtgttagtactgtggactgtaagacaactactgaggcgttcaagattaacggacagcatggttctgattttatcaactccgcggactggaatttagcttcctgcagcagaatgcttgtttttgcgatacctgtattcttggttaagtacattgatcagcttcgacgaaggaacacagattccattaggctaagaagcaccgaggaagaagtgcctctgaagaagaggattgcttataaggttgatgtgttcttctcaggacacccgtacgcaaagcttcttgcgctcctgttagccacaataatcctcattgcttctggcgggattgcgctttatgttgtcagcggcagtggattcctggaggctctttggctttcatggacttttgtggcagattcaggaaaccatgctgatcaggttggcctgggcccaaggattgtgtccgtgtcgattagctctgggggtatgctggtgtttgccacaatgcttgggcttgtgtcagatgcaatatcagagaaggtagattcctggcgcaagggaaaaagtgaggtgatagaggtcaaccatatactaatcctcggatggagcgacaagttgggctctctcctgaagcagctagctatagcaaacaagagtattggtggtggtgtcgttgttgttctggcagaaagagacaaggaagaaatggagatggacattgggaagctagagtttgactttatgggaacatctgtaatatgtagaagtggcagtcctctaattctagctgatttgaagaaggtttctgtttctaaagcacgtgctattattgttttagcatccgatgaaaatgcagaccaaagtgatgcacgggctttacgtgtggtcctgagcctgactggagttaaagagggtttaaggggacatgttgttgtagagatgagtgaccttgacaacgagcctttggtgaaactggttggaggtgaactaattgaaacagttgttgcccatgatgtgattggacgtttgatgatacaatgtgcactccaaccaggcctggcacagatatgggaggatattttggggtttgaaaacgcagagttctacattaaaagatggccagaattagatggcatgcgatttggggatgtcttaatctcatttcctgacgctgttccatgtggagtaaagattgcttcaaaagctggaaaaatcttaatgaatcctgataatgattatgttttgcaagaaggtgatgaggtccttgttatagcagaagatgacgatacttatgttcctgcctctctaccacaggtgcgaaagggttttctacctaatatcccaacccctcctaaatacccagagaaaattttgttctgcggttggcgacgtgacattcatgacatgataatggttctagaagcatttctcgctccaggttctgaattatggatgtttaacgaggtgccagagaaggagagggagagaaaactgactgacggtggtatggatatttatggactaacaaacattaaacttgtacataaagaagggaatgccgtcatcaggcggcacttagaaagtttgcctctggagacattcgattctattttaattcttgcagatgagtcagtggaggattccatcgtacattctgattcacgttctttagctacacttcttctaattcgcgacattcagtctaaacgtcttccatcaaaggaactaaaatcacctctgcgttacaatggcttctgtcacagctcctggattcgggagatgcagcacgcatcagataaatcaataattatcagtgaaattctggattccagaaccagaaaccttgtatctgtctccaaaatcagcgactatgttctatcaaatgaacttgtcagcatggcattagcaatggtagcagaggacaaacaaatcaacagagttcttgaagaactttttgccgaggagggcaacgagatgtgcatacgttcagctgagttttacctctatgagcaagaggaattgagtttctttgatataatggtcagggctcgtgaaagagacgaggttgtcattggctaccgccttgccaacgatgaccaggcaatcattaatccagaacagaagtctgagattaggaagtggtcgctagacgatgtttttgttgtgatctcaaaaggtgactaattttacaatagcacctcacttttttcgagttagtaagtatatattctaacactagtgctgctaaccaatgctaactgaaatgctttaagttgctaaccaggcaaacacacgtcacagtacagttctgatctcatatgtngcnagctctgtacatgttgatttgccatctccatagcatttagttgatcttaacataaataattacacatcagcatttgaaactgttgttactaattgacattacaaaattttcagtgcgtcgattcagcagagataatttgtaaattgtaactactgtttcattttgaagagcatgctaatcattgaaattcatgcttctgtagcgggnaatgcaacatattttgtgaagaacacggngatgcggtctaacccaattgtgtattcttctacattttaatttgactaaa

SEQ ID NO: 6065 - DNA, 184 bp, Oryza sativa
  Clone ID: PAT_MRT4530_12791C.1
gctcagccggttgagcccttaaaatctgaccagtgtgttcagtatatagaatttgtatccggcattggtgcggcaacggtcgtactgggcagaacaaacaatagtaacaagcatacagtaacctgagcaatccacaattggcgcaacaacagtcagacagtgtaccataacatacatgagcaca

SEQ ID NO: 6066 - DNA, 1239 bp, Oryza sativa
  Clone ID: PAT_MRT4530_12792C.1
atgtggcggccgattcttctccagcctcgccgcactctcctctcccatctccggcgccgtggccacgacgcgaccgacgacgacaaggcggttcttcgcctcctccgcctgattggctcacggggctacgcctcctcctccgatgccaccaacgccgccgccgccgccgacatcgcggcacctcgagctgacagcaggaggcggcggcgttcaccggcggcgaaggcgaaggcgaagcagcatctgtacgtcgtgctgactgaccggaaggacgcgtgcgccatccacaagctggacatcgacggcggtagcggtggcgtcgacaacggccacctgatgaacgccggcggcggcatggcttcaccgaagaccctcccgcggctccccgagccgccgctcctccggctgcagagccccacagtccacccatgctccaagttcaccaccgtcggcagcagcatcgtcaccatgggcgagtatttcagcgatgattattacgacagcgattgttgtcccgaagccagagggaacacccttgtctacgacaccaagacggcggcgctcaccgtcgtgcgccacctcccggaaggccttgttgttggtgtctcccactacgtggccgccattgccgccggcgacaacaggctgtacgtgttcgatgcgaccacggtggacgactaccatgacggagtcgttggaggcatgcactgctttagactgaccgacgacgacggttcgaggaagaagaaagagcggtggtcatggcggcacccggacgcctccacgcccatctcgtggagctacgacccgtcccgtctcccgttcgacgccatcaccggcaaaatcgaggcgtacgccgtccacccggaaggacggaccttcttcgtgtccgtgcggaagctgttccgccgcgtgcccggcgccgtggacgacgagggtaccttctcctacagcgtcgagagcggcgcgtggacgcgccgcgggggatggatgctgccgttcgtcggccacggccactacgacggcgagctcggctcgtgggtcggcctccatcatagcgacgacgatgacgggcgcctctccgcctgccgcgtcgtgtccgccagacagcgccgcgcgccgtcggaggtgcaggtcagcaaggagaaggtgtcactggtggagaaagcgtttgtagtcccggttcgtaacccccctttaatcccggtttctaaaccgggactaccaatccgggactaa

SEQ ID NO: 6067 - DNA, 426 bp, Oryza sativa
  Clone ID: PAT_MRT4530_12793C.1
ttttgctgcacattactatacgactacatcaggtgtgtgactatacacgatgcgatgcacagagcatgcataaacacgtatgtataagacactgagctatattgagggttcttagaggtactggagatgcgcgcctgccatattctcttctatactcgaccttaattcactgtatataagcagcatgagcgtacttcttattaacttctaggatgaagatatttaagatagaaaatagttaataaggactaaactcctcaagggtggacaagctatgcatcgagagcattgaaacaattgtagcccaattgcaggaggttgctatcatgagttgccgatgcttatgttccctggatgacagctttcttgagcagaagcagcccatggtagctctaagaaacttgcacattcacaactttttttatt

SEQ ID NO: 6068 - DNA, 1464 bp, Oryza sativa
  Clone ID: PAT_MRT4530_12794C.1
atgtggatggaaatcgcggctgatagcctgggacaggagcccgcgcggcgcgtgagtggttcgaggagcggcggaggcggcgactggggaagtggtcgccggaggaaaggcgtcctccccggggctaccgaggggggcgtcgccggcgccggaggaggtgagctccgcggcggaggacttcgccggctggccggcggcgagcggccgaggaggagctgggcggaggtgcacgagctcctcgccggactaacgctagaccggctccgccatgtccgccgcgaggaggtggcgcgcctcgtcggctcgctcagctggagtgccaccgacgccgagcacgtcgacgtcgacgccgcgctgatgggtgtcaccagcaacatcgtccctcgcatggtgatgggccggcggtggaccggcgacgacaacgacatggaggagatgcggagcgtggtcgccgagacggcggagctcaccggcgatctcgccgtggcgaaggagacgttgcggctgcacccgacgccggccgcgccccgctgctcccccgttggctgccgcccgccgcccacgaaccaccagctgctgaggatccaaagcaaatggggatcatcagatcgattgctcatcggcgtactactggagatgatgggctccagggcaaccttgtcggcggttgccttgcaggatggatggattaaacgaaaaagtacaccgaaggtcgcccgccgcctgtgcccgcctgcgcgccgctccgccgcccgcgcgcggttcctccccacgccgcctgcgcccgccggccgccgcacgtcacgtgcagttgctcccccgcgcgccgcccggagattggagaaaagagaagagaggaagagaggtggagggagaggagggaagaagaggctgacggatggggcccacgtgggtctcacgctgatgtcgcggcccaacccgtccgtggcggcctgtgagacctacctcaaccaccccgtccagctcaatgacctcagcccagaagccttctcagagatcccccatgccatggcgctcctcaacttcctccgcactgaaccccacctggtcctctccctgtcgggcagcgccgatgacgaccccctgcccacaaccgaggtgctccaccgtgccatcctggagatgttggcatcagtcacggccatcgagcgatgcagaacgccggtgatcgcggcaatgaatggtgcttgcgttggcggcgaagggacgatggatgcgctggtggcacaatctatcgcaggagggctctggggagcgttgcccaagcgtgctcccatcgacagcaccgacttgcgccgctcgctgaccaatggcaatgccctcgccttagagtgggacctcaacatcgccgagccctacgccgcctgtccgcacatctcatgcgaccacaccagccgcatcaacaacatcgaccttcccgccgacaccaccgccatgcaatag

SEQ ID NO: 6069 - DNA, 546 bp, Oryza sativa
  Clone ID: PAT_MRT4530_12795C.1
atggcgacgggcgacgcgacagcgacggcggagcgtcgacgggacggcgacgcggcgatgggacggcgcggcgcggcgcggggcttggcgcgcggtgatggcggcacggcggcgatgggcgacgtgatggcgatggggcgtgacgcgcggaggggtggggatgttacaggggtggcggtggaaaaggagctgaccttgttgcttgacaatctcattagaggaagctcgccggagggaggaagagggagctcggtagagagaggccttcgccatcgtcatcaccagaggagcaccgctccactgtgtgccttctttttcattggagggagctcaccggaggagggggcttgccgaaggatgtggagtgacctcgccggagggttgttgtcattgcagccgccgttgtcgctcgcggtcgagagaaaaaggaagttgcaggctggaatgtggatcgaccacatcgtgatgattgggagcattcccaaggacagattggaaagtaaggatgtaaaatcaaggaggccagctgttccattttgcttttga

SEQ ID NO: 6070 - DNA, 1099 bp, Oryza sativa
  Clone ID: PAT_MRT4530_12796C.1
ctattgcatggcggtggtgtcggcgggaaggtcgatgttgttgatgcggctggtgtggtcgcatgagatgtgcggacaggcggcgtagggctcggcgatgttgaggtcccactctaaggcgagggcattgccattggtcagcgagcggcgcaagtcggtgctgtcgatgggagcacgcttgggcaacgctccccagagccctcctgcgatagattgtgccaccagcgcatccatcgtcccttcgccgccaacgcaagcaccattcattgccgcgatcaccggcgttctgcatcgctcgatggccgtgactgatgccaacaccgcatctccagaggatggtatcgtggagctgctctgttgtgtgaaaggggtcgtcatcggctctgcctgacagggagaggaccaggttgggtcatcacggtttcttccttcaatatgaaagaaaaagcatgtctttttaactgcagttcgaagtaagttaaagagcatcatactaggggggatctcagtgtaggcttctatgcttatgtcattgagctccggacgggactgttgaggtctcggacgatcgtttccgagctccacctgtcgtttgcaccgcggagagttcttcgtgaacaaaagcccgaatgaactccgccgactctgcgaccacgttccgcatctcctccatgtcgttgtcgtcgccggtccaccgccggcccatcaccatgcgagggacgatgttgctggtgacacccatcagcgcggcgtcgacgtcgacgtgctcggcgtcggtggcactccagctgagcgagccgacgaggcgcgccacctcctcgcggcggacatggcggagccggtctagcgttagtccggcgaggagctcgtgcacctccgcccagctcctcctcggccgctcgccgccggccagccggcgaagtcctccgccgcggagctcacctcctccggcgccggcgacgcccccctcggtagccccggggaggacgcctttcctccggcgaccacttccccagtcgccgcctccgccgctcctcgaaccactcacgcgccgcgcgggctcctgtcccaggctatcagccgcgatttccatccacat

SEQ ID NO: 6071 - DNA, 3462 bp, Oryza sativa
  Clone ID: PAT_MRT4530_12797C.1
atgttgaggtcccactctaaggcgagggcattgccattggatggcacggtggagcacctcggttgtgggcagggggtcgtcatcggcgctgcccgacagggagaggaccaggtggggttcctgcaagagctgaggtcaatgccgacaacggagagcatgacggtgcgcacagtgcggaggaagttgaggagcgccatggcatgggggatctctgagaaggcttctgggctgaggtcattgagctggacggggtggttgaggtcaccgaccaccgcgtcgagctccgcctgtcgtccccgccgcgaagatgtcctggtacacgagatcgccggtgagctccgccgtctcggcgaccacgctccgcatctcctccatgtcgttgtcgtcgccggtccaccgccggcccatcaccatgcgagggacgatgttgctggtgacacccatcagcgcggcgtcgacgtcgacgtgctcggcgtcggtggcactccagctgagcgagccgacgaggcgcgccacctcctcgcggcggacatggcggagccggaggaagagcgcatggagccgccgccgccgccgccgtacatccacatcgagaccaacgatttcttgcacaggaggcacaagaggcagaaagaggaggacatagctgtgtgtgagtgccagtataatctgctggatccggacagcgcgtgcggggatcggtgcttgaacgtcttgactagcacggagtgtacgcctggatactgcctctgcggtgtatactgcaagaaccagcgatttcaaaaaagccaatatgctgcgacaaggctggtaaaaactgaagggcgtggatggggccttttggctgatgagaatattatggtgactgaatttaccttgattttatggtctgctaatgttgttaaatatattcaagctggacaatttgttatggaatattgtggagaagtaatatcatggaaggaagccaagaggagatctcaagcatatgaaaaccagggtttaacggatgcctatattatctatctgaatgctgatgagtctatcgacgcaacaaagaaggggagcctggcaagattcatcaaccattcgtgccaaccaaactgtgagacaaggaaatggaatgttcttggggaagtaagagtgggaatttttgcgaaacaagatattccaatcggaacggaactatcctatgactacaactttgagtggtttggtggtgcaatggtgaggtgcctttgtggagctggcagctgttctggatttcttggggctaaatcacgtggtttccaggaggctacatacctgtgggaagatgatgatgacaggttttctgttgagaatgttcccctttatgattctgctgatgatgaacctaccagcattccaaaggacatcttaataaaagatgagccaaatacacaggatggcaacaacaacacaatccaaaatactgggattcctattattgcaagttcaagtgaattcacaccgatgaatgttgaaccatcgattgcgagttcaaatgagttcacaccgatgaatgttgaaccattgaatgtgagctcaaatgaattgacaccaatgactattgaaccattgaatgctattccaatgggagttgattttactcagaatggatcaattgaatatggtgcgcaatgtgctgaagatgctctgcaaaactcaacgcgtggagttgcaaacctccagaatcaaagtgcgccccgggacaacaaccatacagagttggttgcggtgaaacgtagacccacacttcgtggtggaaaagctaaacgtggtatgcgcaagcaactgaatgttgtgggtatctgtgatcggttagcatcagaggtggcacgtgaagaaatattgtattgcgaggaaatgaagaatgaagctgctgctgaaattgacagcctgtacgacgagataaggccggcgatcgaagagcatgagagggatagtcaagacagcgtggccacaagccttgcagagaagtggattgaggctagctgctgcaagtacaaagctgattttgatctgtttccattgttcaggataagtcgagtcatgggaaaatccgagcatggcaatctactggtatctctcagtgatgggctgccccattatagtcttgcagcagcagttggcctggcaataggagttgctgggttgtgcaaggcgctgcatagcagcttggtgataccaccagtttctcagaagaagttactttcgaactcagatagactttattacactggaggcctgaaaaatcttggcaacaattgctttcttaatgttatcctgcaggcacttgctagctgtgacgggtttgtttcctctctagataatttgcttggaagtgaggatgtgctacctgaggaaaagtccgaaaaaatgcctcttatttttgctctaagttctcttataaaagtggaaaataaagtgttggttcctgtgaccctagtggtctcaggaattaccgagcagtggtggtctggtggaatcgttacatactgtaatactgtaaacacgctgtcattggacttcgaaaatttctactgcttgcctctctcacctgtggctactataaatggagatattatcaatggatgtagtttggtggattgccttgagcactttacggcgttggagcatcttgacaactatcgttgtgatcattgttggcacaatgttgctgccaaatatttgtctcttaaatccgaagttgatgaggaaaaaattaacaaactacacacctgtgtcgactatggcacttgcagttgcaggcatatatttaccccggaggaaatgacatgttcgatatcttctcaggcaacaaagcagctggctatcactcatttcccaaagatcttgtgcattcatttgctacgcgcttctgttggtctagatggtgaatttgttaagcgtgggggacacatttctttccctttacttcttgatctttcaccatttgctggtggtgcattaatccctggacagggacctaaaccttcagcaatgaacaagcaaagacatggccagcaaactctccatctgtggcgacagctgaatgcagagatgcctgtgaatatgttccccgctgccactgatggggactcatcaagtcatcattgtggtgatgaatcaataaacacacttggacgctcattttacgtgggaaatagggatgcagatagtaggttcttgtcttcatcatcattgacagacaagttatatggcctctcatctgtcgtggaacactacggcgtatgtggaggtgggcattatgcagcttaccggagagtaacgccaaattcggattctaatgaaccagtgcaatctcttgcaagttttagaaaggagtggctttacgtctcggatgatcatgtgtcccatgtttcagagtgtgaagttttggcagcggaggccaccctgcttttctacgaaaggctgtag

SEQ ID NO: 6072 - DNA, 249 bp, Oryza sativa
  Clone ID: PAT_MRT4530_12798C.1
atggcacgggagccgcattggtcggatctggctgttggggatgagctcgtcggcgtgggacatcgttggggaggacaagcgtggtggccacctccggtgttggtggtggtcgccggagatggtggcagcgaggtagtggttgccgtggaggtcatgtcacctccgctgccgcactcagatgccgagatgtacgagtatgatgaggaggctgagaaggactacgaggaggacctccgcgcgcctggctga

SEQ ID NO: 6073 - DNA, 204 bp, Oryza sativa
  Clone ID: PAT_MRT4530_12799C.1
acagcgtgcggacgatcgacacctacaagcactacttcaccgcacaggctgcgggcgggatatacgtgtacctgaccacctacaacggggaggttttactaattgctaatgcactatgctaatgcggctgaactaactgcacctacactgaggttatccagatttatgtgaagtacacggtccaagggttggagatatacgctt

SEQ ID NO: 6074 - DNA, 201 bp, Oryza sativa
  Clone ID: PAT_MRT4530_1279C.1
atggagaaggaggcacttggggagatagaggtcaaccttaccggctgggaggctgaggtgatcgttgcctcgtcgacacgggtgatggagcgaacccgtcggcagaggcgtatcgagaaaatctcaagaagggggaggaaagaaggtgtgagaagaggaaatttcaatgacataggacggaagtactccctccgtccctaa

SEQ ID NO: 6075 - DNA, 1302 bp, Oryza sativa
  Clone ID: PAT_MRT4530_127C.1
atgaagcggcggaaaatccccaacccacagcagcagcttgggcagatttacgtgttaccacgacgacgacaaccacaccgcggactccacgctgcgccgtggccgcctcctccgcgccctcgtcgtgtccttggaccccgtctccaacatcatatcctcaacgccctttggtaccacaccgcctaccctctccccacacaccaagagttgccacaggacatctccgacacccgcgccatgtctcccgctccctcgacggcctcgtcaccctcctccgtgccatcaccaccaccggtgacacactatccaaacatgaggccgtggtccacgcaatgtgacctcaccgacaagctgcagcagcagcacaccgtgacgatgaccaagaagaagaacccatacgccgcagcagccgaggcttccaagcacccgcagcacaccgcgctcgggtcattcctcctgtccctctccggcgacggcgagaagctcgaccggctgcgccacttgctgagatccattaccgatggctctggccgtgtcatctccgatgctgattgggagcagctaaacgcaatgatgatccaagagcggcttatgataaccaaaaagattggcagaaaaagagcgctgcctcctccatctgctgctccacacgacttggcagaattatccaagagaaggtcagcctatgtgaagcgacagaggtttgctcgcagcaacctagaggaattgcttctcaaatattgcagacaacatccttgggaaccaaggtacaagcttgatgtcatctgtggactggaggaacccaaatcctatcactggagaagctaccatgctaacttcctggcaagcgccaatggcactaatgtgctcaatggtggtgaggcaaacccccctgtgcgcaaactgttcttcgccgaattctgggactcacaatctggtcgatttaacaaatcaaattcaaagcccatctgctctcctgttcaaaattataatgcatgtttcggtcgcctttgcagcttctgtgatgaaccaagaacgatattgcatccaccatgtgcaactggaagtcattctaatgacgatgacgatgctgatgccgatgtcattcctgactacaatgttgatgatgccattcgtatgtatggctctgttgcgcccgagcttagtgagggcagggacttggtagagtcagacatcatttattttgatcacgaaaaggatgctgctaatctcacacaagttctcaatgacccctccttcaaagaagaggacaataatttaggtcggaggaggaagcagtag

SEQ ID NO: 6076 - DNA, 3478 bp, Oryza sativa
  Clone ID: PAT_MRT4530_12800C.1
gccagaaatggatgggtttgaagccactagaaggattagagtgatggaaagagatctaaatgcgcgaactcctatattgggcgatgacggcagatgttatacaggccccacactgaggacgtgcctgaaaacgcgaaatggatggctatgtctccaagccatttgaaggggagcagctgtacagcgaagtagcgcggtttttcccaaaatcatgaccaagttgaataggaaggtttatatggaatgtaaattggtggaggatgttgccacgcaccgatcacatgccatggcacagaattttgtccaagatgctgtgttcccaagagaatgaagcacaaaaggtgtcgagatggaaccgcccatgttctgatctgtagtacaccatctgacctagaggcaaaattaactgcgcaattacatgagaacaagatacatgtgcagcaaaggtactcaaacaatttcttgaagtcaaggcgtgtgaaaatggcagctgcatattcactaactgcagaagaagcagaagtcgttctcgtagatgccctctgcctttgtaatataaacgtagggagagaaaatttttcctgtcttcttttttttttcctcgggaattttacggtgtacatattaggtgttggtgatatgtgcaggcaattccttggtatatttggatgtgtttttttttttttctgcaaggtttgtggaagctgtaaatgacacaattcaaaggtgaagcctttggtttcttccattgacatttttgacaagaatattgatgccgtaggatctcggctgttcttttgcaaaaaaaaaaaaaaaaaaaaaaggagcagttcgagcggcagcaagggtgggcgatcaagaagatgtactcctcctccaacaagaagcagtcgtcgccggggcccgggcccggcgacgccgccgtcgcggagatccgggagcccgccgaggagtacgccccggtcatcttcgcccaggacgcctacaagcacgtcatctccttcgacatgctctccgggaatgaggatcgggataacatattacgggctaggaaatctggcaagggtgtcctgactgctcctttcaagctactgaataatcgcctcggagtgatcttgacgtacactgtttataagtatgagctccctgcatatgccaggccacatgaacgcatccaagccgcgattggctatttgggcggcatatttgacatacaagcactcgtcgagaagttgctcaaacaactcgcgagccaggaatccatcatggtgaatgtgtatgatacgaccaacgagagcccgatcagtatgtacggtgatgatactgggagtggcatgtgccatgtcagcgtgctcaactttggtgatccgtcgagaaagcatgagatgcattgcaggtttgaaaaaaagccaccatggccatggctggcaataacgtcatcgtttggaactcttgtgattgctttactgactggtcacatatttcaagctactgtccatcggattgctaaagttgaagatgatttccacaagatgagcgaactcaagaagcgtgcagaagatgcagacgtcgcaaagtcacagttcttggctactgtttcacatgagatcagaactccaatgaatggtgttctagggatgctccaaatgctcatggatactgatttggacacgacgcagcaggactatgttagaactgcccaagctagtggaaaagctttggtctctctcatcaatgaggttcttgatcaggcaaagattgagtctggtaaacttgagctcgagacggtgccctttgatcttagaacagtttgtgacgacattttatctctgttttgtgggaaagctcaggagaaaggactggagttagcagtgtatgtctcggatcaagttccacagatacttattggcgatcctggcaggataagacaaatcattacgaatcttgtcgggaactccataaagttcacagagagagggcatatatacctgacagttcatgtagttgaagaggtcatgagttgtttggaggtagagacaggaattcagaacacaaacactttaagtggctatccagtagccaacagaagatgtagctgggagagcattcggcttttcaacagagaattacactcatctgagaagtcttttgcgcccatcgcatctgattcaataagcttggttatatctgttgaagatactggcgtcggcatcccatttgaagcccaatcccgtgtgttcacccctttcatgcaggtaggtccatccattgcccgcatccatgggggcactggcattggattaagcatcagcaagtgcttggttggtctcatgaagggagaaatcggttttgcaagtaagccccatgttggttctactttcaccttcaccgcggtgcttatgagggcacactgcaaaggaaatgacatcaaatcatcagaatttaaagggatcaatgcattggttgttgatcataggccagtccgtgcaaaggttaccaagtatcacttgcaaagacttggagttaagaccgaactgacagctgagctaaatcagttcatttctaaattaaactctggatcactgactgcaaagctagtgctaatagacaaggaaacctggcttaaggaatcccattgcacgcctcttctggttaacaaattgaggaataatgacaagccagactctcctaagttatttcttttggggagctctgcaagttctcccaagggcggttcagatacatccagggaacataacttgaatgtaataatgaagccgcttcgtgcaagcatgcttcaggtctcactacgacgagcactaggtggggtcgataaggtgcactgcaggaatggagtagttggcaattcaacattgggcagccttcttcacaagaagcaaatcattgttgtcgacgacaatatcgttaacctgaaggtggctgctggtgctcttaagaagtatggtgccgaagttacttgtgcagacagcgggaaaaaagcaatcacattgctaaaacccccgcacaattttgatgcttgtttcatggacatacagatgccagaaatggatgggtttgaagccactagaaggattagagtgatggaaagagatctaaatgagcgaatagaacgcggagaggcgccaccagaatgtgctagtattcagaggtggcgaactcctatattggcgatgacggcagatgttatacaggcaacacacgaggagtgcctgaaaagcgaaatggatggctatgtctccaagccatttgaaggggagcagctgtacagcgaagtagcgcggtttttccaaaatcatgaccaagttgaataggaaggtttatatggaatgtaaattggtggaggatgttgccacgcaccgatcacatgccatggcacagaattttgtccaagatgctgtgttccccagagaatgaagcacaaaaggtgtcgagatggaaccgccccatgttctgatct

SEQ ID NO: 6077 - DNA, 429 bp, Oryza sativa
  Clone ID: PAT_MRT4530_12801C.1
atgcgagggaatcacagtggtggtgctgctgcctcgcttcgcatgcctgtgaccgccacgccgcctaggagtcaccgtggcgctgctgctgctgcctcgcttcgcacgcctgtgaccgccgcgccgccgctgttcctcgccacctctatctacgcctccctgtcggtcgccgccactaagcactggctcatcaagccactgccgttgtctgttctatccgcgaagggtggagaagtagaccaccacgaggcaagcatcgaggccctgtatgcgtccctcggccagcggcgccgggatccctggccgccggtgattccgacgttcccggagagtccgattttgcaggagaagactttgaggaattccaaggccagcaaggcaagtcacacagatcccaaacaaccctttgagcatgttgatcctatttaa

SEQ ID NO: 6078 - DNA, 208 bp, Oryza sativa
  unsure (1)..(208): unsure at all n locations
  Clone ID: PAT_MRT4530_12802C.1
tctacaacggccaacccgcgctccctccttccctctcctctcctctcctctcctactgcgctctgctgcttcttgttccgccattgccacgagatcgagctcttcttgctccccaccacgcgccctcgatcgcttgagccctcccngccggngactncacgatgggtgacgaccacgacganggccgtgccttcccctgntcgtccga

SEQ ID NO: 6079 - DNA, 421 bp, Oryza sativa
  Clone ID: PAT_MRT4530_12803C.1
agaagaacattgaattttatgatttttgcttgaaccacacagacgcaatccataagaaccatgtccgttcgaaatacttgcattagagagcattacaaaaacccagctccacgtgaatgatggcctgttgaaagaaggaaaaagatccttatgcggatgattactgagccatgtccttcttggaacaatcaaacagccaaaacacacacggccagttggtgactgctcaaaggagtatctcacacaggggaaacaaacaccatatagggggacattaactatctgggggcagaatttatttgctatctattcttcaacttgactggaacctaaatgcttaccaagaacagcaatgaaccatgggagtggtcctcagtggccctgaagccttttgtcaatcaggtgcaccggggggcttgat

SEQ ID NO: 6080 - DNA, 150 bp, Oryza sativa
  Clone ID: PAT_MRT4530_12804C.1
atggcggcggcggcggcggcggcggtggagcgggtggcgaactggcgacgtgcagtgcgggcgaggcgaattggaaatgtgcctcctcgtgtcattcgatctctaacttgggctcttcatcgcgttgatggcctcatgggctccttataa

SEQ ID NO: 6081 - DNA, 230 bp, Oryza sativa
  Clone ID: PAT_MRT4530_12805C.1
gccactcacttcatgtggggtgggacttcatttacagtatggtgaattaataccctttgcgttatgcccagaaaaagaatagttcggctaaactttctttctttgatcgaatattttggaaactggctctaatgaggcagccattttgttgggcccgcctctgaaatgaatgattatcttcgaatatcctgttcggaaaggattatggctcaaaccaacttcttcaccac

SEQ ID NO: 6082 - DNA, 593 bp, Oryza sativa
  Clone ID: PAT_MRT4530_12806C.1
atttccatatgctatgtagataaacaactgatagctgaaagaatccgatgaatggttatgtatatttcttgcaataatgtatatacccgtcagatggaaaataatatttgaaagaaatatacatttccatatgctatgtagataaacaactgatagctgaaagaatccgatgaatggttatgcattctgaaaatgattgtgcgaatcaagctggccaaggacgtctaaattatacgagaaaaaaatttagtttatgtattaacaaggacatgtggtgtcctttttacctactgtttcctgttgttcctgctacttttgatcttattgcacttacctagggatacaaaatatctttggctctcagtgtcttgtaatttgcacttctctattcttatcttcccatacaagatttaatacattatcttaaattttgtcatatatctgacaccgtgactacctagcaattttccctttggaaagtataccaatacaaataatatatatgacgaaattagtgcacatgtgtattcgagaaaaaaatgatgaaaatggaaattgtaaatttgagttctcttttcaccactcaatccatt

SEQ ID NO: 6083 - DNA, 944 bp, Oryza sativa
  Clone ID: PAT_MRT4530_12807C.1
atatgcaatgcagttgctatcgccggtttcttgaacgccactcttgttatcccaaacttccatttccatagtatttggagggatcccagcacattcagcgatatttatgatgaggctcactttgtaaaacgtcttcaaaatgatgtacgagtagttgaaaaggtgcctgattttataatggagcgatttggccacaatcttagcaatgtattcaatttcaagataaaggcttggtcccctattcaatactacaaagatgctgttcttcctaagttgattgaggaaaggctcatcaggatttcaccctttgcgaaccggctgtcatttgatgcccctccagttgttcaacggttgagatgcttggctaattttgaagctttaaaattttccaacccaattgcgactctatctgagaccttagtctctcgaatgaaagaaaaaagcacggcgagcaatgggaaatacatcgcggtgcatcttcgttttgaggaggatatggttgccttctcatgttgtgtctatgatggtggtgatgaggagaagaaggaaatgaatgcagccagagaaataggttggagagggaagttcactaagcgaggacgtgtaataaggccaggagtgataagaatgaacggaaaatgtccactcacactttggagagctgagaagaacatggttcctcttcttgaaatgttccctctcctacagacaaaagaaactttagcatctgctgaggaacttgctccatttaaggatttctcctcgaggatggctgctattgactacagtgtttgtgtccatagcgatgcttttgtgactacacaaggtgggaatttccctcatttccttatgggtcacaggagatacttgtatgctgggcattcaaggacaattaaaccagacaaaagaaaactagccatactatttgacaatccacgtattgg

SEQ ID NO: 6084 - DNA, 696 bp, Oryza sativa
  Clone ID: PAT_MRT4530_12808C.1
ccggccgggacacacccgcacccggccgccgcgctgatctcccgccgcggcgacatggcgcggaactgcgccgccgacggcgccgggctccggccgccggggctccttgaccttctacgatacctcatcgaactgctcatggccgtccacgtactcgaccttggctactgaagatacaggctcggcaccgacggcgtaaggcagccggcgcggagcaagaggcagtatccgtccccgccccagcatgtgccctggtaatggattccattaggatctggagtactatggttgatgatctacagggtttccaatgcgaagtgaaagcgaggagaacccatgaaaggactagaaacggaaccagtctttcagagacttatgccacatgtaggctaaaagagagacgtcaggtgaatacaccggtgtgaaaagaagacattgcgatcataaatctgtacttagagactgaaaaggattgacatgaggagggctttaatgtcgagaccatcctcacggagacaggagttgtcatgggtatcaggatcgtgcaaggacatcgtgcgcatctttgtctttaatagactcacatgcagccgaggctttcaggctccaccacgctcgcttggatgtgtatgaacaacggaggtcctatatggaaaaaaggaaaaatgaggggagcttgcccaacagcttttgtta

SEQ ID NO: 6085 - DNA, 270 bp, Oryza sativa
  Clone ID: PAT_MRT4530_12809C.1
aagcttagaggcagagattggtatattcaaggtacttgtgccatgactggtgatggtttgtatgacggtttggactggttgagcaagaccgtctccaagaagaagtaatttatataggcaaacttccttgtatggataggttatctataaattattttttattttgcttttcttgtgattttaaaaatgtagcaaagtaaatgattgctgtagattgttatcctccccattttcttcattgaattgaatctcccccaaaaaaaaaagctt

SEQ ID NO: 6086 - DNA, 2160 bp, Oryza sativa
  Clone ID: PAT_MRT4530_1280C.1
atggcggaggagagagaaagcttcgagagtcaatgggcgccttctgatgttacagaggaaaatttgaaggagatggtggcgcacggtgttcttccggcgaaggagatcatcgaattcttccaagggattctggagttttatggtatcagtttgcatcacctaaaccccaattccatagtccatattgcaaacttcatccatgcttgcgaagctttcgtgggcatcagaccacattttgctctattccgccgcatcttcttcctcaagccccagccgaacaagagtaaaccgtgcgttgttgggggagccagttttcaactaaggggaactttaagccaaaagtacttctccatgcctttcaaaacctcgaacaagggttggcatgcaaattggttctatgtgcaaaaccccgagcccgcacttcccgagtactcctgtctttctccagtttatcaggacacctggaactcgcttcccatgggagatgaggctgctcaagcacttgccctgatggatcatatgctgaagctcaaagaacaggggcttcaaggggaacagatcacccgacattttatcaagagccggctagcaccaattaaggagagatctcgcacagccttcgaatttgatggcaagcatgaccctaaccgtgaagatccagaatatcttgaattcaaaatcatgaaggagagtgaatttgccttgatgaagtcagatcctccgattgctcaacgccgctcaccctgtcggcaaaccggtcaggctagtggaggccaaaaatccggtccgatactcaacctaacacctcacagtcaactaaccagtcagactcccgctggcaagaaaggggtgactgggaaacagccaagacaagctaacctgaagaagaaaacgtccagtcgtcctataccaaaaattaggaagtcatccaggaagccatctgacatcgatccttctggaaaagaccttgagccgactggcgtggagactggtcctacaacggaaatcgggctgactgccgaagatcgcccgagtagtaatcaaccagcaaccgacaatgtagaggccagcaacgaacccccgactggaaaccagtcagccgaagttggagtcgaacaaaatgaagacatcccggaagtggaggctcaaactagcagccctcctcaaaaggatgccagcaccgatccgggatcgagctctcctgttagggtggaagggcctgctcgtccccaaccagaagtcataacaggcccaatggttggtgatgaagaagaagtcctccggatacggtcggctgaagattctcgcccacccatattagttaaatggtgggatgacgaaatgcaaccacaaggaattgtgataaataaacaaaaggaagacgaggaagtatgtctgctgaagaagacactcagtcaggccactcgtcttgtaaatagaatccatcttaggaatgaggcaaagactgaaactctcgagagattggtcccccatcttggaaccctggaagcaaccagagaccaacttcgtgaagctaaggagcttgccagaaagactgagtatgaacttagggaccggattgccgagcttcaagactccaactttgagctgagtggttcatccaaagtggaaagcaatacagtgcaagctgccaagatatccgagctagaaaagcgaatcaaggctctggagaaagacaagggcgaactgacgaagcaaagggactcgtctcaattcgacgtcttggtcagcaaaatcaagaggcttgaaggagctagagatgaagtcgccaatgctactacaccactcgtccaagccatgtttttcaataacaatggtccaagttcatttgatgctgccgaaatctttgacaagctgagaattgctccggatacatattttaagaacatcaaagaagctggaagtatgggagcgagtctggcgttggcgatgaccaagtccttgtacccgaagattgacattgatgctgttgatggctttgcagacgggacaagtgaagaagccgcccttgacctcatcaatgatgcgcaaaaagctgctgacaagatagccgttgatgtagttgagaggttccaggacaacgacctaaggccgattgggtctgataactctgatgatgaaaaaactgaaactgattga

SEQ ID NO: 6087 - DNA, 516 bp, Oryza sativa
  Clone ID: PAT_MRT4530_12810C.1
gtaaggtgaagtgggtggcctgtatcacatatgtggccaaagtttcgaataaggatcccacgaagtctcgttaacgtcttagtgggtaaagccccacacgtgtgcacaggggaatagaggtgtccaagtcgttgtccagaggtcagtctggtctccacaatagtgtagtgggtgtcttatgcacaaagtgcgagtatgtcgcaagtctgtcacagaggaaagagggccgtcaagaggctgtcaaagcgcagttgatcgaggagagtgaggtgtcggggcagtgtcacgtcccagtccacagtaccacagagcgtatccacagacggtggtataagtgcggcgagaagtccgtctttaggtcggcctttgtcggagtaaagaagtaacgtaaagtataagtaaagttgccagcacaagtgtggtgttgtgcgtgcgtagtggtacgtggtcacaaggtctgtgttcgactaatgatgataaagcctctctttatcctaaaaaaaaaaaaaaaaaaaa

SEQ ID NO: 6088 - DNA, 451 bp, Oryza sativa
  unsure (1)..(451): unsure at all n locations
  Clone ID: PAT_MRT4530_12811C.1
gtcgctccgcgggagatagntgcacncatcatcatcttctcncccgagaacgggtgatttgggtttancttanctagctaaattaagctgcgtgnancatggggctcctcnaaacagctctgggacnacacggtggccgggccgcggccggactccggcctcagcaaactccgcaagtacncctcattctccccttcctcctcctcctcgacaatggcagcgtcnccatcncccatctcggaggcggcggcggcngacnactctcccgccgtgaccccancatcaccatcctccgcccgccggcgctgtacgtgacctcgncgggcggcactaatcgggnccccccaanccctcntcncnngccaggngtcncngantccccctccngnttttntttttttttttccccngcgnccttttccngangccnnnatccntgtcccncnccnat

SEQ ID NO: 6089 - DNA, 588 bp, Oryza sativa
  Clone ID: PAT_MRT4530_12812C.1
atgggtggccggcgagcggcgcgcagtcttctcctcttcacggcggcggggcacgacctcctcctcttcgccgcgccatatgctcggggccagatatgccgcccgaccagaggggaggctggaaccactgccgcgacgacgggggaggccgcatccaccgccacgagaatgggggaggccggatccgctactgcgacgacggaggtggccggatctgccaccctgatgacgggggagaccggatccaccgccgtgacgacggtggaggatgacgggggaggccaacagggagggcggcgatggtggcgggagggtgggcgcggatctgacggcgtcggtgcttgggcggccctccttggcggtgaaggaggtggatccggcggcggctggcacaacgacgacagctgctcccgtgatgacaatgacggttaccgtgatgatgatgacaacggctaccgcgactccaacccactcccctctactgcctggcgaccacggcgtggacttcggcaggcggcgcccatggtgaggtgtcgcgatggccgccggtggtgcttatggatgtggcggccagtggcaacattttga

SEQ ID NO: 6090 - DNA, 513 bp, Oryza sativa
  Clone ID: PAT_MRT4530_12813C.1
tcaccatgggcgccgcctgccgaagtccacgccgtggtcgccaggcagtagaggggagtgggttggagtcgcggtagccgttgtcatcatcatcacggtaaccgtcattgtcatcacgggagcagctgtcgtcgttgtgccagccgccgccggatccacctccttcaccgccaaggagggccgcccaagcaccgacgccgtcagatccgcgcccaccctcccgccaccatcgccgccctccctgttggcctcccccgtcatcacggcagctagcggatcccgcctccccgtcgtcgcggcggcggatccggcctccacgtcgtcgcggtggcggatccaacctccaccgtcgtcacggcggtggatccggtctcccccgtcatcagggtggcagatccggccacctccgtcgtcgcagtagcggatccggcctcccccattctcgtggcggtggatgcggcctcccccgtcgtcgcggcagtggttccagcctcccctctggtcgggcggcat

SEQ ID NO: 6091 - DNA, 645 bp, Oryza sativa
  Clone ID: PAT_MRT4530_12814C.1
atggagccactccatatcttgtttgagaaagccgaagatcacgacctccttgcaagtcttcaaagacacaggcgattcagatgttctctttatgcagatgatgtggcccttttcttgaagccaactcgagaagatttgctaacccttcgtgagattctctatgcttttgtagagatctttgggaggcttgggaatcctcaatttagagaagtttgccgggctctgagactcagatggctgtggtatgaatggaaagatgaaaacaagccttggattaatatggagaccccatgtgatgagcttgataagagtttatttagagcaagtactaagattacgcttggagatggaaagaaaacatctttctggcatgatttttggttgtccggatgtgcccccaaagacgtagcgccgtccattttcagacttgcaaaaaggaaaggaaactgtgttcaactcgaactggaaaacaatcactggctcacctctttgagactgatcactactttagctgaaattaacgatttggtgcatctgggcagccaattgcaacacatcgtcttgcaaaccaactctctggataacatcacttggaaatggacccaacatggtgattacacagcgaagagtgcttatgaggcatag

SEQ ID NO: 6092 - DNA, 1707 bp, Oryza sativa
  Clone ID: PAT_MRT4530_12815C.1
atggcggaggacgcccccagcaccgccgccgccgctgaggggagccaacacgcgtcggccgcggagggaggctccgccgccgctctcgcggcatcagtcgccaaggccgcgagggagagggatggaggcggcggcggcggggagctcccatgcgcatcgatccatttgccacaagcgaagcgactgataggccgccggttcagcgataaatctgtacaagaggacatcaagctttggcctttcaaagtcattgctggacctgacgaccggccgacgatcgtggtgcagcatgagggcaaggagatgcagtttgtgcccgaggaggtctccgccatggtgctctccaagctgagggacgccgccgtggcctacctcagcgagcccgtcacggacgccgtcatcaccgtccccgtctacttcaacaacgcccagcgcgaggctaccctcgacgccgccgccatcgccggcctcaacgtcatgcgcatcatcaacgagccctccgccgccgccatcgcctacggcctcgacaagatgccgccgccggccagcggcgccgatgcagctgggaggacggtgctcatctttgatcttggtggcggaaccctggacgtctccctccttaacattgctcgtccggggaacaacagcagcagcaacagcgacaatggcagcttcgagttcgaggtgaaggccgtcgccggcgacactcacctcggcggcgccgacttcgacaacgcgatggtgaagcactgcatcaacgagttcatccggaagaacgacgtggcggaagatggcgtttggagcaaccagaaggcgatccggaggctgaggtcggcgtgcgagagagccaagaggttgctgtccttcacggcgcagaccagcatcgaggtcgactcgctccacgacggcgtcgacttctgcgccaagatgagccggtcccggttcgaggagctgaacaaggagctcttcggcaagtgcgtcaaggccgtggagaagtgcctcgaggacgccaagatggacaagagcgccgtgcacgacgtcgtgctcgtgggcggctccagccgcatccccaaggttcagagcatgctccacgacttcttccaggagaagaagctccgccacagcgtcaaccccgacgaggccgtcgcgtacggcgccgccatccaggcctccatcctcaacggcgactccgacaacgccgacgccgacgccgacgacaagaagcgggtgatgatcctgcgcgacatcacgcccctctcgctaggggtcgagatcaatttcgatcacacgatgagcgtcgtgatcccgaggaacaccttcatcccgaccaagaacacgcggcgctacaccaccctctacgacaaccagatccgcgtgagcttcccggtgttcgagggcgagagcgcgagcaccctcgacaacaacctgctcggcaagttcgtgctgtccggcgtcctccctgcgcccaggggtgttccccagatcgacgtcacgttcgacttcgacaccaatggcgtcctgcacgtgttcgcggaggacatgggcacggggagcaagaacaacaacaccatcaccaaccacagtgggcggctgaagaaggaggacgtcgagcgcatgtcgcgggaggccaggagctacaatcggaagcgcaagcgcaccagatcatcgctccagatgaattctgggaacctggtgatcttggagtaa

SEQ ID NO: 6093 - DNA, 486 bp, Oryza sativa
  Clone ID: PAT_MRT4530_12816C.1
gcacgaggcaactctccaagcgtcatgctccagccatgtcaaccaccgcgaaattagcaggattgcttcgcgatgagcaaggtcccgtcgcgttcaacgacgccgtcgacgaggatgccgtcccggtggaaccactcacggagcacgacgacgccatctccaccatgtcggcggcccactgcaacaacatgcagttccgctgctaccgaggattctggatatcggagatgtgggcgccgggtgtggtcgccgtgcaccgcagcttcgcacctcgcgccgacgacgtcctcgttgcgagcctgcagaagtctggtaccacgtggctcaaggccctgactttcgccaccatggcgcgcggcgcgtggccgccgtccagccacgaccacccgctccgccgcctcaacccgcatctgtgtgtgccttctctggaggtcctgtacaccctagggcgcgacgctctgctggacatgctgccgtcgccgaggc

SEQ ID NO: 6094 - DNA, 4092 bp, Oryza sativa
  Clone ID: PAT_MRT4530_12817C.1
atggcggcctccaacaccaccaagaagggcggcggcggcggcggcccggcgatcggcatcgacctcgggacgacctactcgtgcgtggccgtgaggcggcgctaccgcagcgaggccatcaccaacgaccagggcaaccgcatcaccccctcctgcgtcgccttcaccgccgccgaccggttcgtcggcgacgccgccgagaatcaggccgcgctcaaccccaccaacaccatcttcgaagtgaagcgactgatcggccgccggttcagcgataagtctgtacaagaggacatcaagctttggcctttcaaagtcattgctggccgtgacgaccggccaacgatcgtggtccgccatgagggcaaggagaagcagttcgtccccgaggagatctccgccatggtgctctccaagctgagggacgccgccgtggcctacctcggcgagccggtcacggacgccgtcatcaccgtccccgtctacttcaacaacgcccagcgcgaggccaccctcgacgccgccaccatcgctggcctcaacgtcatgcgcatcatcaacgagccctccgccgccgccctcgcctatggcctcgacaagatgccgccggccagcggcggtgcagggaggatggtgctcatctttgatcttggtggcggcaccctggatgtctccctccttaacattggtcgtccgggcaacaacaacagcagcgacagcggcagcttcgagttcgaggtgaaggccgtcgccggcgacactcacctcggcggcgccgacttcaacaacgcgattgtgaagcactgcatcaacgagttcatcaggaagcacggcgtggcagcagaaggcatctggagcaaccagaaggcgatcaggaggctgaggaccgcgtgcgagagagccaagaggatgctgtctttcacgacgcttgccagcatcgaggtcgactcgcttcacgacggcatcgacttctgcggcaagatgagccggtcccggttcgaggagctgaacaaggagctcttcggcaagtgcgtcaaggccgtgaagaagtgcctcgaggacgccaagatggacaagaacgccgtggacgacgtcgtgctcgtgggcggctccagccgcatccccaagctgcagagcatgatccacgacttcttcgacgagaaaaagctccgcaggaacgtcaaccccgacgaggccgtcgcgtacggcgccgccatccaggcctccgtcctcaacggcgacgccgacgaagccgacgacaagaagcaggtgatgatcctgcgcgacatcacgcccctctcgctggggatcgaggtcggtctcgatcacacgatgagcgtcgtgatcccgaggaacaccttcatcccgaccaagaacgtgcggcgttactccaccatattcgacaatcagatcgccgtgagcatcaatgtgttcgaaggagagagcgcgagcatcctccgcaacaacctgctcggcaagtttgtgctgtccggcatcctcccggcgcccaggggagtgccccagatcgacgtcacgttcgagttcgacgccaatggcgtcctgcacgtgtccgcgaaggacatgggcactgggagcaagaacaacatcgccattaccaaccacagcggccggctgaagaaggaggacgtcgaacgcatggcgcgggaggccaggagctacaacaggaccagatcatctctagcatttctcaacttcattgagccgtggaaaggggacgcagctcctctgacaagggacgtggagccctcacaggtggggcctacatcatggactatggtccttgaagaggacggttcgttcctcgtcccatttgacccaaacgcctctgattgcggagatcagacgatggcggcctccaacaccagcaagaagggcggcggcggcgacggcggcggtggcggaggcccggcgatcggcatcgacctcgggacgacctactcgtgcgcggcggtgaggcggcacaaccgcagcgaggtcatcaccaacgaccagggcaaccgcatcaccccctcctgcgtcgccttcaccgccgacgacaggttcgtcggcgacgccgccgagaatcaggccgccctcaaccccaccaacaccatcttcgaagcgaagcgactgattggccgccggttcagcagcaaatctgtacaagaggacatcaagctttggccgttcaaagtcgtcgctggccctgacgacaggccgacgatcgtggtgcagcatgagggcaaggagatgcagtttgtgcccgaggagatctccgccatggtgctctccaagttgagggacgccgccgtggcctacctcggcgagccggtcacggacgccgtcatcaccgtccccgtctacttcaacaacgcccagcgcgaggccaccctcgacgccgccgccatcgccggcctcaatgtcatgcgcatcatcaacgagccctccgccgccgccatcgcctacggcctcgacaagatgccgccaccgccggccagcggcggcggtgcagctgtgaggacggtgctcatctttgatctcggtggcggaaccctcgacgtctccctccttaacattggtcgtccgggcaacaacagcaacagcggcgataatggcagcagcttcgagttcgaggtgaaggccgtcgccggcgacactcacctcggcggcgccgacttcgacaacgcgatggtgaaccactgcatcaacgagttcatccggaagcacgacgtggcggaagaaggcatcaggagcaaccagaaggcgatccggaggctgaggtcggcgtgcgagagagccaagaggttgctgtccttcacggcgcagaccagcatcgaggtcgactcgctccacgacggcgtcgacttctgcgccaagatgagccggtcccggttcgaggagctcaacaaggagctcttcggcaggtgcgtcaaggccgtggagaagtgcctcgaggacgccaagatggacaagggcgacgtgcacgacgtcgtgctcgtgggaggctccagccgcatccccaagctgcagagcatgctccacgacttcttccaggagaagaagctccgccacagcgtcaaccccgacgaggccgtcgcgtacggcgccgccatccaggcctccatcctcaacggcgacgccgacgacgccgacgacaagaagaaggcgatgatcctgcgcgacatcacgcccttctcgctaggtgtcgagatctatgatgaaaatgatcatacaatgagcgtcgtgatcccgaggaacaccttcattccggccaagaacacgcagcgctacaccacccaccgcgacatgcagaccagcgtgagcatcaaggtgttcgagggcgagagcgcgagcaccaagaacaactacctgctcggcgagttcgttctctccggcatcaccccggcgcccgccggcgtagcccgtatcgatgaaaccttagagattgatgccaacggcgtcctgcacgtgtccgcggaggacatgggcacggggaggaagaacagcatcaccatcaccaaccacagtgggcggctgaagaaggaggacgtcgagcgcatgtcgcgggaggccaggagctacaaccggaagcgcaagcgcaccagatcatcgctccagataaattctgggaacctgatgctgcagttgcagcaacagcctgcaaccggcatggaactattttggagcccggcggtgctcgtgtttgatctcggtggcggcaccttcgatgtttccctccttaacatcgatccgggggtcaacactgacatgggccggctcttcgaggtgaaggccaccgccggtgacactcacctcggtggagcggatttcgacaacgatttgttccgactattcggcatccccccggcgcctatgggcgtaccccatttcgatgtcaccttcgacattgatggcaatggcgtcttgaacgttactgcagaggacaaggacaccgggcggaagaacaacatcatcatcagtaaccgcagtggcaggctgaacaaggaggaaatcgagcggatggctctggaggccgagaggtacaagatgaagcggatcaagcaactgcaaatcgaagctgtccaagggaactaa

SEQ ID NO: 6095 - DNA, 262 bp, Oryza sativa
  Clone ID: PAT_MRT4530_12818C.1
attgccatgtcaggaaacatgaatgaacaacagggcatatactcaacacggcagcacaaaataaccagaaccatagaagtcaaactacatcacttacagcaagatatatacactttgcaacaaaacagggaacacccacccctaccaaacatgccttaaaatgcgaacaaaacgacctacacacctgatggtgaccaacagaccatcaggcacaaaacacaggaagaattaacgagtcattccataggcatgatcagaaaag

SEQ ID NO: 6096 - DNA, 1529 bp, Oryza sativa
  Clone ID: PAT_MRT4530_12819C.1
atggcggaccgaatccctgctgttgccgctgccattgccattgcctccctaatcctcgtcgttacgccggaaatggtctcctccggcttcattccacggttcaagctaagcccaaaggcaaataagcagatccgggacatattcaaggaccatgccgcggacttggccggcctcgccgcggacgccatccccagcaagggcgagggcgaaggcagcagcagtgacccaagtcaggccccggccaccaccggcggaacctacctcatcaccgtcggtgtcggcacgcctccgcagtatgtctacggcgcgttcgacatctccagtcagttcgtgtgggtgccatgcgaggagtgcgtgagcccctactcctgccccagcgacaaaaccggcgtttacaagacgctgccccgggagctttactcatgcggagaacagcgctgccggacaatcgtcgggcagccggactgcggcgcaccgtataatggcccatgcaaatacacctgcaggtacggtggtgcgggcggaacggaaacggaaggacacctcggcctccaaccgttcacgttaggtgacaacacgatgccagtcaatatgattttcgggtgtggcctcgaacccgaaacaaacttcggcgtgatcggcctaaacagggggagactctccctcatttcgcagctacaactcgggcggttctcctactacttcgcccctgaatacgacgacaccgccgccggcaacgcaagcttcatcctcttcggcgaatacgccgtcccgcagaccagcaatccccggtacactcagttttggtcctacgaaaacggtgcctacagctacctttacctcgttgggctctccggtatgcgagtcggcagcaacaacctcaacatgttgggtgcggggtcgggcggccgagacccactcgttgcgtacctcagcacctccgtgcccatcacctttctcgagaagaacgcctacgaccttctaaggcgggagctggtcagcacggtggggtccgacaccgtggacggctctgcgctcggccttgacctgtgctacacgagccagtacctggccaaggccaagttccccgccatggcgctcgtgttctgggacggcgcggtcatggagctgcagccgcggaactacctctaccaggacacggctaccgggctggagtgcctgacgatactgccgacggcggtggccggcgggctgtcgctcctcggcagcctgatccagacgggcacgcacatgatgtactacgacatccagatccagggccgcgggtcgctgtggttcgagtcgttcgaccagccgtccaagtcgtccaaccgggcgtcctcggcttcggctgccgcgttgccgcggatcatctcgacggctgcggcgatcgcctgttccgtgtggtctgtcgtggcgtgcatgttcgtgtgaactgcttgtgttgtgctacggatggactgagatatgtgttattagaactatctttaaaaaaaacttcccatttttttaaaaaaaaaaaaaaaaaa

SEQ ID NO: 6097 - DNA, 1730 bp, Oryza sativa
  Clone ID: PAT_MRT4530_1281C.1
ccacgcgtccgcaaacacaaacagatcgatcgctcctatcctctttcccccttctcctcgcgtcgcctccacaacccaaccaaccatggcgaggccgccgcaggaggcgatcgacaccttcgtcagcatcaccggcgccgacgaggccctcgccgtccgcaagctcgaggaacatggtggcgaccttaacacggcaatcaatgcacatttcaatgaaggagacagtacagtgaacagagccagtcaaaacaatatacctgagagtcatgatgatatgatggacctggatggaccacttgataatgcatttagaagatctttgttccctgaaactttgcgtgacccttttgcactgatggacacaaactttcagcaaaattattttgacagagttggttccacagatactttcggtcatggcccacaggtttcacaccctagagaggtgcgagagatacctatcgaagttaaggatagcaacccgcaaacaggcccttctggtcaggcccctattatcgaggatgtcactgggcatgaatcttcatatggtcctgaagttcgtggggctattgtaattgatgatgatgatgatgagcagccatctgccccttctcttcatgctaatattgatagctcattgcagccgaacccttctattccaactgcacctccattggttcatgttactgactatgacaatgatatcgaagagaaaatgatccgggcagcaattgaagcttcaaaaagggatgctgaggcaatgacaattacagcagagcaaggaataacacagccgccagagggagtaaacattacagaacattcttttgatgaagaggacaagggaactgcaagcggaacagctggaaggcgcccgagtctttatccccatgtagagcatgctccatcaccagcattaactgagcagcggttgttacgtgagcagcaggatgatgaataccttgcatcactccaagctgatcaagaaaaagagttgaaggccctacaggaggccgagcttcgtcgcctggaagaaactgctgcaagagaagctgcccttgaaaaacagaagcaagaggaagaggaaaggcgtaaaaaacaactggaggaagaggagctagagtccagtcttgcatccaaacaagcatcattgccgtcagagccagctgcagacgaggaaggtgctgtcacacttgtagtccgcatgcctgatggtagtcgacaggggcgtcgctttctgaaatctcataaacttcagttcctttttgatttcttagacattggcaggacttataagccaggaacctacagactggtaaggtcgtacccaaggcgtgctttcaccactggtgagggcgatatgtcatttagtgatctgggcctaacaagcaagcaggaagccttatttctagaaaagattacagaatagtgaagaaagatttagtcatggttagggacaccctcagaaagttgtgtttttacatttttttttatacttgcatcttgcttttgttagtaaaaatagtacaactggtttatggttcagttgagagtcctcttctgcggtgtgaaatggcggtgatgccgtgatgttgatacttctctccttttgagttcgatgttaatgtcagggtaaaccataaacaacatggagccaggatatttataggatgatgatacctttagttaaaaccatatgacattgttcgtttccaaaaaaaaaaaaaaaa

SEQ ID NO: 6098 - DNA, 476 bp, Oryza sativa
  Clone ID: PAT_MRT4530_12820C.1
gggccttttagtgtctgttaaattggaatggagccaatctaaatcctaacgagaatccattggaggcaagtctgggtccacaccgcggttaatccagctccaaatagcgtatatttaagttttccagttaaaaagctcgtagttgaccttggccggccgccggtccgcctcacgcgagcaccgacctgctcgaccttctccgcgatgcgctcctgccttactgccggtcgtgctccgcccgttactttgaagaaattagagtgctcaaacaacccatcgctctggatacattaccatgggaataacatcataggattccgtcctattgtttgccttcggatcggagtaaatgatttaatagggacatccggggcattcgtatttcatagtcagaggtgaaattcttggatttatgaaagacgaacaactgcgaaacattttccaagggatgttttcataatcaaaaaaaaaaaaaa

SEQ ID NO: 6099 - DNA, 570 bp, Oryza sativa
  Clone ID: PAT_MRT4530_12821C.1
tgcaggaattcggcacgagggtggtttacttctgttccactcaatatctgatgctaattaatttggttgtcgagctatatatgtggttcagtaaattttaccacccaccaagatttgtttctcagttttccttattggcttttatttttcttcttacatagttcgatgagttttccaaatctctactggttttcttgattcatttgggttaattggttaaatgtcccagcatcacaagccatgtagcagatggtaacaaaaatatgagaagggaacagaacatgaaaataaaacaggacaaaaaattggtacattgtacactgtaaagaataaatcagaaaatcgttggacttcatattttgttctagtttttggagttgagtaaacttttttctgtcagcatcttcaattttatataaattgaagctttcatttttatgcccttcatttcctgttcttttttttttttgcagtttatatctaaatatcttctgcataaatctgtttcctctgtttcagttgtctcttcattttatttctgcttttgtttgatatattcccttacatgtg

SEQ ID NO: 6100 - DNA, 385 bp, Oryza sativa
  unsure (1)..(385): unsure at all n locations
  Clone ID: PAT_MRT4530_12822C.1
tgaacgcacaccagggagtagatttgttaacatgacagaaatagaagtgggggtgccccccgccaggaagattatcntcccgacggcggggaaaataacggcaggcggggacagancattatttgccaagaaaaaggagagtacgccccacacgcaccggataggaccacgcggaattccagccagagcgagtagatatcaggacgccgagaaaggacgaggacagacatttcatataagcaccgcaagagacaacagaagcgatgcaaaaggtagaccctcggcgatacatagaaaaagccggaaagaaaaaaacttaccgcagaggaataaacacaagggaaaggcaagagacattaaagcgcatttttttgttaaaagatga

SEQ ID NO: 6101 - DNA, 150 bp, Oryza sativa
  Clone ID: PAT_MRT4530_12823C.1
atggagaaggggtattctagcatccatatcattggtacagagttgccaaagaggctagattcgatgccttccagggtcatgtggctagatatggccatggctagcatcggcaacccaaatctgggggtggtgatgaccatgaaaaaatag

SEQ ID NO: 6102 - DNA, 668 bp, Oryza sativa
  Clone ID: PAT_MRT4530_12824C.1
agaaatggtcttgtctggcgatactgggactaatttttcacagattatttataaggtctagcactgaacagaatgatgttcagtttagcattctcaatggtaagaattcaaaacagagcaccctaattgttacagttgacagactttatgcatcgggaagtaatgcatagttggctcgattcggttcatattatgcttcgagcccaaaattttgttgctaatattgttcaatacataagtgtctgcattaaaattatgcatttcagtaatgtcacaaatataaaataagtgcacatttcagagtcagcaaatgtacttgctggtattgttaaaactccaactccaaaaggacattcttgtgcagtgagaaatggtcttttaacaccaatatattgaatgctgtagttaattttggtgatcatggtcaagatttgtgatttaaaggagatcatcctattagagagagagagagaacaaagaatggttacggtttgttagtaagaacagcttgtcaggtcgtcaactgctttaaacttgtaaaactttactctctttaagatatttttaaaaatatatcatttacttaatttttaaaaatttggagtttggttgtgaggaagaataatttcctttgcaccttctagttattacaaataacaactgagata

SEQ ID NO: 6103 - DNA, 2099 bp, Oryza sativa
  Clone ID: PAT_MRT4530_12825C.1
ttgtttttttttttttttttttttttttttttttttttttttttaaacaaaaaccgggggggaaccggcagatacattttagatttgacttcgacatagatgataggcatagataagtatcatggatccatatttttttttattttttgagaataatatgaaatggatttggaggcgcaaagaatggcagcatatacaaccgactcaaatcaacaagaccaggagatgatgaccacaagtaggtcgacgcttcagacaaagaacacacaacagctgctgatcaaccagcaaatacagctgctattatttcacaagatagctcatttcggagaattacataacacggctctttgctaagatatacaatcatacaaggtaccatccatatttgataaagtagaaatcagcaattttaaaccttgaaggccagggatgagacttccatatcggcacgcaaacgcgaccgatatcatggtgtcctctctcttttcttttttcttttctgtactctatcctgcattagtttcagtctgtggtcattggccccgcaatacaacagcggaaacgtgccctgcggacatttctcataacctctatctcggcattctcaagcatgacaacgatctcggcaaatgatgggcgaacttcagggtttgcgtcccaacagcaagtcatgatcttgctcagagaatccacacaatcctgcgggattgcaggacgagagcccctgtttacgacagcaaatgcagcctgaacggctgtcatgtttgtgaaggggagcatgccggttataagctcccacaagacaatcccaaagctgtaaacatctactttatgatcataaggcctgtgctggatcatctccggtgccatccaacggtaggttcctgtctctggggtcattccctcagtttgtacctcaattcgagcaactccaaagtcagctatcttgatggatttgtctgctgaaattagaaggttatctgattttagatccctatggataaatcgcaaggcatgcacataagccatcccccgagcaacatcaagtgcctgcttcacagccagccccagaggcacagacttgttctgccttcgtgcaaggaattgccgaacagatccaccttttgcatattcagtaatgatacaccaaacaattgatttccggcacgccccaatgaaccttacaatatttgggtgcctcaacgtagacaacatcataacttcctgcacaaactgctgttccatcaattgagctctctctgggtcattctcaggcttttccagcagcttaatagcaacgtcttctccattgtatgttccccgataaagcttcccaaatgccccttgagcaaaaggagctcccatgtcgagcttacccagatcaatggtccactcctcgtaattactaagtatctccgtcggatggcttggatccatcaatacccgagccaatgcatcctcattcagagtaggcgccatagcccggttcggatggatgacgctattgtgaaccgaataactcggcgccggcatatcacggaggccagggtgtttgagcatgaccgtgcgggactcgtttgatcccacgctgctgttatccaccgacatggcaaccgaaccaccaacaaagttcatcatgttcaggttgtcggcgttatccacggacatgtgggagctctccccgaccttgtggtagtagggcatattgtggaagccattcatctcgttttcttgccttcctctgcaacctataccacctccaattccagcaccgcccaacatattctgaaaccttgacccctcaatcatcttcaaacaaccaacactaacagtagggttgctttacgaaacagtagaatcgctgaaaaacatccatttctcagttttcttcagtgctcccacggtatcgggatgcggcggaagcagcaggacgaacggcggcggcgcgcctcgcgggatcggcggcgcaggcggcggggcgagctcacgaggagtcggagtcggagtcggaggcgacgacgaggggaaggggaaatatcgtcgtctcgtcgaggcaccgcacaacgatctccttcctcgtgccgaattcctgcagc

SEQ ID NO: 6104 - DNA, 1819 bp, Oryza sativa
  Clone ID: PAT_MRT4530_12826C.1
cgggctgcaggagagaactagtctgagtttttttttttttttttttcttcccggtcccccgggccgctggttttcgtttctgtgtccgtcgccacgccggaatagtttgcttcgcttcacctttgcgttgtttgaggagcagccttcatcacaccactgcttcatccttctcgtacatcttgcgcgtactactggcgctttgtcctgctacgcctcgacgttctgctgccgctgctttgccactgctactgtttcacttgtatcatcttgttctctcggtctgtctggccgtttggccctttgaagtcctcagtttaccaccatatcatcgtaacatgctcacatcattttttttttttttcaaagaaactatcaattttttctttattaaacaaagggtagaagcagtgttaagaagatacctcagccaccaatgtgaatcataggtctatttgccgtcttagcaatatcaaacatcccagcatgtttagctttcttccttttaaccgcagcgcttattatttctctgagtccagcatcatcaacaccagctcgtataggctctctcaggctcacctctgacgggccaaataagcacactttcaagttgccatcagccaatagtcgtaatctattgcaaccagcacaaaaatgctgtgtcatcgatgtaataaacgaaattgttccagcatgaccatcaatcttgaaattcttcgcagtctctaacggatgatcttgaagtcattcatgaccgttaagacgttggcgcactttaacaattatctctgcataaggaaccaacttcttgacattccaaagataaccaacaaacggaataaactaaataaatctgacattgacaggcttgtctctcgtcatttcaacaaaatcacagatctcatcatcattcattccacgcatgacaacacagttgaccttgacagattggaatccaagttcaatagcagcatctatcgattccatgactctggagtgccctttacgccttgtcatgaactcaaactttgcagggaccaacgtgtccaaactaatatttagagcattgagcccacattctttcaatcttgggagcttcttagaaagaacaagcccattcgtggtcatcgcaagagttttcagtcccttcaagccggaaagatgcaaacagatatcttcaatatcctttctaatggttggttctccaccagtcaaccggatcttatccacaccagaagtaacaaaaagatcggcaactcgaatgatctcgtcgtgcgacaggagctctgagcttggcgtgagctcaactccttctgcaggcatgcagtactggcatctcagattacagcgctctgtcaaggagatcctcaggtagttgtgaaatctcccgaatgaatcgacgagcatgtctgacagtggcgcctcgcttggtgctacctctggcaaattagcacaagaagttgcatatgtgttggagaaactatgattatcagtagctttggttgaggagcaagtgctcatcaaacattggagcccagctctcatcgcatcaaccgcgtgatcaggccggcagcagcatcaacgtgatcagccggcaccgcggcgacggcgggccagctcggagaggcaacgcagcggcatcatcatcgtctgacacaaactatctatcccctctcctcctcgtaatccagcgactggcttaataaccaaaatcgtcactttctccaggaagtaaaaacaagaaactgctgcttttagcccccaagtccaatccaatgcccgccccccggcggctcacgcgacggcgcgcggcgacggcgat

SEQ ID NO: 6105 - DNA, 126 bp, Oryza sativa
  Clone ID: PAT_MRT4530_12827C.1
atgccggcgcccacgccctccctgtccttgtggcttctccccgtccagctgtctgcgtcgagctctctcctcgtctcctcttataccttcctaaagccaaaggagcgagcacaccctgctgcttag

SEQ ID NO: 6106 - DNA, 427 bp, Oryza sativa
  Clone ID: PAT_MRT4530_1282C.1
ggccgcaaaaattaattcccttgcaacggggaaaaagccgccgggcaaagaagggggaaacgactcgcaggggggggaggccccaaaaacggccaaacaccccaaccccaccaacaaaaaaaaagacgacccaccaaaaaaaagaggaccccgggaaaccaaagggaggcaaaagacccaaggggacccaacagcgccgggcacaacaaaaaccccgggggcagacaggagccaaccaaggggaaggaaccaaccaacgcgggggggcccaccaaaccgctggcgggccgcaagggcggaccgccgagggtccgccccccaccaaagggcgggccgaagcccccggggggccgggacgcccaccccgccccgggcggccggggacggccaaacggcgggggtgtgaatgggggggaggccggaaaag

SEQ ID NO: 6107 - DNA, 371 bp, Oryza sativa
  Clone ID: PAT_MRT4530_12830C.1
ctcctctgcttctcctgatctcctctgcttactagtgcttgctctgtttgtgttctgcttcggtgcttcgctgttactgctttctctgaatgtttcttgagttgctcgaattggatgatgcccttgtgcatgcgtgctgccggcgggcttgaccacgatcgccgactgacctgatagtttgacacccatgcttgacagtagaattcagagctagtagaagacagaggaattcagcaagtttctctatttgatttgctaactattgttcgctttctcttggaaatcagtccctccttttggttttcatcgatgggtacagtgcaattgcttacgccaaagcagaattcttttttaaaaaaaaaaaaaaaaaa

SEQ ID NO: 6108 - DNA, 267 bp, Oryza sativa
  Clone ID: PAT_MRT4530_12831C.1
ctaccacacgggagccgagaagacggtgttcgagccgctactaccctgcctgcgctggtgctctgctgcctcgtcaaaccaggaaaactggtggtcggggaagaaaactccgaacccctcctcctcagtgtaaacagaagcagcagcaatacagttgtcaaggtctgccggcgatcctcttgcgaaaacaggggtcggagaagaaaactccgccacctcctcaaccgataaaaatggcctctgccgtccaacggcgtccgacggcat

SEQ ID NO: 6109 - DNA, 1245 bp, Oryza sativa
  Clone ID: PAT_MRT4530_12832C.1
cggctggccggcctctcctatagcttagcttagcttgcgagacttcgttccactagtcttctcctaatttcttcctcctgcaaatatgcgtagtcttctgtcatcgtcgaccgtcaagtgtgtctctcgctgcacacggagatgcatgcacctcttgattgattgctcggtcgactgattgcttcttacacaccgcaactcgctctaattagttggtttagcctgtgtagatttgtagtattagaatcgtcacattcaatatgtattagatttatttattttgagacgagctagagccgcttgattattgtcgatcggtactagctagtgctacttagtaagccggctagtggagtactcaatctctgctactactcggctagcagctggctgctgctgcagcagtagaacatcaagagaggaggttaattagctagtacttagtaccttggctgctttaatgaactcgatcgatccacagctagctagcatagcagagcagcagtaatggaggagcaaagaggcgaggaggagtgggtgatgtggggatcggcagggagaagacgaatcatcaggcaatcggcgtcgtgggaggagcaggcgttcgcgcgcgatgcggcggccaacgccaacctcggcggctgcgtgtggccgccgcgcttctacacgtgcagcttctgccagcgcgagttccggtcggcgcaggcgctcggcggccacatgaacgtgcaccgccgcgaccgggctcgtctccgacagaggcagacctcctcctcctcctcccccagccaccaagaagaagaagctgaagcaccccaagatcagcaagctggcccttactatacctctttctctaaacctagcaccacctccaccgataatactacttgcagtaacgacatactactgctagcaagagatcaagaaaccatcaagaagagggtaccgagacagcaagtacaagtagttgcagatcaggacgaggacgaaccggccgggagaaggtacaagaggaggaggcttggtttggtggatcagctgccgtcgtcatgtgaaggaggagatcatcatcatcaggtactgatcatcacaccaacaacagccgccgcaagccctagctctataattgcttctgcttctgcccttgtggttggggatcagcagcatcaacaagcaggatcagtactagatctagagcttaggcttgggactagtactcctcctaaagctgttgtgcacgcttaa

SEQ ID NO: 6110 - DNA, 819 bp, Oryza sativa
  Clone ID: PAT_MRT4530_12833C.1
attcggcacgaggagaaaatggcggcgccgccaccgccggcgatggagccggagatcggccccgacggcctcgccagggagaaccccgtcatcgcctacaccgagaaggtgattttggaggagcagctgcagctgaagaaagaggaatgtgggattgaattgtatgagtgcgcactgtggtatggacttacatttaccaaaggagcaaggttctactcgttagagacaggaaatactttagctatgtctattttactaggagcttactcaaaaatgtgtatggtggcatccacacttgagcatttaagaaaaaagattgaaatatcaacagagagaatacggttggctagggtgaaagaggaacaggcaaagaaggcctgggaagctgctgcacaaattgttaaagacgaagagaatgctaagcagaatctatgtgatgatctgaaccggctggtccaagagagcgccgcttcccaattttcaagattagaggagctaaagaagcgtttagaatccctaaatcccagccgggcttctgttgatgtctctggtatgaatactgcacagcatgcaaccacaagttcagtgcctcagcaggctgcggcacaaaatcctcaaaatgcacctagccctgcaaataatgccaaccatgactccagcggactatcccagcagcaaagacctgccgatgcagaaaggaagagaagaccatcacaaatgggacgggggagagggggtgtgatgatcctccccaagggaagaggaagttcagggtcaggatggacaggtgctgggtttgatgtagatggccgtacatga

SEQ ID NO: 6111 - DNA, 386 bp, Oryza sativa
  Clone ID: PAT_MRT4530_12834C.1
tcggccagtcccctaccccagcaccacaaccagaccgacggccgcacattaccgcctcgccgccaagaccaagggtgtgtttcatcaatcctgctctttcgagccattcgcctcaccatcatagaggctgctgcatatgggttgccggtagtggcgacgaagaacggcgggccggtggacatcctcaaggtgctgagcaacgggctgtggtggacccgcagaccggcggcgatcaccccgctgtcagctgtcccgacaagtcccggtggttcggagtccccgcacggcctccgcaacatccaccgttctctgccgcaccactgccgccttaccttcccacgtcgccgccagtgcgaccacccgcaccgcaccagtgctccgcgtcc

SEQ ID NO: 6112 - DNA, 403 bp, Oryza sativa
  Clone ID: PAT_MRT4530_12835C.1
tcgttttaaaaaataaaagaaaagaaagaagggatagttaagagagatccggggaaatgacagagccgtcaccgccggcgctggagccggagatcggccccgacggcctcgccagggagaaccccgtcatcgcctacaccgagaaggtgattttggaggagcagctgcagctgaagaaatacattcaggagaactattccaaaattcgtgatgttgaaaaggagctagagaatctgagtttagaaatgaaactaacagctgggccaaagaaagcagcacttgtgcatttaaggaaaaagattgaaatatcaacagacagaatacggttggctagggtgaaagaggaacaggcaaagaaggcctgggaagctgctgcacaaattgttaaacacgaagagaatgc

SEQ ID NO: 6113 - DNA, 208 bp, Oryza sativa
  unsure (1)..(208): unsure at all n locations
  Clone ID: PAT_MRT4530_12836C.1
cggacnggncagcgnacgnctaggggctttaaggtgggttgcnttctcctccccctnntaacctttncctcctcggttcggttccgtggttcgtctagggttnagtgggttaaaatggcggcgccggatgtcgagtaccgntgcttngtcggcggcctcgctggnccaccaacgaccgctccctcaaggccgccttctccacctacgg

SEQ ID NO: 6114 - DNA, 459 bp, Oryza sativa
  Clone ID: PAT_MRT4530_12837C.1
atggcggtgaacaacagggaggaggagggcgagatgaacctagagctcaccctctgctacacccctccgccgtcgcccgagccacccttggtcggattcttcctctgcatgtactgcgaccgcaagttcgacagctcgcaggcgctgggcggccaccagaacgcgcacaagtacgagcgcagcctggccaagcgccgccgggagatcgccgccgcgttgcgcgcgcacggggcgccgcccgcggcagatggcgccggcgccgccaggtactccagcccagcagcagctcagaaggcggtgagcgtggaggcgcagcagcaccgtgcagctccgaaggtaagggaggaagcgcaccagggcgcttctgctcccgagctcggcggcatcgcgcgcggcaacagctcgccggagtacggcgtcgagtgcccccacgggctggacttgtctctcaggctgtaa

SEQ ID NO: 6115 - DNA, 393 bp, Oryza sativa
  Clone ID: PAT_MRT4530_12838C.1
gaagctgtcaaattcaaatactgtatatgtttatccattccttgcttgctgatcattcaaaagaagcttgaaggaaaaggattacccataatttgggagattttactgttaacggaatacgaatcatgtgtgttttacatatctcatccaaaaggagaatagaacaatgagaaacaagatggatgattggaaaacaattcttattagcaaccatcatttggttggttgtttagtcctctggatgtcttggaaacagaaaaccacgcctgtcagaccgaaatcatcctcaaataacggtacagaacataacaaccatcacttctcttctgtcaatcgcagcactagccacatcttgctgagttggcgccacgtatgttgggttgggtgtaccca

SEQ ID NO: 6116 - DNA, 886 bp, Oryza sativa
  Clone ID: PAT_MRT4530_12839C.1
ttatctatctgataaccaagattcagagcgtacaatatttcggaagagactcctttgacataaagtcagagggacatggtcattagcatgtagggaggctcccacgtccagctccctccatgagttcttggctccatgcgctttggtgggcttctcggagtgccggggcttctcccggagcccccgcggcgcgtcgccgcccttgggagacaccaggctcagcgccttgagcaccgcatcagtcttgagagcggcgggcggctgcgggggatcgacgaggaggttatgggtctggtcgaagaagaggtcgtcgtcgtcgtcgtcgtcgaaggcgtcgtcggggaggaggccggcgaggtcgtcgtcgtcggcggcggcgtcgtggagggcgagggagtcggccatctcgtcgagctgctggtgctcgtggaaccagtggtcgcggaaccaggcggtggtcttgacgaggtcccaccactgcggcgagaagtcctccacctgccggaacgccgccgggatgaagagcggcgcgtccgggttcagcgacgacaccgccgtggcgctcatccttccttccttcctcctctgtccagatcaagcggattcagatcggagacacatccaaagaagaaacaaaaaaaaaaaagaaaagcaaacgatgaatttccacgatccggaagatccgttcactctcgcggaaccgcagatcgcgaactgggctcaaaaaattgaacctctttccacagatctaccagcgtacacacgcagatctgagccgagcgagcagagaagcgattgctcaccttttttttttctcctttgcgatggcgacgggagcagggggagagaaaatatccgtggaatcttgggggagcggacgcgtggg

SEQ ID NO: 6117 - DNA, 788 bp, Oryza sativa
  unsure (1)..(788): unsure at all n locations
  Clone ID: PAT_MRT4530_1283C.1
gtcattcatggtcgcgccagcgacgccgaggccgtcgcggatcctgccgcgagcgtcgcactcccactcccagccggccgccgtcggcctcgcgtccgaccgcgccgccgccgccaccgtctcctcccgccgccgccgcaacttcgtcttcgtcgtcaacccctccggcgccaatggccgcacgggcaaccagtggaagcagctgctcccgcacctccgcacccgcttcgctgaccaatgcgatatttgtgagtgcatcacctcggccccgttcgacgccatagatatcacgagggaggctgtaaaggatggggctgatgccgtgattgctgttggtggtgatggaacacttcatgaggtcgtcaatggcttcttctgtaagggaagtcctgtccatgctcttgatcaaggacctgatcattccacagcgcttggtctcattccacttggaactggttcagactttgcaaggacatttggctggacaaatgatcctcatgaggcgattgatcgaattgtgagaggagtcaaatcaaaactagatataggtatgatggaaggcccagatggaaacccacattattttgttaatgttgctgatatccatttgagtgctaaggcgggtttatttttcttctatgtacaagagatttggcaacttatgctatgntttttggagcgctcagagccttttggggacatagaattcgagatcttagaataaaggtaaatggtgggagaatggaaaaccattcgtaaagtcactgcactatgncataggaaatgcc

SEQ ID NO: 6118 - DNA, 1061 bp, Oryza sativa
  Clone ID: PAT_MRT4530_12840C.1
gtttgcttttcttttttttttttgtttcttctttggatgtgtctccgatctgaatccgcttgatctgggactacccatcactcccccaagattccacggatattttctctccccctgctcccgtcgccatcgcaaaggagaaaaaaaaaagaggaggaaggaaggaaggatgagcgccacggcggtgtcgtcgctgaacccggacgcgccgctcttcatcccggcggcgttccggcaggtggaggacttctcgccgcagtggtgggacctcgtcaagaccaccgcctggttccgcgaccactggttccacgagcaccagcagctcgacgagatggccgactccctcgccctccacgacgccgccgccgacgacgacgacctcgccggcctcctccccgacgacgccttcgacgacgacgacgacgacgacctcttcttcgaccagacccataacctcctcgtcgatcccccgcagccgcccgccgctctcaagactgatgcggtgctcaaggcgctgagcctggtgtctcccaagggcggcgacgcgccgcgggggctccgggagaagccccggcactccgagaagcccaccaagtacgccggcagcccgaggagcggcggcgctccccgcgtcatccaccagcctcgctaggctgcgatggctaggatggcaaaaactaaaggatgtagcaaaagcattgcgtctttgcgccgcggtgttttgctttgcttccttcctcccggctgctgctgctggtgtggtctactcaaagtctgggtttgtccctagagtttatctaggaatttagttgtgtccttttgtatagtataaaccaaaatgaccctaaaaaaagtatgaacaaaatgcaacctttgttcagtgttgccttgtaagtttaatgttcatctagagttcgtctaggaaaattccaaaaagaagaagtggaagaagaatgtagtagtgtgcactcctgttaatgttctgatgatgtgcaatagcaagcagcctaatgttgaatattcagacttttctcaaaaaaaaaaaaaaaaaaaatgcggcc

SEQ ID NO: 6119 - DNA, 573 bp, Oryza sativa
  Clone ID: PAT_MRT4530_12841C.1
caaagttgcccataagggcccccctggtggcatttgccgtgcatgctgatggctgagggatgatggaggcactggactgggttgcctgtaaggatgggatgtgttggggtttggaaggatgtgatgctgtgaacttggccccaagatgtgctggataagctgtgcctgtggctgccccggagcatgggcatccaccggaaatggaggttgcggcctgcgggtgtgtggtgcagagaggggacccctggtgtgtggcccctgagtgtttgcaatgtgatgtgtgctgctaaaaaatggtgatgttgcttggtgcttgacactggcgctgcctgcgtgtgcagtgatgctgatgatgcgggtgctgtgtgagagccggtggacccgtggaccgtgaccatggtgaaagaactatgaggtgattgcatgccgtgttgaggagttgctataaatcgaatgtgtaatgtgtgatgcatggtgttggaacttatggtgccgggtttggctggtgggctgtgggtgcgaatgcacttgaagaaaatggatgttggctccctggcaaaaaaaaaaaaaaaa

SEQ ID NO: 6120 - DNA, 219 bp, Oryza sativa
  Clone ID: PAT_MRT4530_12842C.1
atgggagacatcgtcattatcatcggctgcgacactgctattgactggattaatgatatcatcatcttcatcaacatcctaccatgcctcttcggctatgcctactctgctgttgttgatgggctacttcatcatcatacccgggcttacgagctcaagcacaagggtcataccttcaagttggattttgttctagatacagacaacatgcactcgtag

SEQ ID NO: 6121 - DNA, 1806 bp, Oryza sativa
  Clone ID: PAT_MRT4530_12843C.1
atggcgcacgatccgagcctagggtacgcggattacttcgcggcggaggtggatggcaccggctcctcggagttgtatgggttgcagcagcatcagcaggtggttggggtggcggagatgttcggggtgagggggctcatgccggcagcgcacgcgcacgagcagagcaagggtgtgggcgcgctcgtcgtcggcggcggcggcgtcgatgatggaggcgcgacgacgctgccgacggtccacttcggcgggctcggcgagctgcaccagcaccaacaccggcagagccaggcgccgctgtccctctcgctccacaggccggaggcggccgcgacgtcgctgctgatgcagcagcagcagcagcacctccaccaccagccgtcgccgccggcgggcgcggcgtcgacgtggcagctgcagcagggtgcgtggcatctccgcggctcaaggttcctcctcccgacgcagcagctcctgcaggagttctgcagcctccccgtgaagagcaccaccagcccatcatcggcaagcaaggcaaccaaaccgccgcaagaagaggccgccagcggcggaggctcgtcgtcgtggaccgcgccgacgcagatccagtccatggacgcggccgagctgcagcggctcaagggcaagctctacaccatgctcgaagaggtggataggaggtacaggaggtactgcgagcagatgagggcgctcgcggcgtcgttcgaggcggtggccggggagagggcggcggcgtcgtacacgcggctggcgtcgaggacgatctcgaggcacttccggagcctgagggacggggtggtggcgcagctgcaggcggtgcggaagcagctcggggagaaggacacggcggtgcccgggatgaccaagggcgagacgccccgcctccgggtgctcgaccagtgcctccgccagcacaaggcctaccaggccggcatgctcgagagccacccatggcgcccccagcgcggcctccccgagcgcgccgtctccatcctccgtgcctggctcttcgagcacttccttcacccaagaatgtttgccggtttcgtgacgatgctcaagctctcaccgcggtacccaagcgacgtggataagcacatcctcgcgaggcagaccgggctatcacgtagtcaagtggcgaattggttcatcaacgcgagggtgaggctgtggaagccaatggtggaggagatgtacgcggaggagatgaaggacgaggagggcagtggacagtccacgcaggcgagcaacccgcagaaccctaaccctagcagctacacgtcggaggtgcgcggcggcggcggcggcggcgaggaccgcggcgagcagaagccgtcgcgggcgcagctgctgcacgacgccggctcgctggcctccgtcgtgagcatcgggcacggcggcgcgggacggacgatggtcgatcaccaccatcaccagagccttaattttggcacgatggaccagctcgacttcgacgcgtacgaggcggccggcggcgggcaggggttcggcgccggcggcggggtgtctctgacgctggggctgcagcagcagcacgcggacccgcacgacggcgtgaacgtcgcgttcgccgccgccgcggcgccgcccaattcgtccggtgtcgccgcggagtacctattcatgggcggcggcgagcatcagcagcagctgcctcaaaccgcccagttcggcgccgtcatggaaggcgacgccgcgtcgcactaccgtggcctcagcgccaccgccgccgggttccacctcctccacgacctcgccgggtga

SEQ ID NO: 6122 - DNA, 381 bp, Oryza sativa
  Clone ID: PAT_MRT4530_12844C.1
catgacgggttcacaccaaagccctcccccaaacccaggccaaaacagaaaacaatttaaaaaacaccaggaaaaaaaaaactttttttccagcaacttttttttttgttaaaaacagcggcagcttacttttaacaggtaacaaccccgatcacaaactttttgctgaaacctttgaaaaacacccgacttaaaatcagtttctaccaccttaattaattagctgggtgccatttaatccccataatccatgggggggggaagctcaagctcaacctcagggttggccctccttttgttgacaaccctgcagttgagcctgaccttcccctgcgtggtcccggttttaacctggatgccgcccattttaaccatggcctt

SEQ ID NO: 6123 - DNA, 243 bp, Oryza sativa
  Clone ID: PAT_MRT4530_12845C.1
atggaggacgacgacgacatcgtggcggttgatggcggtggcagccggttgatggcggcgcttgaggtgaaggcactgcttcaggcctcgctgccgcagcatctgcttcagatcgatgctgaagagacgaggaagagaaagatagatacgaggagcatgcagcagtgctgcacaatgggggatagagatctggatggaggtcaggtggtggttgctggaactgggaaggaagttgttgggtag

SEQ ID NO: 6124 - DNA, 267 bp, Oryza sativa
  Clone ID: PAT_MRT4530_12846C.1
atggagatggagacaacactggtgtgcgcgtgccacctcgctccgtggcgcactacctgggccgcctcctccttgacggttttgaggaactccttggactatgccaacgtcaacacctccatcaccgtagtcgtcgttgttgccaccaccgtgctcgctacaaccgtagtcgttgtagcagtcgtcggaggccccatctggcacccccgaggtagcggcaaccagatcagatgggggctggtgcatgggaagggggtgaagagctag

SEQ ID NO: 6125 - DNA, 475 bp, Oryza sativa
  Clone ID: PAT_MRT4530_12847C.1
ctcaacggtgaatgctggcgcggctacggggacgacgagcgcgccggcgaggtggcggcgctcagcctgtgatagccagctcatctcgtgctgcggcggctgctagcggataagattgatttattttccaagttcgacatggataagattgtttgacttacagagatatataatcaagatatatttctcaatttgtgtatataggggttggtcttgccctctacaggccctcctccatgtccaactcggggtagaaaccaaaggaaacccgaaacatgtcttcccgagcaaggaaaccccaagacccgacgaaacacaatcggactcggtcctgccggtcagaccggccgcataccgccggtctgaccagccctcaaccggcggtctgaccgcctaacacacggcggtcagaccggcccactcggaggaaaccggtagacttccaaattttaccggcggcatgcggccggtcgga

SEQ ID NO: 6126 - DNA, 339 bp, Oryza sativa
  Clone ID: PAT_MRT4530_12848C.1
atggttgcactaggaggctgtatggtccaatgtgacaagcgggaggaatatgagttgagcgtccgatgtgtcggatcaaataataagcataatacttacatcgcaagaagccaagaatccacggatgtagcggtcgtcacggattcacagtcgctggctcactacctccccgatggagacggatgcggctggcgggatggaggtgccgaggcggtcaagcggaggcggtgcaatggatgcacgcggtggtggcgtgatggaggcggaggcaacgctgacacaatggaggcggagggcgggggcggcgccggcgtgatgcaggcggaggcggaggcatga

SEQ ID NO: 6127 - DNA, 330 bp, Oryza sativa
  Clone ID: PAT_MRT4530_12849C.1
atggtacgtgatctccgttgccctcttgaagcatgggagctcaaggagatcagtgtcctcatcatagttgtcgaacatgtcaatcccatgcgacacgaagaggtgaaatcggctagagagcacacgggtgcggatggcctcgaccaagggcaagaagacaaggatgtggcggagaagctcgtcggcaagggagctgatttggtcgggaccctcgtaagcactaccctttctgccagatccgccgtgggcagtggctacaaggatgcatggagcacacgcgccggcaactgtgtggctatcgccgcgagccatggggagaactcttgctag

SEQ ID NO: 6128 - DNA, 429 bp, Oryza sativa
  Clone ID: PAT_MRT4530_1284C.1
atggccacagccgcagacgccagggggggcaccaaaccccgccgggcacgccgccaacgccggggagcgcgcctccgcgccggcgacctccgcaaggcgcacaccaccgagaacgcccgacgagcgccgctgcggagcaccgtcgcgccggctgccatcgtgccgactacccccgtccaaacctcgcgaaaaacgagcgccgaggtcgccaccaccatcgttcgcagcgccaccaccctcaccgctagcaccaccgccaccggccgggtcgacatcgccagacgccgagggggccgagaggcagaccaccgagcgcacgtggagaaggacccgataccggagaaggcactgggagcccaacgtcggctcgggaatgagaagaagacgagccttgggaatggcggccgggttggcacaagtggaaactaa

SEQ ID NO: 6129 - DNA, 531 bp, Oryza sativa
  Clone ID: PAT_MRT4530_12850C.1
ttttttttttttttttttttttttttttttttttttttttttttttttttttttttttttttttttcttttttttttttttttttttaggggaaaactgggaggacttttttattcaaattgggatcaccccgaggtttcaactgggcccccccgaggaggcaggactttatttttctctccgggcccactaaacggggacaattcaatccccgatccccccggcggggggaaggccccagggggccgggggggacctgggggggatcccccttttgggcgggtgggttagggccaacaaacctggggctggggcttgcctttggtcgaaggaaacccttgcaaacggggggacccggagctggggcccaattgccggaacccgggtaagggccgggccgggaacaaggggggcgaacttccgggacggggggccgccctggggggggggggactggggggtttctcagggggaaccccgggggttggggaaaaaagggggggtgccccctggggcgggcctgggggcctt

SEQ ID NO: 6130 - DNA, 4002 bp, Oryza sativa
  unsure (1)..(4002): unsure at all n locations
  Clone ID: PAT_MRT4530_12851C.1
ccggctacacgacagtattatgtggttaacccggccacacgacagtgggtacaattgcccccatgcccaagttcgcatccagggatgtacagaaactccgacacccaacggagaagcaagatccggagctagctcaaagtgcactcgaggatgccaaaactgaactacatgaggaaaaagatcgtaaggggggaaacgcaaggtgataaccgacagtgatccgccttgtcttttggatccccatagcgacagtcctcaatgacaatggtgcccgatacataaaaccaaatcccatacactggaagagtgccacatcttcagaagggcgttggcacggaaacaagcggtggaggaggaagagacgcataccgacgaagcaggaatcaacatccactcttccaataacgcaccggcatgcgacccctgcgtctcacacatctttggcggttctacatcgaatttctcaaaggagatacccaatagtggtcgagcccactattcagaatattacagttgcccgcgtactcgtcgacggcggcagtttgatcaacctcctcttcaccaacaccctggatgcaatgggaatcccacgaagcgagctgacaccgtcagatcaaccattccatgggattatcccagaatcttcgtcaaaaccactaggcaaaatcacactagccgtcaccttcggccaggccgacgtccgaacggaacaaatcaccttcgatgtcgccaaattcaatacgacatataacgctatcttaggaagaactgcactcgcgaagtttatggcagcttcccactatgcgtaccaattactcaagatgccaggaccaaaggggataatcactgttcaggggaacgcgaagctcgcagtgcaatgtgacaagcggagcctcgaaatggtcgagcacactcccaccatagccgccacagttgagctacccaacaaagtgagcaaacccaacaaagccccacgacctgatggagcgaccaaaatagtttcgttggctagtacgaaccccgacaaaatagaactcgagctcatcaccttcctccacgataacacggacatcttcgcctagcaaacgtccgacatgccaggggtccccagggatgtgatagagcacaaactcatggtgcgaccggatgtaaaactagtcaaatagaagctgtgcagattttgcaccatgccggaagcatgcgatacaagaagaactcgataagctactcaaagcaggcttggtcctcaaggccaatggaaagtggagaatgtgcgtagacttcactaacctcaataaagcgtgcccaaaagatcacttccctctgcctcgaatagactagttggtggactctacagctggatgcgaactccttagctttctagacgcctattcgggctaccaccagatcagcatggccaaagaggatgaggagaagacgacattcataacacctttttgagtttttgctacaccaaaatgcccttcgggctcataagtgcaggcaataagtaccagcgtgagatccaaggagtcctcggtgatcaaataggggcacactcatacacgacctgtgggaaactttcgacaaccttctatgagatcgactgaagttgaacccggagaaaggtacttttggagtatgatcgggaaaactactcggtttcctcttctctggaaggggcattgaggccaaccctgagaaaatcaagcccatcaaaaatatgaagtcacctacaagacttaaggaagtctagaaattaactgggtgcatggcagcactgagtagctttgtcacgaggatggcagagcggggccaacctttctttaccctgctcaaaaaacaggataggttcgagtggacacaagtagccaaagatgtgttcatcgtgctcaaacactacttgtcaatcccccggtactggtcgctccccaaccaaacgaagaccttcccttatacattgctgcaacaccctattcagtaagcacggtcatcattgtcggaagggagaaagtgcacacctagtgtactatgtcagtgaggccctccacgacaccaagacacgttatccacagatccagaaacttctctatgttgtggtcatgacatcgcggaagctacgtcactacttccaggcccacaaagtgacggtcgtctcatcctttcccctgggagaagtcgtcaggaataaagatatcatcggtagaattgcgaagtgggtcgtagaactctgccagttcgatgtccacttcatactgagaacaaccatcaaatcataagttgtcgctaactttgtagctgactggaccatccccaaaaatagaccagttagccagacggataatgagacttggaccatggcgttcgatggcgcactcaatagccagggtgtaggagcaggcttcattctcacatctcctacaggggataagttcaagcacacaatacacctcgacttcagggccacgaacaacacagccgagtacgagggcctcctcgcaggaattcgagcagcagcagcacttggcgtgaagcggctaatagtcaaaggagattctgagctagtcgctaatcaagtgcgtaaacattacaaatactctaatcctgagttgaccaactatctcgctaaagtccgatggcatcgaagtgtgacatgtgtatcataaggataacgtcaaacccgacaatttagctaggcgtgcatcacgaattgaacccctcgaaccaggagtattcctcgacgtgctgacaaagccatcggtaaaggaatcccatgaagaggaaactccgacatcggccaatgtcttggaagctgtgacgactattgataacattgtcgcctccatcaagaaaccagaagactggcggactccgctcatcgacttcttgggcgccaataagctaccagaagatgacgctcaggcagaaaaactatcccgtcagacaaaaatttattgtctaactgacaataatctatataaaaaggccccgaacggtgtgttgctcaaatgcgtctcgactgacgatggacatccacgaaggcatctgtggatcacacgccgatgggcgaacccttgtcggaaaagcctttcgataaggtttttttcggccaaccgccctcaaagatgcttgcggcatgcaaacacacgaagatgacagcacaagtgctccaaaccgtacccctcacatggccgttctcgtgctgggggctcgacataatcagaccaattccaaaaggatgaggcaacaaatgattcttgtttgttgccattgacaaattcacaaagtggatcgaggcagagcccacataagagatcaaagtagagaacgctatcagattcatgaaaggggtattctgtagatacggattacctcatcgtatcatcacagccaatggtcctcagttcatcagcgcagattttcaagactactcgatagaactagggatcaagatttgctatgctttagtttcccaccctcagagtaacggacaagtcgaacaagccaacggtcttgtgctccaagggatcaagaccctcttatgggccatccacaccactccaactttgtccaacaaagaaacactgttctttctcgtgtacggctctgaggcagtactccctttagagttaagacatcagagcacatgagtccaaaattactcaaatgaggaacaagaggaaaggcacaacgactatgtgaatcttctcgaagaacatcgagaacgagttgccatccgagcagctgcataccagcagtccctagtccctatgccgatatcaagagaaacgtgttcgagcccgcacacttgccgtcagcgattatgtcctacgacgagttcaatcccaagcagggaagaacaagctttcccccaaatgggagggnaccatacacagttggttcgagtatggccggccagacgcctttccaaattgcagatggtgaaggacccggtttatctatttcttggaaacattgatatggtaccgtaccttttatgtt

SEQ ID NO: 6131 - DNA, 311 bp, Oryza sativa
  Clone ID: PAT_MRT4530_12852C.1
agccgcgcggcgtagtcggtaaatactcgtcttctatccggtttccactcgccgccgccgccgcccctctcgctggacgccgccggcggacgatggcgctggcgtccagctcgctgccggatctccggatatacgagccatgctgtgttggcctcctcgggttggtctccaacatcgtcatcaacactctcaccccctcctcctccgcgatgcccgatccccaggcgaccacgcaggagcttgcggcgcggccgctcgacggcatgaaggccttcctcgtccgcttgttccccgacttgagggagtggtag

SEQ ID NO: 6132 - DNA, 276 bp, Oryza sativa
  Clone ID: PAT_MRT4530_12853C.1
atggcgttcgatggcgcactcaatagccaaggtgtaggagcaggcttcattctcacatctcctacaggggataagttcaagcacacaatacacctcgacttcaggggcacgaacaacacagccgagtacgagggcctcctcgcaagaattcgagcagcagcagcacttggcgtgaagcggctaatagtcaaaggagattctgagctaggcgctaagattacgtcaaacccgccatttagctggccggcatcaggaattgacccctcggaccagtag

SEQ ID NO: 6133 - DNA, 746 bp, Oryza sativa
  unsure (1)..(746): unsure at all n locations
  Clone ID: PAT_MRT4530_12854C.1
cataagagatcaagtagagaccgctatcagttcaatgaaaggggtatcttgtagatccgaattacctcatcgtatcatcacagcacaatggtcctcagttcatcagcgcagattttcaagactactcgataganttagggatcaagatttgctatgctttagtttcccaccctcagagtaacgaacaagtcgaacaagccacgggtcttgtgctccaagggatcaagacccacgtctacgataggcttatgtcttatgatacacaatggtcgaagagctcacatccgtcttatgggccatccacaccactccaactttgtccaacaaagaaacactgttctttctcgtgtacggctctgaggcagtactccctttagagttaagacatcagagcacatgagtccaaaattactcaaatgaggaacaagaggaaaggcacaacgactatgtgaatcttctcgaagaacatcgagaacgagttgccatccgagcagctgcataccagcagtccctagtccctatgccgatatcaagagaaacgtgttcgagcccgcacacttgccgtcagcgattatgtcctacgacgagttcaatcccaagcagggaagaacaagctttcccccaaatgggagggaccatacacagtggttcgagtattgcggccagacgctttcaaaattgcagatggtgaaggacgcggattatctaattcttggaacattgatatgttacgtaacttttatgta

SEQ ID NO: 6134 - DNA, 2193 bp, Oryza sativa
  Clone ID: PAT_MRT4530_12855C.1
gccctcctccattgctagcggcggcggcggcgaccggcgatctcgcggcggaggcggggcggcggctacttgccctaccgcgagcatcatcacgagcagcggtggcgatggcgacgccctcccccatcgtgtgcggccacggcggtgccctctcccaccgctagcgacggcgacgacggccttctccaccgtcctgttaatgccaaaatttggtaagccccgaagtcatcatcggcccagagtcagtatcggcttcagagttatggaatcggccgatgggatttgtcaagtcgccagcagtcggattcttgatatatccacatgctttttgattttcaataagggtttcatcggggtttcagccgatttcatgacatcggtcctccagccgatgtatgctttaaccttcggatcattgtttattctatcatattattattagttgattgatttctactggattatattgttatttatcatcatcagtcgattgtctttatatcattatctatattggatatataaccgatagctcaaaacactattgatatcggttggcatcagcatggactgaactactccatcggctccttgctgctcctcgttgacctcctccccggcctcctgaacttgttctctaagttcctcttcctcctccttaacctcttcctcctcaatctcctcttcttcctcctccacaacctcttcctcctcaatatcctcctcttcctcaacttcttcctcctcctcctcctcctcttcctcctcctcgtcgctgtgaagctgctcgtcaagtgataaacaagcaaacttttctgacatgactatgtcttgtgcatcaagtagtgatttagttgtgttccctacgaacggggcctgaggtggatcctcgggaggtggaggaggagggtagccatggccaaacccaccaaagaagtcgtactccggaggaagatcaacaaagggatcctcgatgtcatcctcaggcccatcgggctcagcctcatagcctggtggggacggtggagcacccaactgaaaccgagagtagaggtgcgcctgtgtttgctttgctcgccgggatgccttcttgattttgtttcgcgccctgcgattctgtttggcctgctcaggaggaggctgagtggaggaagacgggatgtcccgagtaggcggccaagaggatgaggtgggtatgtcaggagccgcagagcaagccttgggcactcgcagagtgagataggaatgggactcctcacaaataaactgggtttgagtgacatgctcgatcatccgcatcaggtgaggggcaaaaggaagcgccctcctgtactgaatcgaggccatgcggatctcctccaacacaaagttgtaagcatgaaagggattgccagtaggattaaacccgaggagcacattacgagagtgatggttgatgttgctagcattaccatctttgggagtgagggtccttctcaggatacggttgaggtagacatggaaaggcttgaaaccctcagttgtgcccaacttgccgccatcaagatacaggggatgccgctcatgatgcataggaatggaatagtcatggaggttagcaaagtacctcatccagttttcatcaaaaccccaaagagtggcaagagcctcataggtaatggagtaccactccccctgagtcatccaatgtatgccccgccggctgtcaaagaaaacggtggcataaaattgggcaataacctccttgcaccaaggttgatggagggtcataaaattgtggacacacatctcctcacacatggcaatcatagagttgagggtggggtcatcatgtgcggggaactcggcgaggatcgcacgaggttgccgggtggagccctcaccggcttgagtagaccgccgaggagggagggtggaaccccgaggtacttgcgtcacttggggaccggtccccgcgtacccttccccagaccattcactgtccgagccctccgaggaggatggggaaggagtgggggaacgatcctggaggcgcttgcccctgcgcgagatggacttgcgaggtggcatcgaggatgaagtggaggagagcgtcggagagtcggcggagaggaggtggtcgccggggaggagtggatgggggagaggaacccgtggggaaaaggatagcaaagagagagaagaagagtccat

SEQ ID NO: 6135 - DNA, 271 bp, Oryza sativa
  Clone ID: PAT_MRT4530_12856C.1
tatatatatatatatatatatatatatatatatatatatatatatatactagctactgatgagttaaaaaaaccccatttttttttcaagtgtgattaatttatcattatttgtcagtcgatgtttttttcaatcttacgaattacgtttgaaatcgaatgacctgtagctcaagccctacccatctacacgatgggagtgtttaagatgccggaacatttctgtaatgattagtaaatgatattcgctttatccaaaaaaaaaaaaaaaa

SEQ ID NO: 6136 - DNA, 588 bp, Oryza sativa
  Clone ID: PAT_MRT4530_12857C.1
atcgccctcaacgtattgcgtacatcatttagcatcttgttcaacactagcactgtaaaatctctcctgggaggataccccaccaagatatttgccctgattgactaaattgctctttctgcaagtgccactactgcaatcactcgctatagcagtcatctttctaccgaacattagctcatggctcaccacggcacccgcataggcaggacatgatgtacacggtggatatgaataactccacagccatgttcatatcacagacaatgtctcccctgctctaccaatgctgcatgcagatgcaatgcatgatgcctcagtgcaactgagacaccatctaccacatgatgcacaacatgcaacaaaatatttgtgctgaactcgggcaccaccagatggtgatcaacatggcgatgcagatgccatacatgtgcaacatggacactgacaacttacaactctcttcttgtggtgtgaagaagatcaaacgtgggatacatggactcaagaaataaggagtggcgtactatcgtgtgcccaccctagatgtaataaccattgcatacagtatcaatcaatgtcccactt

SEQ ID NO: 6137 - DNA, 321 bp, Oryza sativa
  Clone ID: PAT_MRT4530_12858C.1
atggagcccgggcagctgcccgtgctggccgggccctgcctccgccattgtgtttcactatcaaaatatttcatgagcgcccctcaccacttcctcgccgccttcgagctatgtctccccaaccacgtcggatctggtcacctaaagggctcaccggatccggcctccttgaggttggggctcactggatcactaacgtggatcaccttgcatgtgcttggggctggtgcggtctggctagaaggagataatggcgacggtggcggtcagtcgaaggagagtagcaagggaacgaaggcgacagatccaatgggacagtga

SEQ ID NO: 6138 - DNA, 351 bp, Oryza sativa
  Clone ID: PAT_MRT4530_12859C.1
atggcccaaactatgatgacactgagtgaaggtccctgtagaggaggcagcagaagcaagaagactggaaagcgcagcggaaggaagacgaagccagtcaagctcccaaagacgctgagaatcatggtggccgcggtggctcagctgctccctcgtagagtccacgtcatcagcgcattagccatccctgcccctcgggctcctggcggcggggaatgggaaggggagcagcagcagttgttggaagacgagcggaagatggaaggggaaggggatcagcagcagcagctgttggaagtggaacggagggcggcaatcctgagactggtattgggcgagggagaaacatag

SEQ ID NO: 6139 - DNA, 2229 bp, Oryza sativa
  Clone ID: PAT_MRT4530_1285C.1
atggccgccccggaggcaccctcctgctacgttgggatcgcgcggcagtccgccgccttccgcctcatgaagcaaatggggtgggaagaaggtgaaggccttggtaaagataagcaaggcattaaggggcatgttagagtgaaaaacaagcaggacactcttggtgttggtgtagacagtcctcataacaaatgggtatatgacaccacccaatttgacaatatactaaagaaactgaaagtggtgttgtttgataacatttttggtgtagcagaatttgaagatgatgtaagcaattcaccagatagtacaccaaaggaagctaaaccaacaaacaatgaagttaccaaagttacccgaccccaaggaagtttacgcaatacttatttcagatataagaaaagagagagggggaaaagtgtgagcggttattcagcaaaagatcttgaaggcatacttgttcgcaaaagtgatgacaattgcaaagtggaccaggaagttgaaccaacatgctgtgatgaacctgatcccatcatctgtcaagatacagtatcgcaagctgatgatgtgaactggtgggggcataaatttggattcaagtcaggcggctttctaggagcaaaatcgcgcaagaacaaatcttctgctacaaaaggtacttcaaatgtccgccagacatttggggaagaagaccaagaaaacctatacaatcttgttcaggacaaagccacatctggaaagcagggtcttggcattaagggtctgccaattaaagttgccggacaccgttggaaagggaacaaaacttcttttggtgatagcgatgaggaaaattcaacccaatccaatgaattatcagagttggaagaagatggtgatgaggaagaatctgctaacgataatgaactaatagacgccaatgtgaatactgtgaaagaaatgtgcgtggatgttaaacaaaaacataaaaccaaggtcaagaaactttgcaaaacaattcttcgtcaggccccagcacaatctatgaaattgaaggaacttaaggtagctgttgaagcacattcagagtctatgttctccaacttctcttgtaggcgtgaagctctattgttcttaaagaggaagctccaaggaagcagaaaattcaatattgatggcaaacgggttcagcttgtatcgctattcgtgcttctgatgagtgtacgaaagtacggagcacagtatgctctgcggtatagatgcgccaatggccgcacgggcaaccagtggaagcagctgctcccgcacctccgcacccgcttcgctgaccaatgcgatatttgtgagtgcatcacctcggccccgttcgacgccatagatatcacgagggaggctgtaaaggatggggctgatgccgtgattgctgttggtggtgatggaacacttcatgaggtcgtcaatggcttcttctgtaagggaagtcctgtccatgctcttgatcaaggacctgatcattccacagcgcttggtctcattccacttggaactggttcagactttgcaaggacatttggctggacaaatgatcctcatgaggcgattgatcgaattgtgagaggttccttctttgattcttcttttatagtgtgtgctgtcagtccatactcgtggtctcatagtggtcattcatctcctggagtcaaatcaaaactagatataggtatgatggaaggcccagatggaaacccacattattttgttaatgttgctgatatccatttgagtgctaaggcgggttatttttcttctatgtacaagagatttggcaacttatgctatgtttttggagcgctcagagccttttggggacatagtaatcgagatcttagaataaaggtaaatggtggagaatggaaaaccattcgtaaagtcactgcactatgcataggaaatgccaaatacttcggcggtggtatgaagatcactccaacagctgatcctttcgggggtgaccttgaggtcgttattcttcaagatttcaaatggcatgatttcctgctcaagcttcatagattgtatggaggaactcatctatcagtgactggtgtgtcatcgataagagttcagtcgattgaagtagcagaaaaggaagttagtgctgacatctttgtgcaatctgatggggagcattttggttttcttccaaccaaattttcagttcttcccggtgcagttgatttcttctgctag

SEQ ID NO: 6140 - DNA, 410 bp, Oryza sativa
  Clone ID: PAT_MRT4530_12860C.1
ggccgctttttttttttttttttttttgggggcgcgggggagggatgtccttagctttcagagctgagattataggaaacttttacggtacatagcagcaacgcaatggctggcatttgatttatttatttatttaggtatgctttatccgcattgccaacttaagaggatcccgccacattatggggggggggtagctcttgttttggaggggagtgaatgcaccgaactcatgtcctctgttatgcttgagcctctgagcctattctcttgagatgcgatatgcattggctagaacatgaggtgggagagcacggaagatggaactgtttcctgcgatgggggttaccatagagttagggtttgtcttgaatgcaacgtaagcacatccttctctttgagccttgttt

SEQ ID NO: 6141 - DNA, 501 bp, Oryza sativa
  Clone ID: PAT_MRT4530_12861C.1
atggcagctattctccgatccctgggtcgctcggcaaccaccgccggcctcttcggccgccgctgccgcctccttagcgaggcagcttcagatcatcaggtcctcaccacgagcccttggggtgttgaggcttccgtgtggttccgatcaacctgcgatgcggagagggctcgttctatcactaatggacgcaatatctatgatgggtgttgcctgcttgatgtccagcacaagatcgcaaagaacagcggccacatgaagaagggatctgcttcggcgatgatgcagcaggaaagggatgctgcggaatcgggggtgcaaagcattgggggagatgatcttgctcctagtcctcgcttgcttttctggggtagaataatccgtttatccatcatcacctacgcaagcttcaaacttggacaaaactctgctagaaacgcatacaagagaaccaaggcagagcttccatgcttagaagctgttgacagcacaactgcgtag

SEQ ID NO: 6142 - DNA, 912 bp, Oryza sativa
  Clone ID: PAT_MRT4530_12862C.1
atgacgacggacggcgtcggtggcgaggaaacaggaagccggcggcagagcgcggccgaggagaagaaggaggcagcgaggaggcagtcgcggcggcggggcagcacgacaccgagagggcgtggccagggaaggagggagggagaggtggcgcccggagctcctcgtcacgcgttcacgcttgcaccggctcctctggtgctcggcgacggacggcgacgacgagagcgggacgggcggcaacaaagcggcgacggtggttcggcaacaatggcgcggtgggcggaggcgatgtcggtttgggaggggagaaccgaccttggtggtcaagcgcttggctggcggcagcggcggtttcgtgggcggtgcgaaagcggcgacggtgtggatgcgttgggcggtggaggacggtggatcgagcggcggaaactgaaacgcgagcgcgggctggtagcgtggagcggtcaaggtggggcagcgagctgctgcagcggcgtcagcggctctgcctccgagcacaagcgaccaaggggtggagacagggcgccattgcccgggaggggaaaaaggaagggaggacggtggaaagggggacttgccccttccggtttgggagaaggaggtgggagagggagtgctctgcctccgggatttggacggacgcgggtagagcggcttgggcacgcgctgcagagctcgcggcaggcagcggggccgagcggcagcgcggcgcaggcgcggacggcggcggcgaccgggtggtcggccacgatcagcgcgtgcgtgggaaccaaaggcggtggcgggttcaaaaggcggcggcgggaatcggcgccggggagagaggaagcagagagggcgagaggaggaatcaagggagactcaaggaaaggattcgagatgggaatttga

SEQ ID NO: 6143 - DNA, 308 bp, Oryza sativa
  unsure (1)..(308): unsure at all n locations
  Clone ID: PAT_MRT4530_12863C.1
cacatttcgaggtacttgcacgnccgctgcatatgccgcctaaaaaggaagcnatcccggtcantgnctggacagttaagtttgatctgaantcgttggggtcactngagtcnagagttggttgatccatatggcncaggaaacagtatggatgccgtaacaacaactgatagtttagttcaacagagagtttgctcacatgtttcccccgttttgacattgtaaactaaactattagctatgtacatctctttgcatggatgtaatgccatnttccnttatctaatcttcgttccaaaaaaaaaaaa

SEQ ID NO: 6144 - DNA, 6209 bp, Oryza sativa
  Clone ID: PAT_MRT4530_12864C.1
acaacatccgtaatcaagctctacgccctgttgcagctccagcacagcaacaacctgccaagagggagcaaggcagcaagcccgtggtgtgtttcaattgtggagacccaggacattatgctgacaagtgtccgaagccccgacgtgtgaaggttgtccctgcccaggcccgtgtcaatcatgttgctgctgcagaagctcaagatgctccagatgtgattttgggtacgtttcttgttaacttagttcctgcaacagtgcttttcgattctggtgctacacattcattcttatctaagagttttgcgggaaatcatgggatggaagtagaagatcttagacgtcctttgatggttagtaccccgagtaatcaagcactctctttgcaacgtagcccctttgtcagaatagaaattcaaggaataccatttctggccaatcttatcctgttagaatccaaagaccttgatgtcatcctagggatggactggttagccagacataaaggtgtgatagactgtgctaacagaaaagtgactctcaccagcaatgatggtcgagttgtaactgttcttgcactgtcatctgagtctttaaggtcaagacagaaccagataactttggaagagattcctatagtccgggagtattccgatgtgttcccagatgatttgcctggtatgccgcctaaaagggatatagagttcagaatagatttggtaccaggaacaactccgatctataagagaccttatagaatggcagccaatgagttggcagaagtcaagaggcaagtagacgatttgcttcaaaaaggatacatcagaccgagttcatctccatggggagctctggttatttttgtggaaaagaaagaccatacccagaggatgtgtgtggactatcgtgcactaaatgatgtgactatcaagaataagtatccgctgcccagaattgatgatttgtttgatcagcttaaaggtgccaccgttttctccaagatagatcttcgatcagggtatcaccagttgagaatcaaagaggaagatatacctaagacagcttttaccactaggtatggattgttcgaatgtactattatgtcttttggacttaccaatgcccccgctttcttcatgaacttgatgaataaggtgtttatggagtacctagacaaattcgtggtggtctttattgatgacattcttatctactcccgaaccaaagaagagcatgaagagcatcttcgccttgcattagagaagctacgagaacatcaactgtatgctaagtttagcaagtgtgaattttggttgtctgaagtgaagttccttggtcacgtcatctcagcaggaggagttgccgtcgatcctagtaatgtggaatccgtaaccaactggaaacaaccaaagacagtttcagagattcgcagtttcctaggccttgcaggatattaccggaggtttatagagaatttttccaagattgctaagcccatgacacgactgcttcagaaagatgtaaagtacaagtggtcagaagaatgtgagcagagttttcaagagttgaaaagtcgcttaatatcagctcctattttgattttgcctgatccaaagaagggtttccaagtgtattgcgatgcatccaaacttgggttaggttgtgttctgatgcaagatgggaaggtggttgcctatgcatctcgtcagttacgtccgcatgagaagaactaccctactcatgatcttgaattagctgcagtagttcatgcgttgaagatttggcgtcattatcttttcggtactcgtacagaggtatacaccgatcacaagagtttaaagtatatctttactcagccggatctgaacatgagacaacggagatggttggaattaattaaggattatgacatgggaattcattatcacccgggaaaggctaatgttgtagcagacgctcttagtaggaaaggctattgcaatgctacggaaggacgacagttgccattgtaattatgcaaggaatttgaaaggttgaatttgggaattgtcagtagaggtttccttgcatccttagaagcgaagcccactctaattgatcaagttagagaagcccaaattaatgatcctgatattcaagaaatcaagaagaatatgagaagaggaaaagctatcggtttcttagaggatgagcaaggaactgtatggttgggtgagagaatctgtgtccctgacaacaaagatttaaaagatgcaattctgaaagaagctcatgatactttatactccattcaccctggtagtaccaaaatgtaccaggatctcaaggaaagattttggtgggcaagtatgaagcgtgaaatcgcagaatacgtagcagtatgtgatgtttgtcagcgagtcaaggcagaacatcagaaacctgccggtttgctgcagcctttgaagattcctgaatggaagtgggaagaaatcggtatggattttatcactggtttacccagaacgtcatcaggcacaacttattccggaagtcgcttagcggaattgtatatggcaaggattgtgtgtttgcatggcgtccctaagaaaatagtgtctgatcgaggcagtcaatttacttcaaatttttggaagaagcttcaggaagagatgggttctaagctgaactttagtactgcttatcatccgcagacagacggacaaaccgaaagggtgaatcaaattttggaagacatgttgagagcttgtgctttagacttcggtggaagttgggataagaatctaccttatgcagaattttcgtacaataacaattatcaagctagtcttcagatggctccttacgaagcactgtatggtcggaagtgtcgcactctgcttttgtgggatcaaacgggagatcgtcaggttttcgggacggatatcctaagggaatcagaagaaaaggtaaaggtcattcaagaaagattgcgagtggctcagtctcgtcataagagttatgccgacaatcgccgcagagatctaagttttgaagaaggagattatgtgtatcttcgtgtcacgcctcttcgaggagttcatcgtttccacaccaaaggaaaattggcaccgcgttttgtgggaccttataagattgtcagtagaagaggagaggttgcttatcagttggagttacctcaatctttggcaggagtccataatgtgttccatgtgtcgcaactgaaaaagtgtttaagggtacctaccgaagaagctaatcttgaacagatagaagtccaagaggatctgacctatgttgagaaaccaatccgaagcgccgccgttcgccggcgagcgtgcgccgtccgagccgccgagccgccgccgccggtggtgacgtcaccgatgccgcgctacaagcctgagtacttgtttggtgttgagggttttgtccaggagttgcgtacgatgtcctttgccataggatttgggactgcccctttttatgcccagattcctcatgatcgtcatgaagagaagtgccgagtcaaagtcaccttgaacagtaatagtgaaggtatcccttcagtgatgttcgaagctggaggaagaaactacatccatgcatgtcaggaggtggcaaggatcgccataggagagctccgcgatcgctacagtgatcagttggccgacactgagtatcgctaccatcctcgccaaccccagggaagtgaccgtggcagctaccttgagactgaaggaattgagaatgatgctaccacaaggcatttggttgagatgctgtgggctatggatgaaacccgtgcggagactgtgttagcggctcaagatcgtgaagaccggaatcgtggtaagatttgcaagttagaagacaaggtggatcgtttggagaaggaattagccgcgttgaagggagaagcaccgccgcagaaggccaggattcgtctcaccgcaaggaagagagctctatttgtccctcgctatcaattggcgccaaaagttcgtgtggtggagaaagaagttgccccaaccttggcagatcctccggtcatgatcatggtgaacactcgcagcaacgggaatggccccaacaaccccaataacaacaacaatgaagggaatcccactcttgctcaagttcttgctcaacagactcagctaatgaacatgatgatgcagcaacttcagaatcagcagaaccaaggaaataaccatgcacctccccagaacaagttagcagaatttcttcgtgtgaggccgcctattttctctagtaccactaatcctgttgaagctggtgattggctgcatgccatagagaagaagttggatttgcttcaatgcactgatcaggaaaaggtctcatttgcatcacaccagttgcatggccctgcctctgaatggtgggatcacttccgccttaacaggactactgttgaacctatcacttggctggaattcaccgctgcttttcggaagacgcatataccatcgggagtggtgtctctcaagaagaaggaattcaggtcgctcacccagggatctcgctctgttacggagtatctgcacgagttcaatcgtctgactcgttatgctccggaagatgtgcgcaatgatgaagagcgctaggagaagttcttggaaggacttaatgatgagctttcttacccactcatgactggagattattctgatttccagaagttggtggataaggctattcgtcaggaggacaatgctggcaacaacatccgtaatcaagctccacgtcctgttgcagctccaacacagcaacaacctgccaagagggagcaaggcagcaagcccgtggtgtgtttcaactgtggagacccaagacattatgctgacaactccccgaagccccgacgcgtgaaggttgtccctgcccagagcaactctaccgcacctgcgccaatggcccgtgtcaatcatgttgctgctgcagaagctcaagatgctccagatgtgattttgggtacgttccttgttaactcagttcctgcaacagtgcttttcgattctggtgctacacattcattcttatctatgagttttgcgggaaatcatgggatggaagtagaagatcttagacgtcctttgatggttagtaccccaagtaatcaagcactctctttgcaacgtagcccctctgtcagaatagaaattaaaggagtaccatttctggccaatcttatcttgttagaatccaaagaccttgatgtcatcctagggatggactggttagccagacataaaggggatagactatgctaacagaaaagtaactctcaccagcaatgatggtcgagttgtgactgttcatgcattgtcttctgagtctttaagatcaagactgaaccaaataactttggaagagattcctatagtccgggagtatcccgatatgttcccgatgatttacctggtatgccgcctaaaagggatatagagttcagaatagatttggtaccaggaacaactccgatccataagagtccttatagaatggcagccaatgagttggcagaagtcaagaggcaagtagatgatttgcttcagaaaggatacatcagaccaagttcatctccatggggagctccggttatttttgtgaaaaagaaaggccatacccagaggatgtgtgtggactatcgtgccctaaatgatgtgactatcaagaataagtatccgctacccagaattgatgatttgtttgatcagcttaaagagttcgtggtggtctttattgatgacattcttatctactcccgaaccagagaagagcatgaagaacatcttcgccttgcactagagaagctacgagaacatcaactatatgctaagtttagcaagtgtgaattttggttgtctgaagtgaagttccttggtcacgtcatctcagccggaggagttgccgttgatcctagtaatgtggaatccgtaaccaactggaaacaaccaaagacagtttcagagattcgcagtttcttaggcctcgcaggatattaccggaggtttatagagaatttttccaagattgctaagcccatgacacgactgcttcagaaagatattccgtcgtttccggacagtccgttttcgcaggagaagagtttgaagagttccaaggccagcaaggcaagtcacacagatcccaaacaaccctttgagcatgttgatcctatt

SEQ ID NO: 6145 - DNA, 4332 bp, Oryza sativa
  Clone ID: PAT_MRT4530_12865C.1
atggttgttcagaatgattgggcctatgcaacagggatgccgcgctacaagcctgagtacttgtttggtgttgagggatttgtccaggagttgcgtacgatgtcctttgtcataggatttgggactgcccctttttacgcccagattcctcatgatcgtcacgaagaaaagtgccgagtcaaagtcaccttgaacagtaatagtgaagatatcccctcagtgatgttcgaagctagaggaagaaactacatccatgcatgtcaggaggtggcaaggatcgccataggagagctccgcgatcgctacagtgatcagttggccgacactgagtatcgctaccatcctcgccaaccacagggaagtgatcgtggcagctaccttgagactgagggaattgagaatgatgctaccacaaggcatttggttgagatgctgcgggctatggatgaaacccgtgcggaggttgtgctagcagctcaagatcgtgaagatcggaatcgtggtaagatttgcaagctagaagacaaggtggatcgtttggagaaggaactagccgcgttaaagggagaagcaccaccgcagaaggccaggattcgtcttaccgcaaggaagagagctctatttgtccctcgctaccaattggcgccaaaggtccgtgtggtggaaaaagaagttaccccagccctagcggatcctccggtcgtcaacatggtgctcactcgcagcaacgggaatggccctaacaacaacaataacaacaacaacaatggagagaatcccacacttgcccaggtcctggctcaacaggcacagcttatgaacatgatgatgcagcaactccagaaccagcagaaccagggaaataaccatgcacctccccagaacaagttagcagaatttcttcgtgtgaggccgcctactttctctagcaccaccaatcctgttgaagctggtgattggctgcatgacatagagaagaagttggatttgcttcagtgcaccgatcaggagaaggtctcatttgcatcacaccagctgcatggccctgcctctgaatggtgggatcacttccgcttgaacaggactactgctgaacctatcacttggcttgaattcaccgctgctttccggaagacgcatataccatcgggagtggtgtctctcaagaaggagttcaggtcgctcacccagggatctcgctctgttacggagtatctgcacgagttcaatcgtctggctcgttatgctccggaagatgtgcgcactgatgaagagcgtcaggagaagttcttggaaggacttaatgatgagctttcttacccactcatgactggggattatcatgatttccagaagttagtggataaggctattcgccaggaggacaagtacaatcgcatggagcaaaagaaacgccggattgctcaattcaaggcacaacaggggaatagtcaaaggccgcgtcttactttaggaccccagtctatgccacagggaggttcttcgtctgttgttcgtccgcatcgtcagttcttcaaccacaatgctggcaacaacatccgcaatcaagctccacgccctgttgcagcttcgacacagcaacaacctgccaagaaggagcaaggcagcaagcccggggtgtgcttcaactgtggagacctaggacattatgctgacaagtgtccgaagccccgacgcgtgaaggttgtccctacccagagcaactctaccgcaccagcatcaaaggcccgtgtcaatcatgttgctgctgcagaagctcaaggtgctccagatgtgattttgggtacgtttcttgttaacttagttcctgcaacagtgcttttcgattctggtgcttcacattcattcttatctatgagttttgcgggaaatcatgggatggaagtagaagatcttagacgtcctttgatggttagtaccccaagtaatcaagcactctctttgcaacgtagcccctctgtcagaatagaaattcaaggagtaccatttctggccaatcttatcttgttagaatccaaagaccttgatgtcatcctagggatggactggttagccagatataaaggtgtgatagactgtgctaacagaaaagtaactctcaccagtaatgatggtcgagttgtaactgttcatgcattgtcttctgagtctttaaggtcaagactgaaccaaataactttggatgagattcctgtagtccgggagtatcctgatgtgttcccagacaatttacctggtatgccgcccaaaagggatatagagttcagaatagatttggtaccaggaacaactccgatccataagagaccttatagaatggcagccaatgagttggcagaagtcaagaggcaagtagacgatttgcttcagaaaggatacatcagaccgagttcgtctccatggggagctccgatagatcttcgatcagggtatcaccagttgagaatcaacgaggaagatatacctaagacagcttttaccactaggtatgaattgttcgaatgtactggtatgtcttttggacttaccaatgcccctgctttcttcatgaacttgatgaataaggtgtttatggaatacctagacaagtttgtggtggtctttattgatgacattcttatctactcccgaaccaaagaagagcatgaagaacatcttcgccttgcactagagaagctacgagaacatcagttgtatgccaagtttagcaagtgtgaattttggttgtctgaagtgaagttccttggtcacgtcatctcagcaggaggagttgccgtcgatcctagtaatgtggaatccgtaaccaactggaaacaaccaaagacagtttcagagattcgcagtttcctaggccttgcaggatattatcagaggttcatagagaatttttccaagattgctaagccaatgacacgattacttcaaaaggatgtgaagtacaagtggtcagaagaatgtgagcagagttttcaagagttgaagaatcgcttaatatcagctcctattttgattttacctgatccaaagaagggttttcaagtgtattgcgatgcatccaaacttggattaggctgtgttctgatgcaagatgggaaggtggttgcctatgcatctcgtcagttacgtccgcatgagaagaactaccctactcatgatcttgagttagctgcagtagttcatgcgttgaagatttggcgtcattatcttttcggtactcgtacagaggatgagcaaggaactgtatggttgggtgagagaatctgcgtccccgacaacaaagatttaaaagatgcaattctgaaagaagctcatgatactttatactccattcaccctggtagtaccaaaatgtaccaggatctcaaggaaagattttggtgggcaagtatgaagcgtgaaatcgcagaatacgtagcagtatgtgatgtttgtcagcgagtcaaggcagaacatcagaaacccgccggtttgctgcagcctttgaagattcctgaatggaagtgggaggaaatcggtatggatttcatcactggtctacccagaacgtcatcaggccatgactctatttgggtgatagtcgacagacttaccaaagtggctcatttcatcccagtaaagacaacttattctggaagtcggttggcggaattgtatatggccaggattgtgtgtttgcatggcgtccctaagaagatagtgtctgatcgaggcagtcagtttacttcaaagttttggaagaagcttcaggaagagatgggttctaagctgaactttagtactgcttatcatccgcagacagacggacaaaccgaaaggacttatgcggaattctcgtacaacaacagttatcaagctagtcttcagatggctccttacgaagcactgtatggttggaagtgccgcactccgcttttgtgggatcaaacgggagaacgtcaggttttcgggacggatatcctgagggaagcagaagaaaaggtgaaaaccattcaagaaagattgcgtgtggcccagtctcgtcataagagttatgccgacaatcgccgcagagatttgagttttgacgaaggagattatgtgtatcttcgtgtcacgcctcttcaaggagttcatcgttttcacaccaaaggaaaattggcaccgcgttttgtgggaccttataagattgtcagtagaagaggagaggttgcttatcagttgaagttacctcaatctttggcaggagtccataatgtgttccatgtgtcgcaattgaagatgtgtttaagagtacctaccgaagaaactaatcttgaacagatagaagtctaa

SEQ ID NO: 6146 - DNA, 4422 bp, Oryza sativa
  Clone ID: PAT_MRT4530_12866C.1
atggtgcgctgtggtggattgtgttgtgcgaggggtactgtcacagctcctttccgagctcctggtttggaatggtatattcctggtttggagatagaactgtgcagccgggatggttgttcagaatggttgggtctatgcaacaggatgccgcgctacaagcctgagtacttgtttggtgttgagggatttgtccaggagttgcgtacgatgtcctttgtcataggatttaggactacccctttttatgcccagattcctcatgatcgtcacgaagagaagtgccgagtcaaagtcaccttgaacagtaatagtgaagatatcccctcagtgatgttcgaagctggaggaggaaactacatccatgcgtgtcaggaagtggcaaggatcgccataggagagctccgcgatcgctacagtgatcagttggccgacactaagtatcgctaccatcctcgtcaaccacagggaagtgaccgtggcagctaccttgagactgagggaattgagaatgatgctaccacaaggcatttggttgagatgctgtgggctatggatgaaacccgtgcggagactgtgttagcagctcaagatcgtgaagaccagaatcgtggtaagatttgcaagctagaggacaaagtggatcgtttggagaaggaactagccgcattgaagggagaagcaccaccgcagaaggccaggattcgtcttaccgcaaggaagagagctctatttgtccctcgctaccaattggcgccaaagatggtgctcactcgcagcaacgggaatggccccaacaacaacaataacaacaacaatggagagaatcccacacttgcccaagtcctggctcaacaggcacagcttatgaacatgatgatgcagcaactccagaaccagcagaaccagggaaataaccatgcacctccccagaacaagttagtagaatttcttcgtgtgaggccgcccactttctctagcaccactaatcctgttgaagctggtgattggttgcatgccatagagaagaagttggatttgcttcagtgcaccgatcaggagaaggtctcatttgcatcacaccagctgcatggccctgcctctgaatggtgggatcacttccgtcttaacaggactactgctgaacctatcacttggcttgaattcaccgctgctttccggaagacgcatataccatcgggagtggtgtctctcaagaagaaggaattcaggtcgctcacccagggatctcgctctgtcaccgagtatctgcacgagttcaatcgtttggctcgttatgctccggaagatgtgcgcactgatgaacagcgccaggagaggttcttggaaggacttaatgatgagctttcttatccactcatgactggggattatcatgatttccagaagttagtggataaggctattcgtcaggaggacaagtacaaccgcatggagcagaagaaacgccggattgctcacttcaaggcacaacaggggaatagtcagaggccgcgtcttactttaggaccccagtccatgccacagggaggttcttcgtctgttgttcgtccgcagcgtcagttcttcaacaacaacgcgggcaacaacatccgcaatcaagctccacgccctgttgcagcttcgacacagcaacagcctgccaagaaggagcaaggcatcaagcccggggtgtgcttcaactgtggagacccaggacattacgctgacaagtgtccgaagccccgacgcgtgaaggttgtccctgcccagagcaactctaccgcaccagcatcaaaggcccgtgtcaatcatgttgctgctgcagaagctcaaggtgctccagatgtgattttggactgtgccaacagaaaagtaactctcaccagcaatgatggtcgagttgtaactgttcatgcattgtcttctgagtctttaaggtcaagtctgaaccaaataactttggaagagattcctgtagttcgggagtatcccgatgtgttcccagacgatttacctggtatgccgcctaaaagggatatagagttcagaatagatttggttccaggaacaactccgatccataagagaccttatagaatggcagccaatgagttggcagaagtcaagaggcaagtagacgatttgcttcagaaaggatacatcagaccgagttcatctccatggggagctccggttatttttgtggaaaagaaagatcatacccagaggatgtgtgtggactatcgtgcactaaatgatgtgactatcaagaataagtatccgttgcccagaattgatgatttgtttgatcaacttaaaggtgctaccgttttctccaagatagatcttcgatcagggtatcaccagttgagaatcaaagaggaagatatacctaagacagcttttaccactaggtatggattgttcgaatgtactgttatgtcttttggacttaccaatgcccccgctttcttcatgaacttgatgaataaggtgtttatggaatacctagacaagttcgtggtggtctttattgatgacattcttatctactcccacaccaaagaagagcatgaagaacaccttcgccttgcattggagaagctacgagaacatcaacttaatgtggaatccgtaaccaactggaaacaatcaaagacagtttcagagattcgcagtttcctaggcctcgcaggatattatcggaggtttatagagaatttttccaagattgctaagtccatgacacgattacttcaaaaagatgtgaagtataagtggtcagaagaatgtgagcagagttttcaagagttgaagaatcgcttaatatcagctcctattttgattttacctgatccaaagaagggtttccaagtgtattgcgatgcatccaaacttgggttaggatgtgttctgatgcaagatgggaaggtggttgcctatgcatctcgtcagttacgtccgcatgagaagaactaccctactcatgatcttgagttagctgcagtagttcatgcgttgaaaatttggcgtcattatcttttcggtactcgtacagaggtgtacaccgatcacaagagtttaaagtatatctttactcagccggatctgaacatgagacaacggagatggttggaattaattaaggattatgacatgggaattcattatcacccgggaaaggctaatgttgtagcagatgctcttagcaggaaaggctattgcaatgctacggaaggacgacagttgccattggaattatgcaaggaatttgaaagattaaatttgggaattgtcagtagaggttttgttgcagccttagaagcgaagcccactctaattgatcaagttagagaagcccaaattaatgatcctgatattcaagaaatcaagaagaatatgagaagaggaaaagctatcggtttcttggaggatgagcaaggaactgtatggttggatgagagaatctgcgtccccgacaacaaagatttaaaagatgtaattctgaaagaagctcatgatactttatactccattcaccctggtagtaccaaaatgcaccaggatctcaaggaaagattttggtgggcaagtatgaagcatgaaatcgcagagtacgtagcaacagacggacaaaccgaaagggtaaatcagattttggaagacatgttgagagcttgtgctttagacttcggtggaagttgggataagaatctaccttatgcagaattctcgtacaacaacagttatcaagctagtcttcagatggctccttacgaagcactgtatggtcggaagtgccgcactccgcttttgtgggatcaaacgggagaacgtcaggttttcgggatggatatcctaagggaagcagaagaaaaggtgaaaatcattcaagaaagattgcgtgtggcccagtctcgtcataagagttatgccgacaatcgtcgtagagatctaagttttgacgaaggagattatgtgtacctttgtgtcacgcctcttcgaggagttcatcgttttcacaccaaaggaaaattggcaccgtgttttgtgggaccttataagattgtcagtagaagaggagaggttgcttatcagttggagttacctcaatctttggcaggagtccataatgtgttccatgtgtcgcaattgaaaaagtgtttaagggtacctaccgaagaaactaatcttgaacagatagaagtccaagaggatctgacctatgttgagaaaccaatccgtatcttggaaatagatgagagaagagccagaaatcgagttatccgtttttgcaaagtccaatggagtaatcactcggaagaagaatcaacttgggaacaagaagatgaattgaagtcagctcatccgcatctgttcgccagttcttccgaatctcgaggacgagattctgtttaa

SEQ ID NO: 6147 - DNA, 4791 bp, Oryza sativa
  Clone ID: PAT_MRT4530_12867C.1
atggccgccaaatcctcccacgtcgccgcctctcccgcgcgactccctctcccgcgcatgccgcgctacaagcctgagtacttgtttggtgttgagggatttgtccaggagttgcgtacgatgtcctttgtcataggatttgggactgctcctttttatgcccagattcctcatgatcgtcacgaagaaaagtgccgagtcaaagtcaccttgaacagtaatagtgaagatatcccctcagtgatgttcgaagctggaggaagaaactatatccatgcatgtcaggaggtggcaaggatcgccataggagagctccgtgatcgctatagtgatcagttggccgacacggagtatcgctatcatcctcgccaaccacaaggaagtgaccgtggcagttaccttgagactgagggaattgagaatgatgctaccacaaggcatttggttgatatgctgtgggctatggatgaaacccgtgcggagactgtgttagcagctcaagatcgtgaagaccggaatcgtggtaagatttgcaagctagaagataaagtggatcgtttggagaaggaactagccgcgttgaagggagaagcaccaccgcagaaggccagggttcgtcttaccgcaagaaagagagctctatttgtccctcgctaccaattggcgccaaaggtccgtgtggtggaaaaagaagttaccccagccctagcagatcctccggtcgtcaatatggtgctcactcgcagcaacgggaatggccccaacaacaacaataacaataacaacaacaatggagagaatcccacacttgcccaagtcctggctcaacaggcacagcttatgaacatgatgatgcagcaactccagaaccagcagaaccagggaaataaccatgcacctccccagaacaagttagcagaatttcttcgtgtaaggccgcctactttctctagtaccactaatcctgttgaagctggagattggctgcatgccatagagaagaagttggatttgcttcaatgcactgatcaggagaaggtctcatttgcatcacaccagttgcatggccctgcctctgaatggtgggatcacttccgcttgaataggactactgctgaacctatcacttggcttgagttgaccgctgctttccggaagacgcatataccatcgggagtggtgtctctcaagaagaaggaattcaggtcgctcactcaggggtctcgctctgttacggagtatctgcacgagttcaatcgtctggctcgttatgctccggaagataagttggtggataaggctattcgtcaggaggacaagtacaatcgcatggagcaaaagaaacgccggattgctcaattcaagacacaacaggggaataatcagaggccgcgtcttactttgggaccccagtccatgccacagggaggttcttcgtctgttgttcgtccgcaacgtcagatcttcaacaacaatgcaggcaacaacatcagcaatcaagctccacgccctgttgcagtttcgacacagcaacaacctgccaagagggagcaaggcagcaagcccgtggtgtgtttcaactgtggagaaccaggacattacgctgacaagtgtccgaagccccgacgcgtgaaggttgtccctacccagagcaactctaccgtaccagtatcaaaggccagtgtcaaccatgttgctgctgcagaagctcaaggtgctccagatgtgattttgggtacgtttcttgttaacttagttcctgcaacagtgcctttcgattctggtgctacacattcattcttatctatgagttttgcgggaaatcatgggatggaggtagaagatcttagacgtcctttgatggttagtaccccaagtaatcaagcactctctttgcaacgtagcccctccgtcagaatagaaattcaaggagtaccatttctggccaatcttatcctgttagaatccaaagaccttgatgtcatcctagggatggactggttagccagacataaaggtgtgatagactgtgctaacagaaaagtaactctcaccagtgatgatggtcgagttgtaactgttcatgcattgtcttctgagtctttaaggtcaagtctgaaccaaataattttgaaagagattcctatagttcgggggtatcccgatgtgttcccagatgacttacctggtatgccacctaaaagggatatagagttcagaatagatttggtaccaggaacaactccgatccataagagaccttatagaatggcagccaatgagttggcagaagtcaagaggcaagtagacgatttgcttcagaaaggatacatcagaccgagttcatctccatggggagctccagttattttcgtggaaaagaaagatcatacccagaggatgtttgtggactatcgtgcactaaatgatgtgactatcaagaataagtatccgttgcccagaattgatgatttgttcgatcagcttaaaggtgccaccgttttctccaagatagatcttcgatcagggtatcaccaattgaggattaaagaggaagatatacctaagacagcttttaccactaggtatggattgttcgaatgtactgttatgtcttttggacttaccaatgcccccgctttcttcatgaacttgatgaataaggtgtttatggaatacctagacaagttcgtggtggtctttattgatgacattcttatctactctcgaaccaaagaagagcatgaagaacatcttcgccttgcactagagaagctacgagaacatcaactgtatgctaagtttagcaagtgtgagttttggttgtctgaagtgaagttccttggtcacgtcatctcagcaggaggagttgccgtcgatcctagtaatgtggaatccgtaaccaactggaaacaaccgaagacagtttcagagattcgcagtttcctaggcctcgcaggatattatcggaggtttatagagaatttttccaagattgctaagcccatgacacggctgcttcagaaagatgtgaagtacaagtggtcggaagaatgtgagcagagttttcaagaattgaagaatcgcttaatatcagctcctattttgattttgcctgatccaaagaagggtttccaagtgtattgcgatgcatccaaacttgggttaggttgtgttctgatgcaggatgggaaggtggttgcctatgcatctcgtcagttacgtccgcatgagaagaactaccctactcatgatcttgagttagctgcagtggttcatgcgttgaagatttggcgtcattatcttttcgccttagaagcgaagcccactctaattgatcaagttagagaagcccaaattaatgatcctgatattcaaaaaatcaagaagaatatgagaagaggaaaagctatcggtttcttggaggatgagcaaggaactgtatggttgggtgagagaatctgcgtccttgacaacaaagatttaaaagatgcaattctgaaagaagctcatgataccttatactccattcaccctggtagtaccaaaatgtaccaggatctcaaggaaagattttggtgggcgagtatgaagcgtgaaatcgcagaatacgtagcagtatgtgatgtttgtcagcgagtcaaggcagaacatcagaaacccgccggtttgctgcagcctttgaagattcctgaatggaaatgggaggaaatcggtatggatttcatcactggtctacccagaacgtcatcaggccatgactctatttgggtgatagttgacagacttaccaaagtggctcatttcatcccagtaaaaacaacatattccggaagtcggttggcggaattgtatatggcaaggattgtgtgtttgcatggagtccgtaagaaaatagtgtctgatcgaggcagtcagtttacttcaaatttttggaagaagcttcaggaagagatgggttctaagctgaactttagtactgcttatcatccgcagacagacggacaaaccgaaagggtgaatcagattttggaagacatgttgagagcttgtactttagacttcggtggaagttgggataagaatctaccttatgcggaattcttgtacaacaacagttatcaagctagtcttcagatggctccttacgaagcactgtatggtcggaagtgccgcactccgcttttgtgggatcaaacgggagagcgtcaggttttcgggacggatatcctaagggaagcagaagaaaaggtgaaaatcattcaagaaagattgcgtgtggcccagtctcgtcataagagttatgccgacaatcgtcgtagagatctaagttttgaagaaggagattatgtgtatcttcgtgtcacgcctcttcgaggagttcatcgtttccacactaaaggaaaattggcacctcgttttgtgggaccttataagattgtcagtagaagaggagaggttgcttatcagttggagttacctcaatctttggcaggagtccataatgtgttccatgtttcgcaattgaaaaagtgtttaagggtacctaccgaagaagctaatcttgaacagatagaagtccaagaggatctgacctatgttgagaaaccaatccgtatcttggaaacaaatgagagaagaaccagaaatcgagttatccgcttttgcaaagttaattggagtaatcactcggaagaagaatcaacttgggaacgagaagatgagttgaagtcagctcatccgcatctgttcgccagttcttccgaatctcgaggacgagattctgtttaa

SEQ ID NO: 6148 - DNA, 6596 bp, Oryza sativa
  Clone ID: PAT_MRT4530_12868C.1
aggtttcgttgcagccttagaagagaagcccactctaattgatcaagttagacaagcccaaattaatgatcctgatattcaagaaatcaagaagaatatgagaagaggaaaagctatcggtttcttggaggatgagcaaggaactgtatggttgggtgagagaatctgcgtccccgacaacaaagatttaaaagatgcaattctgaaagaagctcatgatactttatactccattcaccctggtagtaccaaaatgtaccaggatctcaaggaaagattttggtgggcaagtatgaagcgtgaaatcgcggaatacgtagcagtatgtgatgtttgtcagcgagtcaaggcagaacatcagaaacccgccggtttgctacagcctttgaagattcccgaatggaagtgggaggaaatcggtatggatttcatcactggtctacccagaacgtcatcaggccatgactctatttgggtgatagtcgacagacttaccaaagtggctcatttcatcccagtaaagacaacttattctggaaatcggttggcggaattgtatatggcaaggattgtgtgtttgcatggcgtccctaagaaaatagtgtctgatcgaggcagtcagtttacttcaaagttttggaagaagcttcaggaagagatgggttctaagctgaactttagtactgcttatcattcgcagacagacggacaaaccgaaagggtaaatcagattttggaagacatgttgagagcttgtgctttagacttcggtggaagttgggataagaatctaccttatgcagaattttcgtacaacaacagttatcaagctagtcttcagatggctccttacgaagcactgtatggtcggaagtgccgcactccgcttttgtgggatcaaacgggagaacgtcaggttttcgggatggatatcctgatggaagcagaagaaaaggtgaaaatcattcaagaaagattgcgtgtggcccagtctcgtcataagagttatgccgacaatcgccgcagagatttgagttttgaagaaggagattatgtgtatcttcgtgtcacgcctcttcgaggagttcatcgtttccacactaaaggaaaattggcaccgcattttgtgggaccttataaggttgtcagtagaagaggagaggtcgcttatcagttggagttacctcaatctttggcaggagtccataatgtgttccatgtgtcgcaattgaaaaagtgtttaagggtacctactgaagaagctaatcttgaacagatagaagtccaagaggatctgacctatattgagaaaccaatccgtattttggaaatagatgagagaagaaccaggaatcgagttatccgtttttgcaaagtccaatggagtaatcactcggaagaagaatcaacttgggaacgagaagatgaattgaaccgtggattcgagttcgattcggatcggtctctttcctccgagccttaactttccttctcgtcgccggtcaccgtgggccttcgccgcagccttccaacccctataaaaggatccccaagcccgccgctacccgtcgccaccctcgccttcatctctcgtcgctggtagagtcctagcctcccgtgcttcgtcgttgttccagtcatcgccgtcgctcgggaaggtcgccatcgtggtcgccgtcgcgtcgccttcctcgtccaccccttcgccgtcgcggaagaccgccggagcatcgccgtcgtcgtcaagccaaaggactccgccgccttttcctcgacgccgccgccgtccgttcattttccgccgctgttttggtcatcggtgagttcgccgcgtcgctctctacgtcgttcgccggtgagcatgcgcgcccgagccgccgccggaggtgacgtcaccgctgacgtcatcgtggccgtctgccattccgacgtttccggagagtccgttttcgcaggggaagattttgaagagttccaaggccagcaaggcaactcctggtttggaatggtatattcctggtttggagatagatctgtatagccggatgccgcgctacaagcctgagtacttgtttggtgttgagggatttgtccaagagttgcgtacgatgtcctttgccataggatttgggactgcccctttttatgcccagattcctcatgatcgtcacgaagagaagtgccgagtcaaagtcaccttgaacagtaatagtgaagatatcccctcagtgatgttcgaagctggaggaagaaactacatccatacatgtcaggaggtggcaaggatcgccataggggagctccgcgatcgctacagtgatcagttggccgacactgagtatcgctaccatcctcgtcaaccactgggaagtgaccgtggcagctaccttgagactaagggaattaagaatgatgctaccacaaggcatttggttaagatgctgtgggctatggatgaaacccgtgcggagactgtgttagcggctcaagatcgtgaagaccggaatcgtggcaagatttgcaagttagaggacaaagtggatcgtttggagaaggaactagctgcattgaagggagaagcaccaccgcagaaggccaggattcgtcttactgcaaggaagagagctctatttgtccctcgctaccaattggcaccaaaggtccgtgtggtggaaaaagaagttaccccagccctagcggatcctccggtcgtcaacatggtgctcactcgcaacaacgggaatgaccccaacaacaataataacaacagcaatggagagaatcccacacttgcccaagtcctggctcaacaggcacagcttatgaacatgatgatgcagcaactccagaaccagcagaaccagggaaataaccatgcacctccccagaacaagttagcagaatttcttcgtgtgaggccgcccactttctctagtaccactaatccagttgaagctggtgattggctgcatgccatagagaagaagttggatttgcttcagtgcgccgatcaggagaaggtctcatttgcatcacaccagctgcatggccctgcctctgaatggtgggatcactttcgccttaacaggactactgctgaacctatcacttggcttgaattcaccgctgctttccggaagacgcatataccatcgggagtggtgtctctcaagaagaaggaattcaggtcgctcactcaggggtctcgctctgttaccgagtatctgcacgagttcaatcgtctggctcgttatgctccggaagatgtgcgcactgatgaagagcgccaggagaagttcttggaaggacttaatgatgagctttcttatccactcatgactggggattatcctgatttccagaagttagtggataaggctattcgccaggaggacaagtacaatcacatggagcagaagaaacgccggattgctcacttcaaggcacaacaggggaatagtcagaggccgagtcttactttaggaccccagtccatgccacagggaggttcttcgtttgttgttcgtccgcagcatcagttcttcaacaacaatgctggcaacaacatccgcaatcaagctccacgccctgttgcagcttcgacacagcaacaacctgccaagaaggagcaaggcagcaagtccggggtgtgcttcaattgtggagacccaggacattacgctgacaagtgtccgaagccccgacgcgtgaaggttgtccctgcccagagcaactctaccgtaccagcatcaaaggcccgtgtcaatcatgttgctgctgcagaagctcaagatgctccagatgtgattttgggtacgtttcttgttaacttagttcctacaacagtgcttttcgattctggtgctacacattcattcttatctatgagttttgcgggaaatcatgggatggaagtagaagatcttagacatcctttgatggttagtaccccaagtaatcaggcactctctttgcaacgtagcccctctgtcagaatagaaattcagggagtaccatttctggccaatcttatcctgttagaatccaaagacattgatgtcatcttagggatagactggttagccagatataaaggtgtgatagactgtgccaacagaaaagtaactctcaccagcaatgatggtcgagttgtaactgttcatgcattgtcttctgagtctttaaggtcaagactgaaccaaataactttggaagagattcctgtagtccgggagtatcccgatgtgttcccagacgatttacctggtatgccgcctaaaagggatatagagttcagaatagatttggtaccaggaacaactccgatccataagagaccttatagaatggcagccaatgagttggcagaagtcaagaggcaagtagacgatttgcttcagaaaggatacatcagaccgagttcatctccatggggagctccagttatttttgtggaaaagaaagaccatacccagaggatgtgtgtggactatcgtgcactaaatgatgtgactatcaagaataagtatccgttgcccagaattgatgatttgtttgatcagcttaaaggtgccaccgttttctccaagatagatcttcgatcaggatatcaccagttgagaatcaaagaggaagatatacctaagacagcttttaccactaggtatggattgttcgaatgtactgttatgtcttttggacttaccaatgcccccgctttcttcatgaacttgatgaataaggtgtttatggaatacctagacaagttcgtggtggtctttattgatgacattcttatctactcccgaaccaaagaagagcatgaagaacatcttcgccttgcactagagaagctacgagaacatcaactgtatgctaagtttagcaagtgtgaattttggttgtctgaagtgaagttccttggtcacgtcatctcagcaggaggagttgccgtcgatcctagtaatgtggaatccgtaaccaactggaaacaaccaaagacagtttcagagattcgcagtttcctaggcctcgcaggatattatcggaggtttatagagaatttttccaagattgctaagcctatgacacggctgcttcagaaagatgtgaagtacaagtggtcagaagaatgtgagcagagttttcaagagttgaagaatcgtttaatatcagctcctattttgattttacctgatccaaagaagggtttccaagtgtattgcgatgcatccaaacttgggttaggttgtgttctgatgcaagatgggaaggtggttgcctatgcatctcgtcagttacgtccgcatgagaagaactaccctactcatgatcttgagttagctgcagtggttcatgcgttgaagatttggcgtcattatcttttcggtactcgtacagaggtgtataccgatcacaagagtttaaaatatatctttactcagccggatctgaacatgagacaacggagatggttggaattaattaaggattatgacatgggaattcattatcacccgggaaaggctaatgttgtagcagacgctcttagcaggaaaggctattgcaatgctacggaaggacgacagttgccattggagttatgcaaggaatttgaaagattaaatttgggaatggtcagaagaggtttcgttgcagccttagaagcaaagcccactctaattgatcaagttagagaagcccaaattaatgatcctgatattcaagaaatcaagaagaatatgagaagaggaaaagctatcggtttcttggaggatgagcaaggaactgtatggttgggtgagagaatctgcgtccccgacaacaaagatttaaaagatgcaattctgaaagaagctcatgatactttatactccattcaccctggtagtaccaaaatgtaccaggatcttaaggaaagattttggtgggcaagtatgaagcgtgaaatcgcggaacacgtagcagtatgtgatgtttgtcagcgagtcaaggcagaacatcagaaacccgccggtttgctgcagcctttgaagattcccgaatggaagtgggaggaaatcggtatggatttcatcactggtctacccagaacgtcatcaggtcatgactctatttgggtgatagtcgacagacttaccaaagtggctcatttcatcccagtaaagacaacttattctggaagtcggttggcggaattgtatatggcaaggattacagacggacaaaccaaaagggtaaatcagattttggaagacatgttgagagcttgtgctttagacttcggtggaagttgggataagaatctaccttatgcagaattttcgtacaacaacagttatcaagctagtcttcagatggctccttacgaagtactgtatggtcggaagtgccgcactccgcttttgtgggatcaaacgggagaacgtcaggttttcgggatggatatcctgagggaagcagaagaaaaggtgaaaatcattcaagaaagattgcgtgtggcccagtctcgtcataagagttatgccgacaatcgtcgtagagatctaagttttgacgaaggagattatgtgtaccttcgtgtcacgcctctttga

SEQ ID NO: 6149 - DNA, 6117 bp, Oryza sativa
  Clone ID: PAT_MRT4530_12869C.1
atgggattaccgaccctagcccttacccaagcatcggcatcgctccgtggtttcggcggtgagtcagtccaagttctaggccaagcgcaattgctggtagctttcggcacaggcaaaaacagacgcgaagagaaaataatgtttgacgttgtcgacatcccgtacaactacaatgccatcttcggctgtgcgaccttcaataagttcgaagccatttcccaccacaattatctcaagctcaagatgcctggcccggtaggagtgatcgtggtcaaggggctccagccttcggccgcttcaaagggcgatttggccataatcaacagagctgtgcataatgttgaggccgaaccacatgatccggcgaagcacgcgccaaagcccgcccctcacggcaaggtaatcaagatacagattgatgataccgatcccacaaagcttgtatcgctggggggcgacatgggcgaagaagaggttgagaacatcctagaggtgctcaagaaaaacattgataacttcgcctggggccctgatgaggtgggaagtgtttcgacagatctcatcatgcatcacctggcagtcatgccggatgccaagccaaggaaacagaagctacgcaagatgtccgttgatctccaagaagcagcaaaagccgaagtccaaaaattgctcaaggctagggtcattcaagagatcgaccaccccgagtggctggcgaatccggtgctggtgcggaaatcaaacgacaaatatcgcatgtgcgtcgatttcacaaacctaaacaaggcatggccgaaggatgatttccccttgccacggatcgaccaactcgtggattcgacagctggctacgaactcatgagcttcttggatgcgtactccggttaccaccagatccacatgaacccggccgacatccccaagacatccttcatcacaccattcggcaccttttgccacctcaggatgcctttcggcctgaggaatgccggggcaaccttcgccaggcaggtgtacaagccgtgcttcgccgtcgttccagtcgtcgccgtcgctcggggagaccgccatcgtggtcgtcatcgcgtcgccgtcctcgtccgccccttcgccgtcgctgtagaccgccggagcatcgccgtcgtcgtcaagccgaaggaccccgccgccttttcctcgacgccgccgccgtctgttcatcttccgccgtcgttttggtcatcgattccgacgtttccggagagtccgttttcgcaggagaagaatttgaagagttccaaggccactcctggtttggaatggtatattcctggtttggagatagaactgtacagccgggatggttgttcagaatggttgggcctatacaacaggatgccgtgctacaagcctgagtacttgtttggtgttgagggatttgtccaggagttgcgtacgatgtcctttgccataggatttgggactacccctttttatgcccagattcctcatgatcgtcacgaagagaagtgccgagtcaaagtcaccttgaacagtaatagtgaagatatcccctcagtgatgttcgaagctggaggaagaaactacatccatgcatgtcaggagggaagtgaccgtggcagctaccttgagactgaaggaattgagaatgatgctaccacaaagcatttggttgagatgctgtgggctatggatgaaacccgtgcagagactgtgttagcagctcaagatcgtgaagaccggaatcatgagaaggaactagccgcattgaagggagaagcaccaccgcagaaggccaggattcgtcttaccgcaaggaagagagctctatttgtccctcgctaccaattggcgccaaaggtccgtgtggtggagaaagaagttaccccagccctagcgaatcctccggtcgtcaacatggtgctcactcgcagcaacgggaatggccccaacaacaacaataacaacaacaatggagagaatcccacacttgcccaagtcctggctcaacaggtacagcttatgaacataatgatgcagcaacttcagaaccagcagaaccagggaaataatcatgcacctcctcagaacaagttagcagaatttcttcatgtgaggccgcctactttctctagtaccactaatcctgttgaagctggcgattggctgcatgccatagaaaagaagttggatttgcttcagtgcaccgatcaggagaaggtctcatttgcatcacatcagttgcatggccttgcctctgaatggtgggatcacttccgcctgaacaggactactactgaacctatcacttggcttgaattcaccgctgctttccggaagacgcatataccatcgggagtggtgtctctcaagaagaaggaattcaggtcgctcactcaggggtctcgctctgttactgagtatctgcacgaattcaatcgtctggctcgttatgctccggaagatgtgcgcactgatgaagagcgacatgagaggttcttggaaggacttaatgatgagctttcttacccactcatgactggggattatcatgatttccagaagttagtggataaggctattcgccaggagggcaagtacaaccgcatggagcagaagaaacgccggattgctcaattcaaggcacaacaagggaatagtcagaggccgcgtcttactttaggaccccagtccatgcgacagggaggttcttcgtctgttgttcgtccgcagcgtcagttcttcaacaacaatgcgggcaacaacatccgcaatcaagctccacgccctgttgcagcttcgacacagcaacagcctgccaagaaggagcaaggcagcaagcccgtggtgtgcttcaactgtggagacccaggacattacgctgacaagtgtccgaagccccgacgcgtgaaggttgtccctgcccagagcaactctactgtaccagcatcaaaggcccgtgtcaatcatgttgctgctgcagaagcccaaggtgctccggatgtgattttgggtacgttccttgttaacttagttcctgcaacagtgcttttcgattctggtgctacacattcattcttatctatgagttttgcgggaaatcatgggatggaagtagaagatcttagacgtcctttgatggttagtaccccaagtaatcaagcactctctttgcaacgtagcccctctgtcagaatagaaattcaaggagtaccatttctggccaatcttatcctgttagaatccaaagaccttgatgtcatcttagggatggactggttagccagatataaaggtgtgatagactgtgccaacagaaaagtaactatcaccagtaatgatggtcgagttgtaactgttcatgcattgtcttctgagcctttaaggtcaagactgaaccaaataactttggaagagattcctatagtccgggagtatcccgatgtgttcccagacgatttacctggtatgccgcctaaaagggatatagagttcagaatagatttggtaccaggaacgactccgatccataagagaccttatagaatggcagccaatgagttggcagaagtcaagaggcaagtagacgatttgcttcagaaaggatacatcagaccgagttcatctccatggggagctccggttatttttgtggaaaagaaagatcatacccagaggatgtgtgtagactatcgtgcactaaatgatgtgactatcaagaataagtatccgctgcccagaattgatgatttgtttgatcagcttaaaggtgccatcgttttctccaagatagatcttcgatcagggtatcaccagttgaggatcaaagaggaagatatacctaagacagcttttaccactaggtatggattgttcgaatgtactgttatgtcttttggacttaccaatgcccccgctttcttcataaacttgatgaataaggtgtttatggaatacctagacaagttcgtggtggtctttattgatgacattcttatctactcccgaaccaaagaagagcatgaagaacatcttcgccttgcactagagaagctacgagaacatcaactgtatgctaagtttagcaagtgtgaattttggttgtctgaagtgaagttccttggtcacgtcatctcagcaggaggagttgccgtcgatcctagtaatgtggaatccataaccaattggaaacaaccaaagacagtttcagagattcgcagtttcctaggccttgcaggatattatcggaggtttatagagaatttttccaagattgctaagcccatgacacgattgcttcaaaaggatgtgaagtacaagtggtcagaagaatgtaagcagagttttcaagagttgaagaatcgcttaatatcagctcctattttgattttacctgatccaaagaagggtttccaagtgtattgtgatgcatcccaacttgggttaggttgtgttctgatgcaagatgggaaggtggttgcatatgcatctcgtcagttacgtccgcatgagaagaactaccctactcatgatcttgagttagctgcagtaattcatgcgttgaagatttggcgccattatcttttcggtacttgtatagaggtgtataccgatcacaagagtttaaagtatatttttactcagccggatctgaacatgagacaacggagatggttggaattaattaaggattatgacatgggaattcagtatcacccgggaaaggctaatgttgtagcagatgctcttagcaggaaaggctattgcaatgctacggaaggacgacagttgccattggaattatgcaaggaatttgaaagattaaatttgggaattgtcagaagaggtttcgttgcagccttagaagcaaagcccactctaattgatcaagttagagaagcccaaattaatgatcctgatattcaagaaatcaagaagaatatgagaagagggaaagctatcggtttcttggaggatgagcaaggaactgtatggttgggtgagagaatctgcgtccccgacaacaaagatttaaaagatgcaattctgaaagaagctcatgatactttatactccattcaccctggtagtaccaaaatgtaccaggatctcgaggaaagattttggtgggcaagtatgaagcgtgaaatcgcagaatacgtagcagtatgtgatgtttgtcagcgagtcaaggcagaacatcagaaacccgccggtttgctgcagcctttgaagattcctgaatggaaatgggaggaaatcggtatggatttcatcactggtctacccagaacgtcatcaggccatgactctatttgggtgacagacggacaaaccgaaagggtgaatcagattttggaagatatgttgagagcttgtgctttagacttcggtggaagttgggataggaatctaccttatgcagaattttcgtacaacaacagttatcaagctagtcttcagatggctccttacgaagcactgtatggtcggaagtgccgcactccgcttttgtgggatcaaacaggagaacgtcaggttttcgggacggacatcctaagggaagcagaagagaaggtgaaaatcattcaagaaaggttgcgtgtggcccagtctcgtcataagagttatgccgacaatcgtcgtagagatctaagttttgacgaaggagattatgtgtatcttcgtgtcacgcctcttcgaggagttcatcgttttcacaccaaaggaaaattggtaccgcattttgtgggaccttataagattgtcaatagaagaggagaggttgcttatcagttggagttacctcaatctttggcaggagttcataatgtgttccatgtgtcgcaattgaaaaagtgtttaagggtacctaccgaagaagctaatcttgaacagatagaagtccaagaggatctgacctatgttcagaaaccaatccgtatcttggaaatagaagagagaagaaccagaaatcgagttatccgtttttacaaagtccaatggagtaatcactcggaagaagaatcaacttgggaacgagaagatgaattgaagtcagctcatccgcatctgttcgccagttcttccgaatctcgaggacgagattctgtttaa

SEQ ID NO: 6150 - DNA, 396 bp, Oryza sativa
  Clone ID: PAT_MRT4530_1286C.1
atgccttcccaaacaaggaaacttcgggactcggcgaaacagacccgtactcggactctgccggtataccacgagaaccttcggccgggagaaccttcgaccgggcctactgaaaccaaggacataagcaaaggcgcgggctggaggcaagcggcgaaggtcgaagagacagcatcggtgaaagccaaacggcaaaagccgtggcatcgagttgaccagcttcgccaaagaaggaccctgccggaggagcatacggttgaaagccgtgaggggaaagccttgccacgaagggcatgggttttgccaagtatcaaaccttgcaaggagaaggcccagcgggctaacatgccttctagaggcttcgccaaggactgggctgagtcacttggccattag

SEQ ID NO: 6151 - DNA, 930 bp, Oryza sativa
  Clone ID: PAT_MRT4530_12870C.1
atggcggcatcgtccaagttggctttactggtgttcactctcctgctcgccgccgctgctttcatccacgtcgcctccgccgaagaaacacatgacgatcacgacggcggcgatcacgacccgtcgccatcgccgccggaccacgaggacccgtcgccgtcgccgccggaccacgaggacgaaccgccgccgccgtcgtctccggggaaggaggacgtctgcaaaggcaaggggtgctgcgactggtccggcggcgactgcaagcactactgcgacggatacgacgacaaatcctgctgcgacgactggtccggcgactgccacaagtgctgctccaatccgaacacctttcgccgaggagaagaagaagaagaagaaatggaaagtgttaaaaggcaacccaagacggagatgcttatcaggatgcaggcgagctcggagaagaatgggaacgccaaggccatgaaggtggcggcggcgatggacggcgtcgagtccgtgacgctggccggggaaggtcggaacctgctgcgggtggtcggctccggcgtcgactccaaccacctcaccagccgcctccgccggaaggtcggccacgccgacatcgtcgagctccgcaccctgcacgacacctacccacgtggcgccgccgccggcagctacgccgccacctcaacgagcggccgcctcggcagcagcaacggcggttactactactcctcccagctctccgccgggcgcggcggcgcctacagctccggcggccaccagctgtacggcggcggctacgactcgccgtactaccaccaggcgccgcagcatccgtacgacggcggctactacccgtcgccgtacggcgccgccgcggtgcagcacgagtactacacgacgagcagcaacgacgatcccaacggctgctccatcatgtag

SEQ ID NO: 6152 - DNA, 4599 bp, Oryza sativa
  Clone ID: PAT_MRT4530_12871C.1
atgacgtcaccactgacgtcatcgtggccgtctgctattccgacgtttccggagagtccgttctcgcaggagaagaatttgaagagttccaaggccagcaaggcaactcctggtttggaatggtatattcctggtttggagatagaactgtgcagccgggatggttgttcagaatggttgggcctatgcaacaggatgccgcgctacaagcctgagtacttgtttggtgttgagggatttgtccaggagttgcgtacgatgtcctttgccataggatttaggactgcccctttttatgcccagattcctcatgatcgtcacgaagaaaagtgccgagtcaaagtcaccttgaatagtaatagtgaagatatcccctcggtgatgttcgaagctggaggaagaaactacattcatgcatgtcaggaggtggcaagaatcgccataggagagctccgcgatcgctatagtgatcagttggccgacactgagtatcgctaccatcctcgccaaccacaggggagtgaccgtggcagctaccttgagactgaaggaattgagaatgatgctaccacaaggcatttggttgagatgctgtgggctatggatgaaacctgtgcggagactgtgttagcggctcaagatcgtgaagaccggaatcgtggtaagatttgcaagctagaagacaaggtggatcgtttggagaaggaactagccgcgttgaagggagaagccccaccgctaaaggccagggttcgccttaccgcaaggaagagagctctatttgtccctcgttaccaattggcgccaaaggtccgtgtggtggagaaagaagttaccccagccctagcggatcctccggtcgtcaatatggtgctcactcgcagcaacgggaatggccccaacaacaacaataacaataacaacaacaatggagagaatcccacacttgcccaagtcctggctcaacaggcacagcttatgaacatgatgatgcagcaactccagaaccagcagaaccagctcaaccaagggaacaacaatgctccaccgccgcagaacaagttagcagaatttcttcgtgtgaggccgcctattttctctagcaccactaatcctgttgaagctggtgattggctgcatgccatagagaagaagttggatttgctccagtgcactgatcaggagaagtgggatcacttccgccttaataggactactgctgaacctatcactttgcttgagttcaccgctgctttccggaagatgcatataccatcaggagtggtgtctctcaagaagaaggaattcaggtcgctcacccagggatctcgctctgtcaccgagtatctgcacgagttcaatcgtctggctcgttatgctccagaagatgtgcgcaatgatgaagagcgccaggagaagttcttggaaggacttaatgatgagctttcttaccccctcatgactggagattatcctgatttccagaagttggtggataaggctattcgtcaggaggacaagtacaatcgcatggaacaaaagaaacgccggattgctcacttcaaggcacaacaggggaatagtcagaggccgcgtcttactttaggaccccagtccatgccacagggagacccaggacattatgctgacaagtgtccgaagcttcgacgcgtgaaagttgtccttgcccagagcaactctaccgcaccagcatccaaggctcgtgtcaatcatgttgctgctgcagaagctaaagatgctccagatgtgattttgggtacgttctttgttaactcagttcctgcaacagtgcttttcgattctggtgctacacattcattattatctatgagttttgcgggaaatcatgggatggaagtagaagatcttagacgtcctttggtggttagtaccccaagtaatcaagcactctctttgcaacgtagcccctctgtcagaatagaaattcaagaagtaccatttctggccaatcttattctgttagaatccaaagaccctgatgtcatcctagggatggactggttagccagatataaaggtgtgatagactgtgctaacagaaaagtaactctcaccagtgatgatggtcgagttgtaactgttcatgcattgtcttctgagtctttaaggccaagtctgaaccaaataactttggaagagattcctatagtccgggattatcccgatgtgttcccagacgatttacctggaatgccgcctaaaagagatatagagttcagaatagatttggtaccaggaacaactccgatccataagagaccttatagaatggcagccaatgaattggcagaagtcaagaggcaagtagacgatttgcttcagaaaggatacatcagaccgagttcatctctatggggagctccggttatttttgtggaaaagaaagatcatacccagaggatgtgtgtggactaccgtgcactaaatgatgtgactatcaagaataagtatccgctacccagaattgatgatttgtttgatcagcttaaaggtgccaccgttttctccaagatagatcttcgatcaggatatcaccagttgagaatcaaagaggaagatatacctaagacagcttttaccactaggtatgggttgtttgaatgtactgttatgtcttttggacttaccaatgcccctgctttcttcatgaatttgatgaataaggtgtttatggaatacctagacaagttcgtggtggtctttattgatgacattcttatctactcccgaaccaaagaagtgcatgaagaacatctttgccttgcactagagaagctacgagaacatcaactatatgctaagtttagcaagtgtgaattttggttgtctgaagtgaagtttcttggtcacgtcatctcagcaggaggagttgccgtcgatcctagtaatgtggaatccgtaaccaactggaaacaaccaaagacagtttcagagattcgcaatttcttaggcctcgcaggttattatcggaggtttatagagaatttttccaagattgctaagcctatgacacggctgcttcagaaagatgtgaagtacaagtggtcagaagaatgtgagcagagttttcaagagttgaagaatcgcttaatatcagctcctattttgattttgcctggtccaaagaagggtttccaagtgtattgtgatgcatccaaacttgggttaggatgtgttctgatgcaagatgggaaggtggttgcctatgcatctcgtcagttacgtccgcatgagaagaactaccctactcatgatcatgagttagctgcagtggttcatgcgttgaaaatttggcgtctattatctgttttggattatgacatgggaattcattatcacccaggaaaggctaatgttgtagcagacgctcttagtaggaaaggctattgcaatgctacggaaggacgacaattgccattggagttatgcaaggaatttgaaagattaaatttgggaattgtcagtagagttagagaagctcaaattaatgatccggatattcaagaaattaagaagaatatgagaagaggaaaggctatcggttgcttggaagatgagcaaggaactgtatggttgggcgagagaatctgcgttcccgacaacaaagatttaaaagatgcaattctaaaagaagctcatgatactttatactccattcaccctggtagtaccaaaatgtaccaggatctcaaggaaaggttttggtgggcaagtatgaagcgtgaaatcgcagaatacgtaacagtatgtgatgtttggcagcgagtcaaggcagaacatcagaaacccgccggtttgttgcagcctttgaagattcctgaatggaaatgggaggaaatcggtatggatttcatcactggtctacccagaacgtcatcaggccatgactctatttgggtgatagtcgacagacttaccaaagtggctcatttcatcccagtaaagacaacttattctggaagtcggttggcggaattgtacatggcaaggattacagacggacaaaccgaaagggtgaaccagattttggaagacatgttgagagcttgtgctttagatttcggtggaagttgggataagaatctaccttatgcagaattttcgtacaacaacagttatcaagctagtcttcagatggctccttacgaagcattgtatggtcggaagtgccgcactccgcttttgtgggatcaaacgggagaacgtcaggttttcgggacggatatcctgagggaagcagaagaaaaggtgaaaatcattcgagaaagattgcgtgtggcccagtctcgtcataagagttatgccgacaatcgccgcagagatttgagttttgacgacggagattatgtgtatcttcgtgtcacgcctcttcgaggagttcatcgttttcacactaaaggaaagttggcaccgcgttttgtgggaccttataagattgttagtagaagaggagaggttgcttatcagttagagttacctcaatctttggcaggagtccataatgtgttccatgtcgcaattgaaaaagtgtttaagggtacctaccgaagaagctaa

SEQ ID NO: 6153 - DNA, 273 bp, Oryza sativa
  unsure (1)..(273): unsure at all n locations
  Clone ID: PAT_MRT4530_12872C.1
tctggccgntgtgctgttgctgctgtgcttttggccattgcgctactgctgctgtgatgctattgcagatgtgctgctgttgctctcgcagtngcaggaatntgaaatttgagagtttggatatgtactgaattggtggatggatgtaatgatattgcatttcaagacttctggaatgtaaaatgcatgtgacattgcaatcatttgtggaatgttaattcatttgaatctgattttgtatgtgctgaaaaaaaaaaaaaaaaaaaaaaaaaa

SEQ ID NO: 6154 - DNA, 4797 bp, Oryza sativa
  unsure (1)..(4797): unsure at all n locations
  Clone ID: PAT_MRT4530_12873C.1
aaattccatgataagctgtcaaacatgagattggtcgacnggnccgggcggccgcaaggggttcgcgttggccgattcattaatgcagctggcacgacaggtttcccgactggaaagcgggcaatgccgcgctacaagcctgagtacttgtttggagttgagggatttgtccaggagttgcgtacgatgtcctttgtcaaaggatttgggactgcccctttttatgcccagattcctcatgatcgtcatgaagagaagtgccgtgtcaaagtcaccttgaacagtaatagtgaagatatcccctcagtgatgttcgaagctggaggaagaagctacatccatacatgtcaggaggtggcaaggatcgccataggagagcttcacgatcgctacagtgatcagttggccgacactgagtatcgctaccatcctcgccaaccccagggaagtgaccgtggcagctaccttgagactgaaggaattgagatcgatgctaccacaaggcatttggttgagatgctgtgggctatggatgaaacccgtgcggagactgtgttagcagctcaagatcgtgaagaccggaatcgtggtaagatttgcaagttagaggacaaggtggatcgtttggagaaggaactagccgcattgaagggagaagcaccaccgcagaaggccagaattcgtcttaccgcaaggaagagagctctatttgtccctcgctaccaattggcgccaaaggtccgtgtggtggaaaaagaagttaccccagccccagcggatcccccagtcgtcaatatggtgctcactcacagcaacgggaatggccccaacaacaacaacaataacaacaacaatggagagaatcctacacttgcccaagttctggctcaacaggcacagctcatgaacatgatgatgcagcaactccagaaccagcagaaccagggaaataaccatgcacctccccagaacaagttagcagaatttcttcgtgtgaggccgcctactttttctagcaccactaatcctgttgaagctggtgattggctgcatgccatagagaagaagttggatttgcttcaatgcactgatcaggagaaggtctcatttgcatcacaccagctgcatggccctgcctctgaatggtgggatcacttccgcctgaataggactactgctgaacctatcacttggcttgagttcaccgctgctttccggaagacgcatataccatcgggagtggtgtctctcaagaagaaggaattcaggtcgctcacccagaggtctcgctctgttacggagtatctgcacgagttcaatcgtttggctcgttatgctccggaagatgtacgcactgatgaagagcgccaggagaagttcttggaaggacttaatgatgagctttcttactcactcatgactggggattatcatgatttccagaagttagtggataaggctattcgtcaagaggacaagtacaaccgcatggagcagaagaaacgccggattgctcaattcaaggcacaacaggggaatagtcaaaggccgcgtcttactttaggaccccagtccatgccacagggaggttcttcgtctgttgttcgtccgcaacgtcagttcttcaacaacaatgcgggcaacaacatccgcaatcaagctccacgccatgttgcagcttcgacacagcaacaacctgccaagaaggagcaaggcagcaagcccatggtgtgtttcaactgtggagacccaggacattacgctgacaagtgtccgaagccccgacgcgtgaaggttgtccctacccagagcaactctaccgtaccagcatcaaaggcccatgtcaatcatgttgctgctgcagaagctcaaggtgctccagatgtgattttgggtacgtttcttgttaactcagttcctgcaacagtgcttttcgattctggtgctacacattcattcttatctatgagttttgcgggaaatcatgggatggaagtagaagatcttagacgtcctttgatggttagtaccccaagtaatcaagtactctctttgcgacgtagcccctccgtcagaatagaaattcaaggagtaccatttctggccaatcttatcttgttagaatccaaagaccttgatgtcatcctagggatggactggttagccagatataaaggtgtgataaactgtgctaacagaaaagtaactctcactagtaatgatggtcgagttgtaactgttcatgcatcgtcttccgagtctttaaggtcaagactgaaccaaataactttggaagagattcctgtagtccgggagtatcgtgatgtgttcccagacgatttacctggtatgccgcctaaaagggatatagagttcagaatagatttggtaccaggaataactccgatccataagagaccttatagaatggcagccaatgagttggcagaagtcaagaggcaagtggacgatttgcttcagaaaggatacatcagaccgagttcatctccatggggagctccagttatttttgtggaaaagaaagatcatatccagaggatgtgtgtggactatcgtgcactaaatgatgtgactatcaagaataagtacccgctacccagaattgatgatttgtttgatcagcttaaaagtgccactgttttctccaagatagatcttcgatcagggtatcaccagttgagaatcaaagaggaagatatacctaaaacagcttttaccactaggtatgggttgtttgaatgtactgttatgtcttttggacttaccaatgcccccgctttcttcatgaacttgatgaataaggtgtttatggaatacctagacaagtttgtggtggtctttattgatgacattcttatctactcccgaaccaaagaagagcatgaagaacatcttcgtcttgcactagagaagctacgagaacatcaactgtatactaagtttagcaagtgtgaattttggttgtctgaagtgaagttccttggtcacgtcatctcagcaggaggagttgccgttgatcctagtaatgtggaatccgtaaccaactggaaacaaccaaagacagtttcagagatccgcagtttcctaggcctcacaggttattatcggagatttatagagaatttctccaagattgctaagcccatgacacgactgcttcagaaagatgtaaagtacaagtggtcagaagaatgtgagcagagttttcaagagttgaaaagtcgcttaatatcagcacccatcttgattttgcctgatccaaagaagggtttccaagtgtattgcgatgcatctaagcttgggttaggatgtgttctgatgcaagatgggaaggtggttgcctacgcatctcatcagttacgtccgcatgagaagaactaccctactcatgatcttgaattagctgcagtggttcatgcgttgaagatttggcgtcattatcttttcggtactcgtacagaggtgtacaccgatcacaagagtttaaaatatatctttactcagccggatctgaacatgagacaaaggagatggttggaattaattaaggattatgacatgggaattcattatcacccgggaaaggctaatgttgtagcagatgctcttagcaggaaaggctattgcaatgctacggaaggacgacagttaccattggaattatgcaaggaatttgaaagattaaatttgggaattgtcagtagaggttttgttgcagccttagaagcgaagcccactctaattgatcaagttagagaagcccaaattaatgatcctgatattcaagaaatcaagaagaatataagaagaggaaaagctatcggtttcttggaagatgagcaaggaactgtatggttgggtgagagaatctgcgtccccgacaacaaagatttaaaagatgcaattctgaaagaagctcatgatactttatactccattcaccctggtagtaccaagatgtaccaggatctcaaggaaagattttggtgggcaagtatgaagcgtgaaatcgcagaatacgtagcagtatgtgatgtttgtcagcgagtcaaggcagaacatcagaaacccgtaggtttgctgcagcctttgaagattcctgaatggaaatgggaggaaatcggaatggatttcatcactggtctacccagaacgtcatcaggccatgactctatttgggtgatagtcgacagacttaccaaagtggctcatttcatcccagtaaagacaacttattctggaagtcggttggcggaattgtatatggcaaggattgtgtgtttgcatggcgtccctaagaaaatagtgtctgatcgaggtagtcagtttacttcaaatttttggaagaagcttcaggaagagatgggttctaagctgaactttagtactgcttatcatctgcagacagacggacaaaccgaaagggtaaatcagattttggaagacatgttgagagcttgtgctttagacttcggtggaagttgggataagaatctaccttatgcagaattttcgtacaacaacagttatcaagctagtcttcagatggcttcttacgaagcactgtatggtcggaagtgccgcactccgcttttgtgggatcaaacgggagaacgtcaagttttcgggacggatatcctaagggaagcagaagaaaagattccgacgttttcggagagtccgttttcgcaggagaagaatttgaagagttccaaggccagcaaggcaagtcacacagatcccaaacaaccctttaagcatgttgatcccatttaa

SEQ ID NO: 6155 - DNA, 4803 bp, Oryza sativa
  Clone ID: PAT_MRT4530_12874C.1
atgtctttcgtgattagtctcacacttctcaccatagtaaatgatgctataattggtaataatttgattagctcctggtttggaatgatgccacgctacaagcctgagtacttgtttggtgtggagggttttgtccaggagttgcgtacgatgtcctttgtcataggatttgagactgcccctttttatgcccagattcctcatgatcgtcatgaagagaagtgccgagtcaaagtcaccttgaacagtaatagtgaagatatcccctcagtgatgttcgaagctggaggaagaaactacaaccatgcatgtcaggaggtggcaaggatcgccataggagagcttcgcgatcgctacagtgatcagttggccgacactgagtatcgctatcatcctcgccaaccccagggaagtgaccgtggcagctaccttgagactgagggaattgagaatgatgctaccacaaggcatttggttgagatgctgtgggctatggatgaaacccgtgcagagactgtgttagcggctcaagatcgtgaagatcggaattgtggtaagatttgcaagctagaagacaaggtggatcgtttggagaaggaattagccgcattaaagggagaagcaccgccgcagaaggccaggattcgtctcaccgcaaggaagagagctctatttgtccctcgctaccaattggcgccaaaggtccgtgtggtggagaaagaagttaccccagccctagcggatcctccggtcgtcaatatggtgaatactcgcagcaacgggaatggccccaacaacaacaataacaacaacaatggagagaatcccacacttgcccaagttctggctcaacagactcagttaatgaacatgatgatgcagcaacttcagaaccagcagaaccaaggaaataaccatgcacctcctcagaataagttagcagaatttcttcgtgtaaggccgcctactttctctagcaccactaatcctgttgaagctggtgattggctgcatgccatagagaagaagttggatttgcttcaatgcactgatcaggagaaggtctcatttgcatcccatcagttgcatggccctgcctctgaatggtgggatcacttccgtctgaacaggactactgctgaacctatcacttggcttgagttcaccgctgctttccggaagacgcatataccatcgggagtggtgtctctcaagaagaaggaattcaggtcgctcactcaagggtctcgctctgttacgaagtatctgcacgagttcaatcgtctggctcgttatgctccggaagatgtgcgcaatgatgaagagcgtcaggagaagttcttggaaggacttaatgatgagctttcttacccactcatgactggggattatcctgatttccagaagttagtggataaggctattcgtcaggaagacaaatacaatcgcatgaagcagaagaaacgtcggatcgctcaattcaagacacaacaggggaataatcaaaggccgcgtcttactttaggaccccagtccatgccacagggaggttcttcgtctgttgttcgtccgcagcgtcagttcttcaacaacaatgctggcaacaacatccgcaatcaagctccacgtcctgttgcagcttcgacacagcaacagcctgccaagagggagcaaggcagcaagcccgtggtgtgtttcaactgtggagacccaggacattatgctgacaagtgtccgaagctccgacgcgtgaaggttgtccctacccagagaaactctaccgtaccagcatcaaaggcccgtgtcaatcatgttgctgctgcagaagctcaagatgctccagatgtgattttgggtacgttccttgttaacttagttcctgcaacagtgcttttcgattctggtgctacacattcattcttatctatgagttttgcgggaaatcatgggatggaagtaaaagatcttagacgtcctttgatggttagtaccccaagtaatcaagcactctctttgcaatgtagcccctctgtcagaatagaaattcaaggagtaccatttctggccaatcttatcctgttagaatccaaagaccttgatgtcatcctagggatggactggttagccagacataaaggtgtgatagactgtgctaacagaaaagtaactctcaccagcaatgatggtcgagttgtaactgttcatgcattgtctcctgagtctttaaggtcaagactgaaccaaataactttggaagagattccggtagtccgggagtattccgaggtgttcccagatgatttacctggtatgccgcctaaaagggatatagagttcagaatagatttggtaccaggaacaactccgatccataagagaccttatagaatggcggccaatgagttggcagaagtcaaaaggcaagtagatgatttgcttcagagaggatacatcagaccgagttcatcaccatggggagctccagttattttcgtggaaaagaaagatcatacccagaggatgtgtgtggactatcgtgcactaaatgatgtgactatcaagaataagtatccgctgctcaggattgatgatttgtttgatcagcttaaaggtgccactgttttctccaagatagatcttcgatcagggtatcaccagttgagaatcaaagaggaagatatacctaagatagcttttaccactaggtatgggttgttcgaatgtactgttatgtcttttggacttaccaatgcccccgctttcttcatgaatttgatgaataaggtgtttatggaatacctagacaagttcgtggtggtctttattgatgatattcttatctattcccgaaccaaagaagagcatgaagaacatcttcgccttgcattggagaagctacgagaacatcagttgtatgctaagtttagcaagtgtgaattttggttgtctgaagtgaagtttcttggtcacgtcatctcagccggaggagttgccgtcgattctagtaatgtggaatccgtaaccaactggaaacaaccaaagacagtttcagagattcgcagtttcttaggcctcgcaggatattatcggaggtttatagagaatttttccaagattgctaagcccatgacacgattgcttcagaaagatgtgaagtacaagtggtcagaagaatgtgagcagagttttcaagagttgaagaatcgcttgatatcagctcctattttgattttgcctgatccaaagaagggtttccaagtatattgcgatgcatccaaacttgggttaggttgtgttctgatgcaagatgggaaggtggttgcctatgcatctcgtcagttacgtccgcataagaagaactaccctactcatgatcttgagttagctgcagtagttcatgcgttgaaaatttggcgtcattatctttttggtactcgtacagaggtatataccgatcacaagagtttaaagtatatctttactcagccggatctgaacatgagacaaaggagatggttggaattaattaaggattatgacatgggaattcattatcacccgggaaaggctaatgttgtagcagacgctcttagcaggaaaggctattgcaatgctacggaaggacgacagttgccattggaattatgcaaggaatttgaaagattaaatttgggaattgtcagtagaggtttcgtggcagccttagaagtgaagcccactctaattgatcaagttagagaagcccaaattaatgatcctgatattcaagaaatcaagaagaatatgagaagaggaaaagctattggtttcttggaagatgagcaaggaactgtatggttgggtgagagaatctgcgtccccgacaacaaagatttaaaagatgcaattctgaaagaggctcatgatactttatactccattcaccctggtagtaccaaaatgtaccaggatctcaaggaaagattttggtgggcaagtatgaagcgtgaaatcgcagaatacgtagcaacagacggacaaaccgaaagggtaaatcagattttggaagacatgttgagagcttgtgctttagatttcggtggaagttgggataagaatctaccttatgcagaattttcgtataacaacagttatcaagctagtcttcagatggctccttacgaagcactgtatggtcggaagtgccgcactccgcttttgtgggatcaaacgggagaacgtcaggttttcgggacgaatatcctaagggaagcagaagaaaaggtgaaaatcattcaagaaagattgcgagtggctcagtctcgacataagagttatgccgacaatcgccacagagatttgagttttgaagaaggagattatgtgtattttcgtgtcacgccttttcgaggggttcatcgttttcataccaaaggaaaattggcaccacgttttgtgggaccttataagattgtcagtagaagaggagaggttgcttatcagttggaattacctcaatatttggcaggagtccataatgtgttccatgtgtcgcaactgaaaaagtgtttaagggtacctaccgaagaagctaatcttgaacagatagaagtccaagaggatctgacctatgttgagaaaccaatccgtattttggaaatagatgagagaagaaccagaaatcgagttatccgtttttgcaaagtccaatggagtaatcactcggaagaagaatcaacttgggaacgagaagatgaattgaagtcagctcatccgcatctgttcgccagttcttccgaatctcgaggacgagattctgtttaa

SEQ ID NO: 6156 - DNA, 503 bp, Oryza sativa
  unsure (1)..(503): unsure at all n locations
  Clone ID: PAT_MRT4530_12875C.1
gnannaaangggggnnggngngagggggnnnagggggggggggnaananaaancanngttatntnggggnaagncgacnnacntgtgggcnaatttngtccnnggccccccctcggagggtctacccacgcggtncgcaaacgtgtagnaanttcctcggacttcgacttcgtcttcctcctcgatcanagcagcagcagagatgaanctcncngggctcaagtcgggtggacnggncccacggagnagtncatctngtcttcgtcntggnttcccgcggcngaccaccgnnccggcngcnctnctcctgacgntctnnctcgacgngaccntccnnctctgggncccccgacnnnctctgctgctgcngcggctncncctctcnggggccanngtttcngtgggggggtgnagnnagggaannnnngaggnnaggagnaagggaaagaaagntngnnaaantgnngaggcagnaagngaggangaaaagnnngnggcaangn

SEQ ID NO: 6157 - DNA, 291 bp, Oryza sativa
  Clone ID: PAT_MRT4530_12876C.1
atgcatcgtcccggagggaagttgccgtcgcaggccgtcgagacgaagccctccgcccctagtgcctcccttcgcctccagctcagctccagctccgccgttgactctaccgaggccggcaccgggttcttgcattccacggcgtcgacgacggtgaacagcgagcagcacccttccctgcccctgatcatctccgtcgagtggagtggcggcggcgtccacacacggggaagggaaggcattggcgaagttggcgccgtggacggggagtggatggaaaacgcgatggag

SEQ ID NO: 6158 - DNA, 370 bp, Oryza sativa
  Clone ID: PAT_MRT4530_12877C.1
tggtaagagcttgacaagttgggcggagagtgcggtaggggcggaggccagcggcagcagcgcggcagggtcggtggcgagggaagaggctgacggtagcagtgcgaggggatggaggccagcggtagcagcgatggatgaggaggtcgatgggcgtgagcggccccctcccaatcctgtggtgcgacgacgagcaagcggcggcggcggcgccctcccggactgggcgtcgcgcgcggcgctaccgccagcggcgttcaagaatgggttgtctgccaggacaggtgggccgcctgtttgtgagctcggggcgtcaacgacgtcgggaatggttttagtgtttgttggcatcgagaaagcccgtgagtag

SEQ ID NO: 6159 - DNA, 848 bp, Oryza sativa
  Clone ID: PAT_MRT4530_12878C.1
agtggatccccgggctgcaggcttagctggtaagtacatagcaagtaactgaccttggaggtttggatgaacagcaacagtgtgcagagccatcacagattctcaattccagtctcacaaccgatgtgccttgcttttgcttggtttgggccctctgccaagtttcagggtcatccttaggcctgcagcaactgatgtgagatctgtgttggcctgcattctcagggttgaatgatcttcttttgtggtcataatcatactggagaaaactactgtcctgtaaagaagttaatcaccaattcaccacaatgttattgacagaggggcacaaagcatcagactatcagagatacaaaacaatggacattatctataaaagaaagagacagagagcaatggaagattctgacaaagaaacagagatcaagatatttcttcttagaggccctataattgcttgtagaaattctctatcaagaatcaaggcagtgtttaaggaggttggtactgtggatgaatcttagctgatactcgataatgagataatttttttagataatggatatcactcctgcctctacatcgcccgggcggcaggtttgatgctctgtttggagtctctactctataattcccaccgaagcatttgggaattgggagcctcagcatgacagcattttaggcagacatggccctgatactgcaactcttcaatctcctaatttgattggctgtcgaaaaaaagtctctctctgtgtttatctgtatacacatgatatgattcatttgtacctgtgacactgtaacttcgtacagcgagtgtaacttgagttgagcctttttctttc

SEQ ID NO: 6160 - DNA, 2383 bp, Oryza sativa
  Clone ID: PAT_MRT4530_12879C.1
atggaactcctctcctccaagctcctccgctcctccgtccgcctctccccctcccattgccacaactctcccttatcactcggcctcccgccacgagcccccaaacaacgccgcctcaacatctccacccgccgcacaactacccgagatgatcgataagctgtcgagcacctccgcttcatcttcgccaactccacgtccgacgacccctcctacacagaacagaagggttcggatagcaacgatggcgggcacggcttcaccactagcgagcggctgggtcgcttcgtcaactgcaagaaggtgctgaccattctcagagccgcttcgtgtgaggtgcagcgcggccagaagctcggattcgtcgaagccgctgaggccgccgaggatactgaggctagcgtcggggggcgccccgaggaccgccacggccgcggcgtccgcggggcccatgaaaacattaggatcgccttcctcagccaggagttcgaggcgtgcgcgtcgcgcccgggcagggaggagttcctcgccgcgttcgaggaggagatggtggagaggtctcgcctggagaaggtgccggtcggtcttgagggtgccaccgagggcatgcacctgatggggggcctcctcgaggagctcgacgttctgcagcggcggtcacaggacgccagggtcgggatggtcgaggtcaagatccagaagctcatgcccgagctcgagttagctccccaagacgcagaacgtctcgtcgactcattccgtggtgagtgccagatgaggttgtccctcggcaagattcttcttcagtttttggtctaattgggcatgttatatgcagaaattgaatgtgtgcaggatcccgatttgctgctgctcgatgagccgaccaatcacgtcgatttggacaccattgagtggctggagagttacctcaagacgcaggaagtgccgatggtcatcatttctcatgacagggctttcctggatcagttgtgtaccaagatagtggaaactgaattcggcgtgtccaaaacgtacaagggaaactattcggaatacgttttggcgaaggcgatttgggtggagactcaatatgccgcatgggagaagcagcagaaggagattgagcagacaaaggaactgataaacagacttggggctggagttaacgcagggcgtgcatcgagtgagcagaagaaattggaaaagcttgaaaaggaaggattgattgagaagcctttccaaaggaagcagttgaagatcagatttccagagcgtgggcaaagcggtagaactgtattgacaataaggaatctcgaatttggatttggggaagagaaattgttcaataatgcaaatctaatagttgagagaggtgaaaagatagccataattggccccaatggatgtgggaaaagcactttacttaagcttattttggggatggagaagacacaaggaggcgaagtacttcttggggagcataatgtattgcctaattatttcgagcaaaatcagattcatgtacatgatctttaccaggctgaagcacttgatttggagaaaactgtgctggatactgtgtcagaagcagcagaggattggaaaattgatgatatcaaaggtctccttggtcgttgcaattttagggatgatatgttggatagaaaggttcaattcttaagtggtggagagaaggcgaggcttgccttctgcaagttcttggtgactccatctactttattgatattggatgaaccaacaaatcaccttgatattccatcgaaagaaatgcttgaggaggcaatttcagaatacacaggcactgttataacagtttctcatgaccggtatttcgtaaagcaaattgttaacagagttattgaagtgaaagatcagactattcaggactatcaaggagattacaattattaccttgaaaggaatcttgaggccagagagagggaacttgcacgtgaggaagagctcgaggagaaagcccccaaagtaaaggccaagtcaaaaatgtcaaaggcagagaaaattgccagaaagaagcagaagatgcaggcattccagcaaagcaagcaaaaatcgaaatcgctgaaaaacgcgaagaggtggaagcgatttctgatggaggcatgctttattttgtatcaagtagcaataccaattcatgttcttccagctttcacccatacggaggaaccacacattggtgtgtttgaggggaaggggattgaggagattgggaagatacgcaaaacgaggttagcaaagagccaaagacagaggcatctactgacaagcatcctagagggtttgaggcataaatgcaacaacttaagcctctgaatggaggcatgctttattttgtatc

SEQ ID NO: 6161 - DNA, 1032 bp, Oryza sativa
  Clone ID: PAT_MRT4530_1287C.1
gacgccatagatatcacgagggaggctgtaaaggatggagctgatgccgtgattgctgttggtggtgatggaacacttcatgaggtcgtcaatggcttcttctgtaagggaagtcctgtccatgctcttgatcaaggacctgatcattccacagcgcttggtctcattccacttggaactggttcagactttgcaaggacatttggctggacaaatgatcctcatgaggcgattgatcgaattgtgagaggagtcaaatcaaaactagatataggtatgatggaagggccagatggaaacccacattattttgttaatgttgctgatatccatttgagtgctaaggcgggttatttttcttctatgtacaagagatttggcaacttatgctatgtttttggagcgctcagagccttttggggacatagtaatcgagatcttagaataaaggtaaatggtggagaatggaaaaccattcgtaaagtcactgcactatgcataggaaatgccaaatacttcggcggtggtatgaagatcactccaacagctgatcctttcgggggtgaccttgaggtcgttattcttcaagatttcaaatggcatgatttcctgctcaagcttcatagattgtatggaggaactcatctatcagtgactggtgtgtcatcgataagagttcagtcgattgaagtagcagaaaaggaagttagtgctgacatctttgtgcaatctgatggggagcattttggttttcttccaaccaaattttcagttcttcccggtgcagttgatttcttctgctagattagtatgcttcttcctgtgggatacaaaggtttcttaatccttgtcaagtcactacgtgtactttgaactagctgtgttattttgaagtgatatcgtaattgaatagttacattcattttctggcaatacatgggataaaatctgttgtcacccgccatgtaatgactataattatatgcaacatttgctaatcaaactaccataaaaatttggtggtgacggtgc

SEQ ID NO: 6162 - DNA, 296 bp, Oryza sativa
  Clone ID: PAT_MRT4530_12880C.1
gcatatgcacactacattgcattggctctccattcatagagcggcctatgtaaaccacgtgcgtctctcaccaatgttactcaaccctcatcattgattgcgactccgtcagcagcttgacagggcactataggggctgcccctgggacttagtactcgttcatactcctgcacactgataacgtctagagcccaagagcaggaacgacagataagcttctcgtctggctcagccaccttcttggaatcagacaactccgacgggcgggcattcttgccccatccgactccacggg

SEQ ID NO: 6163 - DNA, 546 bp, Oryza sativa
  Clone ID: PAT_MRT4530_12881C.1
agagctcgagaagaaagcccccaaagtaaaggccaagtcaaaaatgtcaaaggcagagaaaattgccagaaagaagcagaagatgcaggcattccagcaaagcaagcaaaaatcgaaatcgctgaaaaacgcgaagaggtggaagtgagaatcctgattcatggtatcatccacggtgccatacacctcatttgcgacaccagtgacaaggcaggcgcatggcctgctgtaatgctattatactccatatatcactagcaactggtgtacatacatcagaaaggaagtaatcctagcagtagcatcataggaggaccaaatgctgtaactaaagcaggaaatgatacatgaccttgtacataatgcaggcagtttctgatggaggcatgctttattttgtatcaagtagcaataccaattcatgttcttccagctttcacccatacggaggaaccacacattgtaaaaagttactgcagctgggcaattatatcatggtgtaaaacctatactgattggttatactgaagataaaggaagcagatc

SEQ ID NO: 6164 - DNA, 2341 bp, Oryza sativa
  unsure (1)..(2341): unsure at all n locations
  Clone ID: PAT_MRT4530_12882C.1
ggaatagggaagcgagggcggagtacggcgcgcttcgccgttgccggaggcggcgggggtgagggcagcgagcgatgccggtggcgaggccggagccgcaggagccgcgggtgatcgcccatgtcgacatggattgcttctacgtccaagttgagcagcggaggaacccggagctcagggggcagccgaccgccgtggtgcagtacaacgactggaaaggcggcgggctgattgccgtcagctacgaggcccggaagttcggcgtgaagaggtccatgcgtggtgatgaggccaagatggtctgtccaagtatcaatttggttcaggttccggtggcccgtgacaaggccgatcttaatgtttaccgtagtgctggctctgaggttgtcacaatcctctcgaccaaggggaagtgtgagcgagcatccatcgacgaagtttatcttgaccttactgatgcagccaaggaaatgcttttagaatctccaccggagttattggagttgatttttgaggaggccacaaagtcaaatatcctgggccttccttctgtaatatttgttctccacgatttaattgttgtttctctgcaatttgatatgaatgtgaccaatagggcttcatatgtgcaggatgtcagcaacagagaagatagcgtgagggcatggctttgtcgagccgatgctgattaccaggataagttactatcttgtggggctataattgttgcgcaattacgggtcaaggttttggaggaaacccaattcacatgttctgctggtattgctcacaataagatgttagcaaaacttgtcagtgggatgcacaaacctgctcagcagacagttgttccatcatcagcagttcaagattttctagtatcactgcccataaagaagatgaagcaacttggtggtaagcttgggagttccttgcaggatgaccttggggtcaatactgttggtgatcttctaagttttacagaggacaaattacaagagtactatggagtaaatacagggacgtggttatggaagattgcaagaggtattagtggagaagaagttgaggatcgtcttctaccaaagagccatgggtgtggaaagacatttcctggcccaaaagcattaaagaataatgcttctgttaagacatggctggatcgactttgtgaagaactgagcgaacggattcagtctgatttgaaccagaataagagaattgctcaaacactaactctctatgccagggcatgtaagaaaaacaagtctgattcaatcaagaaatttccttccaaatcttgtccgttgcgttatgggactgtcaaaattcaagaagatgcaatgaagctatttgaatctgggcttcatgatttcttgggttctcagaacacaaaatggagcataacatctctttctgtttcagcaagcaaaatattcgacataccaattggaacaagctctatcttgagatacattaaaggaccaaattccactgtttcaccagctaacctcgattgttcttctttacctgaggatccatctcttggtaacaagttatatatagcacctaatcatgaagaacactgtgaaccatcattatctgagaaagaagactatggaaacaatagtaatttagccaaacagtgtcaaataaaggaagaaaaaaaggtgtcaaagaagttaactgaagttaagataattttaggtcctgaaagttcttcagaaccgaataaagctgaagaacacaaggctgcgcagtatgttgataggaacaagtttaacactgctgggagtaactctgccagcagtagcacatggatgttcaacgttgaagatatcgatccagccgtagtggaagaactgccgccggaaatacaaagagaaatacatggatggattcgcccgccaaagcaatcaagctcaaagacacggggttctaccatttcgtcttacttccaacctgcaaagaggtcaggataggtgagacctatggagatggcatgatgtgtgctgaacatggttggattcgtgctcctgggcatgacctctgcccctggtgagattggtaggagcatcagcttggatgcgcctaacaaatatgggcgtcaactggaaagaccagccaaatggccatatagtgttcgcccttgtgaatgagtgatttggcattgtnaaatttaattgacagtggaacttactaatactattagtactaaaatttatttacggtcctgtatttagatataataaggcgccgctctagagtatccctcgagggcccaagctacgctacccagcntgctggtacaaatgtgccacgatganggaatncgtattat

SEQ ID NO: 6165 - DNA, 257 bp, Oryza sativa
  Clone ID: PAT_MRT4530_12883C.1
atgttaaaacttccataaaattttttttgaaatttttatcaccccgatgtttaaaattggcaaaaacgaggaggcaggactttttttttttttcctggactaatatacggggacaattaaaaaccagataccccccccggggggaattctccagggggcaatgttttaacttggggaaaaaccccattttgacgggttttttagggccaaaaaaacttgggcttgagcttgacttttatcaaaagaaacccttgcaa

SEQ ID NO: 6166 - DNA, 144 bp, Oryza sativa
  Clone ID: PAT_MRT4530_12884C.1
atggcaaacaagagggctgaggtttattacaattccttgaggttgcaagtcatcatcccaccacttgaccagaataggagggcgcgagtcttcagccgcgcgtatccggggaacttcctcttcctcaccaatcattggtcgtga

SEQ ID NO: 6167 - DNA, 2250 bp, Oryza sativa
  Clone ID: PAT_MRT4530_12885C.1
atggattttagaagtggaagctcgaatgatagtggtagtgctagcaatcctagtggtaatactggttttgatgcatcgagaccatctagtgggagtggttcaacaatgggagggcatgcaaggagcattttgaatgctgctcgtgtgattccacccaatgatgatgaaaagaagcccttgtggaggtatgttgagctgctggaaaagacagggaaaggtcaaggagggaatgcaaggttcagatgcaggttttgtaaccaagttatccatgggagttactcaagagttaaagcacatctcttgaaaattggaacaattggtgtggctacatgcaaaaaggtgacagtagatatacttgggcaacttcaagatgaaatgactagagctgaagcaatctctgcaaggaatttgcctaaggacatcccactaccaacagagagtgtgagtagggggaagagaagggctgtttcagctattgagtcaagcttcaatttagatgctcgtgccaagcttgatgctttgattgcgaggatgttctatacatcaggtattcctttcaatgttgcaagaaatccatatttcaggaaggcttttcagtttgcttgcaacaaccaacttggtggttatacccctccaaatttcaacaaattaagaacaacacttcttgttcaagagaggacaaatgttgagcgcttgctgaatgctctcaagtcaacatggtctactaaaggtgtgagtattgtatctgatggatggtctgatgctcaaaggcgaccaatcttgaattttcttgcagtgacagaagatggaccaatgtttttaaaagcaatcaatactgaaggagaaatcaagaggaaggaatatattgctgagaaaatgtttgccatcattgaagaggttggcccaaataatgtcgtgcaagttattactgataatgcatctaattgtagggctgctggattgatggttgaacaaaagtacagccacattttctggacaccatgtgttgtccatactttgaacttagccttgaagagtatatgtgctgccaaaaactctagtggggatgcttttctagaattccaatggattagtgaagtggctacagatgcatctgccataaagaatttcattatgaatcactcaatgaggctctccatgttcaatgattttagtaagctgaaatttcttgccattgctgatactagatttgcatctactattgtgatgcttaagaggtttcgtgctatcaaagagaacttaatcttgatggtggctagtgaaaaatggaatacctatagggaggacaatcaagttcaagcacaacatgtcaaggagaagattttaaatgatttatggtgggataaagtgaaatatatcattgatttctgtgagcctatctactctatgattcgtgctgctgacactgacaaaccatgcctccatttgatctatgagatgtgggattccatgatagataaggtgaaaaaaatcatctatcgtcatgaagggaaagaactagatgagcaatgttcttttttctttcatgtgaatgagatcttacacttccggtactactatgagacttggttggaggaggctccaaaccaccaagcccctcatatggatgaggagatttcagatatgagaaataagtgttttagaagatatttctctggggatgaattgagaaagatcaaacaacaatttgcagatttctcattgtttggcagtgggtttaattcctttgactcaattgaggatagagcccatatgaatgcaaagcaatggtggggaatctatggtaactctgcacctgagcttaaaaagttggcactaaaattacttggacagccaacatcatcttcttgtgccgaaagaaactggagcacttatggtttcatccatagttcaatgagaaacaagtttagttccttctcttacttatttagtttccttcttaggcctgcacgtgctgaggatttggtgtttgtgcaccaaaatatgcgtcttctttctaggagatctgaagaatactacagtggcccatcaataatgtgggatgttgcaggagatagatatgagttgtttgatggtggtgctgattttcttcaacaagctgaactgacacttgatgagcctgaccttgagagactactggaagatcttggtgcattggacatacaaggcgataacgggccttcatccacttcggttccaatggatgaaatcaacaatcaatttatctag

SEQ ID NO: 6168 - DNA, 1644 bp, Oryza sativa
  Clone ID: PAT_MRT4530_12886C.1
atggaccactcgggcccctggggcgccgcgctgtcgtggctgctcttcctcctcctcgccgtcgccgtccccgccgcggcgcacttcctcctcgcgttccgggcgtcccgcaggccgttctccgccgtcgtgcaggtctcgctatcggcggcgtccgcggcggggttcctctgcctctcctcctccttccgccgcatcggcctccgccgcctcctctacctcgacaagctccgcaccaagagcgaccgcgtcaggctcaactacaccgcgcgcctctccttctccttccgcctcctcgcctccctcgtcgcgccgtgcttcgccgcggaggccgcctacaaggtgtggtggtacgccacctccggcgaccgcgtccccttcttcggcaacgacgtgctcagcaacgcggtcgcctgctccgtcgagatggcggcgtggatgtaccgcagcgccatctacctcctcacctgcgtcctcttccgcctcatctgccaccttcaggggctccgcctcgaggacttcgccgggacgctgctcgtcgaggtggaggaagggagggccggcgtcgagcgcgtgctccgggagcacctcgacatccgcaagcagctcaaggtcatcagccaccgcttccgcaagttcatcgtcgcctccctcctcatcgccaccgccagccagttcgcctccctcctcctcaccacccgccacgactccgtcgacgatctcctcaacaccagcgagctcgcgctgtgttcagtggtgctcatgtcagggctgatcataatcctgagcagcgcggcgaagatcacgcaccaggcgcaggcgctgaccgggcagacgacgaaatggcacgcctgctgtaccatcgagccggtgccggacgaggaggcggagcccgggtcgaaccacagctcgatgctcgaggtggagcccgtcagcgacagcgacggcgagtccagcgaggagaccggcgacgaggacctgctcgagaacaccaagatcatgctgccccaagcacacgtcatctccttccagaaaagacaggctctagtgacctatctggagaacaacagagcggggatcacggtgttcgggttcacgctggacaggtcctacctgcacacgatattcatgctcgagtggacgctcttcctgtggctgctgggcaagacgatcggtttctcgtgaaagcgaggtaaaaaaaaaagttttcctgcatacaacaagttcaggttgttctggaacacatgtatgtttggttggttggtgggttgcaattttgcggatgcgtggctgtgcagttggatcctcgtgagtggagtcatttttgggtgctcacgatagtagcgtgcgcatgtatgtgtatacgcatgtatgtgtatacgtacgtatgtattgatgtttgtataaaaactggtgttagcggtgtacagattttgagtccattgcttcgttcgcgctaacaccaccttagtaaatgagcgatatatgtagagcgttaggacttgtatgtacttttgctgctttagtttgcggttgtgcacgcgtgcggcttcctgttgctaacgtgcaggctttatcatccggttttgtaatttgtatagccgatgaaagttgcagagcaaattttatttacagttcagtttc

SEQ ID NO: 6169 - DNA, 205 bp, Oryza sativa
  Clone ID: PAT_MRT4530_12887C.1
atggccatccatattgttagagtatatgcggtagcagtgtctccggtcatcgtcggtctgctcatcgtcctcctcctccggcccgccgtctccaccgccctacctccagtggcgaccgtcggcgtatcgacctccaccgggtccgcgatagacggacggcctaaactccgcttggctgccgccgccctggaggtgctcgtctccg

SEQ ID NO: 6170 - DNA, 475 bp, Oryza sativa
  Clone ID: PAT_MRT4530_12888C.1
gggaaacaagggggccccaatatttttttggaaaaacggcccccaggccggtttttttttttatagggaacccccccataacaaggggggacagagcccccccccccccccccattcccctgaaccccccccccactaaatcaaactaaaaaacccccaaattcaatcgacctttcttttttaaggaaaaaaaacagggcccaagaaagcaaaacaccccgaaaaaacccccttctcttttcatccctgaaacccgagaagggaaacaaagcaaaaaaaccccaaggctccccttttttaaaagcccaacccgaaaagggggcccactcacttgtttaaagggtcccccttgaaggccaacgggacggggctaaccctgggggggtacttgggggcataccacatctcaagggaggggggggtttcacccccttccagggtcgaaacgtacttccaaaaaccctaaaccccgggg

SEQ ID NO: 6171 - DNA, 3981 bp, Oryza sativa
  Clone ID: PAT_MRT4530_12889C.1
tttttttttttttttttttttttttttttttgatttttttttttttatccatcaatggattcagcaattcagctgatgcatcctctcttttttttttttagttttctcgttttttggttcccccactcctactacatttggtacatgatgtatagctttctcaatggcctctgtgccaatcacaaggcccaaagtaaacgaatcacaaagcttcccatcaaaaagaaaaaaaaaaaagggaaaaaaaagcccggagaaccacctcaagaatcagctaatatacaatggtgaccctcatcatctcctccaatgttgatcataagaatttctaccatctgtcggattataacgttcttgctttccatgatgatgactccattgcctcgatgcctcagggttttgactctgatgacctgaattccagggtcttgaaggctcagggttgtagcttggttgtgcatgtgctgatgaactccactgccttgaaggctcagctgggttgctgtagctctgctgcccggagctccactgcctggaaggctcagcagtgacagtgttgtagctttgttgcccagaactccactgcctagaataaggctcaggattgtagctctgctgcccgtagttccactgccttgagggctcgggaacatagccttgtgagctactaccatacacagcaccagcaccaagctcaggagaccgcgagttccgccatagggcgtctcgcgccattgtcgtctggtactccgctgcgtgagtgtagccatttcggtccagtccctgccctgggtggagggagtgggacgagactggagctgaaccataagaattgtatgtagtagcttgtgtgctgtggttactgtaagcattctggttaggatacgtcacatggtttgaatttgatggggcagcgttaaaggaattagtagtgcgtgcaggtgcagcccatcgatcaggtgtagcatttcgcccagtggcggcaatggtagcaacactagattgccaggtgtatgatgtgtaagaggcatgtgattcagccaccgaagaatgtgatacagcagggtgtgagatgctctgaacctcatgggctagtttgttcaccgctggctgatgatggaccgccactgcaacaggatcagacgttaaagcatatgattgggtgtgctggtgtaccgtggctctgctcagaagattattcataggagcaacatgttgagttgacggatttacggagatcatcgactgggggagagatgtcatattagttcgagtctgtgccggcaaagcagaagctgaagcataaggttgtgaaggcaacgaactgacaacatttgagaaactttgctgcacgctgcttgcaacaggaggtgcatttgctctgtttggcaaatgggcgtgctgcaagttttgggtcctcacttgtgatgggaactctgaactccagccatccctggctatcaggtcttttggaggagttggcgatggaagcgaagcagggatagcttcaggaccagattcgggctctttttggaccccagaattgttggccaggctatttaccagctctgatagtccaaggccagtctgcttcaacatgtccagaagtgcaacggtctgctcacttggcagggtcccaccctgattagaagttagagcaaagacaagttgtggattcttgagcagcaccgcaagcagctcaagatctggttcagaagttgcaccgttcgcaccagcagcaactgctggagatactgatgaggttgatcctatttgcttgtccacaacaggaaccacaatgtttggaggggctgtgctcacgctatccgtttccatagcgtcagcatctggtggctgctcaattggaatttccggtgtaaggctgtcatcaaagtccatttccacatcccatgggccctttggattcaacggtatgtcctttagactagcataaaaggtttccttctcacgcctgtttctctgggtttggacctcaaattctttgctgttctctccagcacctaaactccaagcagggtctatccaaacctttgcaagccttcctacaaaaagaggaactgttgcaatgaactgcctgaaattatggtaatagctgccccatgtttgtttatggggaatgactggtaacttctcaattctcatatcactacagaaaattgccatcccctgctcttccaacaatttgatagcaggatgcttgttccaagctggtggtatctgccaaataactctcttggaatccaatttctctataaagttttctttggctgttacgttcagcttcaagctaactgcaatttctggcttatcaggtggagatagtgtactttgtttagaggttgatgggctagggtcaacaggttgtttaatgattgaagtaagaggggttctgggcacaagcggtacatttgaatcaactaagccagacggtttttgaatttccatcatatgaggtttttcaatcactttgcttgtgtcaaccttgccatatttctcctgcatgaacatggcacgcatctttgctttttggatatcatctgcagataacggtctactattgttcgtagatgtgcttctgacagggttaacattcttgccagcagctttccgatttggatgttctacaagtagaactttccttttctctttggattttgtctgcagagaactctttttatttgattcgtccgcagaagcagtgagcagcaatggcgtttttctgggctcaggcattctgctctcacttgcatcatcagtcaaggcaaggatgtcctcagtaatatcaacttcagatttccaagactcatcacggagaatttcacttatcctttgtttacagattaagtccttctgagatttcttcaatgcctgacttcttacaagcactttgctcaacctggagaggaggttcctcgccttgcttgatatgtcttgtgtcctataaaaccgcaacctgttaatagtttgcaatacagttgacatatgagctggcagagctttatgtaatgggagatgaagaagcaccttgaaaacaacaagaataactgttgtttgctcctcagtaactgcttggcccaaccacgtcgatacaatggccaaaccacccattgttaagaaccaactaagaacagttacattgtttatttgtagaattgattccatcaatttgacctgtccagagaatgtattctccttccgcattagaacaaagatactttccaaaaacttcttatcttctgactcaactccagcaacttcctcttgcttagtttccttttgaatgggatcgggattagtcttagcctcggtgggttgcattacacctattggggcaacagggattgcacagctctgcaggaccaccggcaattgtaaagagatttgaggaaccaccagatgcggcaaagaaatttgttgcgcctccaatggttctaatgttctcagaggctcaataacttgagcatgtgcctcaatgtcaacaggtgtctgctcagtgcttatggagcatacattgtcaggagccttggatgactctattctcagggctttctcacgtgataagcgaacaaattttcttactcgcgtacgttgacttgcaaagaactccctcacctgtgtaacagtaaccccaaaagatgcgctaatttcccgagtttctttttttccaatagtatccttcatagcaaaaagtgactgcatggacttgacagcctttggatttaacaaatcccttggctttttacctatcttgatagacaatgccccagcagccatctcctgggcgagggggttgacgccggtgaggcggcactgcgcgacgacgaggagctggagctggtccacctgcgcgtgcagcagttcctgctgcgccgccaccatggccgggatcgagtccccgtgggccccgccgcccgactcgaccagggccccggcctcgggcttgaaggggacgagctccat

SEQ ID NO: 6172 - DNA, 489 bp, Oryza sativa
  Clone ID: PAT_MRT4530_1288C.1
atggcgtcgaacggggccgagcaattgcagcttccggttcaggatgctacgatccagggatctaagagaaatcgaaagtcttacatcgcattggtcagcgaagcgggtgcggaggtgcgggagcagctgcttccactggttgcccgtgcggccattggcgcctgcgacgacgtgaagggcgttgagagcgcgcataggatagggggtaagggtagcggggtggaggaggggggagtaccggaggggttgacgacgaagacgaagttgcggcggcggcgggaggagacggtggcggcggcggcgcggtcggacgcgaggccgacggcggccggctgggagtgggagtgcgacgctcgcggcaggatccgcgacggcctcggcgtcgctggcgcgaccatgaatgacttcgctgcttatcccgaattcccccgaccaatgcgcatcgcctcaagacgccgggccgccgcctaccgctgtgaacgaagctga

SEQ ID NO: 6173 - DNA, 447 bp, Oryza sativa
  Clone ID: PAT_MRT4530_12890C.1
atggcgttcttccacctatgcatctcgtctcttctccttgtcttcatcatctcctacatcttccaacctctgctcgatgctcgccgccgttttccgccaggacctcaccggctgccggtcatcagcaacctccacaacatcggcaagaacccgcaccacgcgttcgctcgcctcgccgaccgctatggcccgctcatgtccataaggctcggcggcgtccgcgccgtggtcgccatgtccgcggacgccgcgagggagatcctgcagaggaacaacgccgacatcaccggccgcggcggtatggactcgtggcacgcctgcggccaccacgccaactccagcatcgcgctgtggccgcgctggaagtggtgcgccatgagaatgctctgcacggaggagctgcttgttaggattatggataccatatacctaatagtagttgactaa

SEQ ID NO: 6174 - DNA, 453 bp, Oryza sativa
  unsure (1)..(453): unsure at all n locations
  Clone ID: PAT_MRT4530_12891C.1
cgaccccgcgaccgcncggttttgcggcgagcaccaaaagcgagggcagaaaaccaanccgaanccggagagagaagcgcaggaggcaaaacccacnccaanncaacccaancacccgcggcgagccgagcgggcggcggagcacgacgacgacgaggnnnaggnaggggnncngggcnngccggcgccggcggcggcggggggggaggaggttgggtggttgcgangcggaggaggnnccaggacnccgacaaggcccgcgaggccgacaccgcccacgccaangagcnggcgacggagnccgggcgggaccacgacggggcggggagccagaagcggaaggcggacagcgccgncgcgcaccgccacgngcagcggaacgacggcaagcccgccggcgcgcccgggccccgcaagagcaagagcgacaaggccgcgcccacacccccgcgc

SEQ ID NO: 6175 - DNA, 1251 bp, Oryza sativa
  Clone ID: PAT_MRT4530_12892C.1
atggaggcaacggccggcggctccaccgcctccgcggcggcgtgcccgcccgccccatcccggccgacggacccggacttcctcagctgcgtgctccagcccccgacaccctcctcctcctcctcccgccccgacgacgactacgccgccctccgccgcctcctcctccgccgcaagcccccctcggcgctccaacaccgtatggagtggcggtgcaacgggaagggctacgtcgcctaccgcaacttcctcctccgccgcatcgacggtggcgccgcctccagctgcgccagcacgtccagcaacagtggaaggtgggctccttctcctgcctatgctgcattctccgaggcggatagctggagttctagcaaggacttgagaaggaacagcggaccattgctccgcaatcttagtatcagctcaaagcagagtgatcctgagcgtcatgtcagatttgccgagcctgcatactcatttgttggaatgcattgcatctttgacgactgcaaagcatcagttacaatattgaaatttggtcgtgcaagttcagatctacttacatatggtgcttctgatggcagtttaacagtctgccaggtttctgacccaccaactgttcttcaaaaattaatagggcattctaaagatattacagattttgatttttcatctaataaccagtacatagcttcgtgctccatggataaaactatgagagtatgggagatctcaaaaggcacttgtatcagggttgtatatggggtttcttcccagctatgtatctgctttcatcctgtgaataataatttactgttagttggcaatgcaaacagggaaatcaatgccattaattttagcactgggagaatagtcagcaagcttacctttgatgatgcggttacagctttggatgttgatcacactggacaacttatttttgctggggacgctcagggttgcatatatactgttagtgtgaattcacacacgggttcattatctagaactcataagaacaagagcaataaaagcaaatctcctgttacaaccatccaataccgcaccttctctctggtggcacgttgcccagtcctcctttcttgtgttcaaaatggaaacttgtttttcttcagagcatccgtgcttctttctgtccactcctttccctcgaaaaaggagaattcattgttgttgcttgttggttacctcaatcttaaagctgttgataatccaaactctcatttctga

SEQ ID NO: 6176 - DNA, 678 bp, Oryza sativa
  Clone ID: PAT_MRT4530_12893C.1
atggacggcggaggcgaggcagagcacgggagcggcggcaacggtgaggaggcgaatgggagaggaaaggaagggagggggaagacggagggtgacggcggcggtgaccaggcggtcggccactcggcacgcgcgcgtgggaagcaacgggcggcgcggctgggcagcgggaccggcggcggggcgcggagggccggcctggcggccggcgtgagggcggcgaggcgcggagggatggtcggccggcggggcggcggcggggcgcgcggagggccggccgtcgcggtggcggagagcggccggggagagggtggcgcggcgtcatccaggggccctagcggcggcccagcggcgcccaaggcggcggcgagcgggcggtcgcggcgtcggccaggggccgctcctcccggcacgtcaaggagagcggtcggggagagggcgtcggccaagtggcgccctagggcctcggatgcggctggcgtcggccctgtgattgaggaggtgcaggtgtgggtgctgctgctgcccctaatagtaatggagatggaggtggaggtggaggtggtgctgctggtggtggtgggaggggaagagcaggtgctgctgctgcccctggtggaggtggaggtggtggtggtggtggtgggaggggaaggggaggaagaggagggaggctag

SEQ ID NO: 6177 - DNA, 2481 bp, Oryza sativa
  Clone ID: PAT_MRT4530_12894C.1
ctgccggaatgcccagggtgacaccctcctagctccccccacctcagccatcaccgccaagcccaagcaagcaagctcacgagcactccaattatctactctacttaagctccggtgagttaatccttcaccgctgcactctcacgctcacacacatgagctctagttttactatatagagagagtgtgccgtgctgtttgccaagagaggtcgagagcggtggcggcggcggccatggagggcggtggcaaggcggggtacagctatggcggccaccaccaccaccaggacgccaagctgctcaagaacctcagccgggtggagccccgccggttcggcctcggcctcgtcgccgggttcctcatcgtcacctgcgcctacttctccaccgccaagttcgacgccatccacatcgccatgataagctctccagccaagaatgcagctgggtttatgaacgcttcttctgacggctccaatcagcagcagctagatttggaccgagatgcaatgtccagggaagggagcaaggctcaggtgctcgacacagacggcgacgacaagatttcctctttggggccagatttgggccacaatgcatcagcgttggaggggaagaagaaagatgagacttttgctaaggatagcggtgatgcaagcgtgtctgcttccacagatgaggctcttgccaaggatgatgacgcaattgtcggtgctgttcttcctcccttgtcatcagaggaacccacaaacatcacacaggattcagttcttgaggatgaggagctgaaagtccaggagactgctcctgctactactaatccttctccggagaagagcagcaacaatggcagctccccctctgtggttccatccgaccctgctactctccctgttcagcagattcctcctactcaagaggcaaaggatcctcctgctcagcaaattccagctgttccagaggccaaagttcctcctgttcagcagattccaacatttccagtggttaagacagattcagaggcggcgccgcggcggaaggagtggaagccgctgtgcgatctctggtcgaaccgccgcatcgactggtgcgagctcgacggcgacgtccgcgtcgccggcgccaacggcaccgtctccctggtggcgccgccggggcccgccgacgagcgcacgttccgcgccgagtcgtggcacatcaagccgtacccgcgcaaggccgacccgaacgccatgcgccacgtccgcgtgctgacggtgcagtcgctgcccgccccggcggcgagcgcggcggcgccggcgtgcacggagcggcacgacgtccccgggcttgtgttctccgaccgcgggtacaccggcaactacttccacgcgtacaccgacgtcatcctgccgctgttcctgacggcgaggcagtactccggcgaggtgaagctgctggtgtccgacttccagatgtggtggctcggcaagttcttgccggtgttcaaggccgtctccaactacgacctcatcaacctcgacgacgaccgccgcgtccactgcttccgccacgtccaggtcggcctgacatgccacgccgacttcagcatcgacccgtcgcgcgcgcccaacggctactccatggtggacttcacccgcttcatgcgcgccacctaccgcctgccccgcgacgcgccgttcccggcgtccggcgagcagcagccgcggcggccatggcggccgcgtctcctggtgatcgcgcgcgcccgcacgcggcggttcgtgaacgccgacgagatcgtgcgaggcgcggagcgcgccgggttcgaggtggtggtgtcggagggcgagcacgaggtggcgccgttcgcggagctcgccaacacgtgcgacgccatggtgggcgtgcacggcgcggggctgacgaacatggtgttcctccccaccggcggcgtggtgatccaggtggtgccgctgggcgggctggagttcgtcgccggctacttccgcgggccgtccagggacatggggctccggtacctggagtaccggatcacgccggaggagagcacgctgatcgatcagtacccgcgagaccaccccatcttcaccgaccccgatggcgtcaagtccaaaggctggaattctctcaaggaagcctacctcgacaagcaggatgttcgtctcgacatgaagaggttccgaccaatcctcaagaaggccattgctcacctccgcaagaacagcggcaacaataacaccacacacaactagccatttcgaatttttcttcgatcgatcgccatggatgcatcaatgtacaccatcttcttgatcttttaatcttttcttcttcttttactatcttttcactagtaagtaaaagtagactgtagcagctagcagatcgaccaaatgtatgatatttcagaggaggagatcagcagcaatactatattcatctctttgttttttttaaaaaaaaaaaaaaaaaaaaa

SEQ ID NO: 6178 - DNA, 791 bp, Oryza sativa
  Clone ID: PAT_MRT4530_12895C.1
ccggccggggtcgtcgcctccgccggcgaggtgggagatgaatctctccgctaccttccgatcggcgaagatccctcgcgctcttcctcccaaatccggcgagcccgccgccgccgccttggcctcggcctcgtgcgcgcccgggaatccgtcggcggaggccgcgaaggggaaggcggcgttgggctggtgcgtctacctcatcgcctcctcccggatctcccgcacctacgtcggcgtcaccaccgatttccctcgccgcctgagacaacataatggtgaattaaaaggtggcgccaaagcttcatcagctggaaggccatggaatctcgcatgccttattgaaggatttgtcaacagaagtgaagcctgtgaatttgaatcaaaatggaagaacatctcccggaaaatggcacgcaaaaggagtgaacctagcatgacctcattgctgcagcatcgagatatggcattgagcagagtgaaaaacgatctggcctgtagccatctgaaaatcaaatggcactcaagttgaagttatttctctcatgttggtatgtacatgcatttaaaactatgcaaaaagtcacctgttactttgtaatttgtgagtgtgcttcagcataggcttttcaaattccatatttatgtttgaaaatcacttgtcttcaagctcaacactgttatctcgcagaatgatgaagctggttgttgtatttgtttatttaagattaagatatgaaaccttgaaaattaagggtccggtgctttgccaaaaaaaaaaaaaaaaaaaa

SEQ ID NO: 6179 - DNA, 756 bp, Oryza sativa
  Clone ID: PAT_MRT4530_12896C.1
atgggacaagacaagtcacagaccaatttagcgcgcggtacacgccatataaaatgcggcgtggcgcgcctgctcaagtcaccattaatgcgggtaggtgagcgctcgaaggagacatttgacgacaaggacaaggttggttttgagatagggttgaaggaattcctatcaacagtcgacgttggcccattcgactggctaatgagaaatgagggtggggagttcatggcggctgctgctcagttttttgccgggccggccaaagattggaagtttgggatagttgggggtgagctcgccgatggaggggggagagagctcgagctcgtcgtcctccgccacacggagctcgatatggccgctgacgccatcaagctcgtgctgccgagctcgagctcgccctgccgccccgctgccgccgtcgagctcgcgcccgccccgctcgcgtcttgctcgccgacgcctcccccctcacgcgcaaccgcggtcggcgacacctcccccgggccgcggccggtgacacccctccccccgcacgcacgcagcgctgtcgtcctcctcccccagtcatcgctgctcaagtcgagctcgccctgccaccctgccgctcacaccgagctcgtgtccgccccgctcacgccgagctcgccgatgcccccctcttcgcccccgctcccgcgtcgactggcggaggcacgggagaggagagaaagaaaaggaagggaggaaaaagaagaagggagaaaaaaatattaa

SEQ ID NO: 6180 - DNA, 309 bp, Oryza sativa
  Clone ID: PAT_MRT4530_12897C.1
atggggccatcaatcaaggaatctatagctagcattgtgagtagtgatcaacataaacacactagtatagtagtatgtcggcctgtcaagatcgagtttggtagcttatcagggtcagatatgagcacaacagtcttggccgcgtggaaatttttgttcctctccaacaatcgcgtattactatgccaaacagcaacatatgaggagcggggaggatcggaggtggaagaagaaattaataaacgggcggtcggcattgtaactgccaaactaaacgctaaaattgatgacgttgctgcacgcacgtct

SEQ ID NO: 6181 - DNA, 606 bp, Oryza sativa
  Clone ID: PAT_MRT4530_12898C.1
ttttttttttttttttttttgaatttctttctgctgttttttttataagctgaaaaggtagtacattgctaattagctaattaagaggacaatttaatacatcaatgatggaccctgcacattaccagcattacattgcagtagttttcagtgagcttaaaaatgaatcatcacatcacgtatgaaacagagttgatcctccaatccaatatgcaaaagccattgcgcatatggactcatgtatcagcagagtctcctatgcgcccttccccagccaaaaaccaatactgtccagaggaccatacatacagccccttggtttcccattcctgcactgcagagtcctgaatctttccttcccagtgaatttctatgtagaataatgtacatacactgatgcttcaattacaactaaattttctgtaacttctgacggtccgtgcgtcactgttgctgtgactttcacctcttgccagaaggacggtaagccgaaagccgtgtcgaaactaagatataggatgatttgggaggatctgcagtttgcggttctcaaccgcatatagcctcaacaacagcccgtttcattgtcctgggcatggatctcca

SEQ ID NO: 6182 - DNA, 1767 bp, Oryza sativa
  Clone ID: PAT_MRT4530_12899C.1
atggcggatcgaagccatgcccatgcccttgccttcctcgtcctcgccgtcctcatgccgcaaatggcgtccccgggcaagcttccacgcttcaccatgggcccgaggacgaataagcagctccgggacttcttcaagaaccatgggtcggacatggccgacctcgtcccgtcgggccagggcggccatgagcagggtggaggcagctcctccaacgggcagagccagcagggcggcggcgacagcggcggcggcggcggtggcggcaaccaggccccggccaccaacgccggcatgtacgtcttcagctacggcatcggcacgccaccgcagcaagtctccggcgcgctcgacatctccagcgacctcgtgtggaccgcgtgcggcgccacggcgcccttcaacccggtgcgctccaccacggtggccgacgtgccatgcacggacgacgcgtgccagcagttcgctccgcagacgtgcggcgccggcgcctccgagtgcgcctacacctacatgtacggcggcggcgccgccaacaccaccgggctcctcggcaccgaggcgttcacgttcggcgacacccgcatcgacggcgtggtcttcgggtgcggactcaagaacgtcggcgacttcagcggcgtgtccggcgtgatcggcctcggcaggggcaacctctccctcgtctcgcagctccaggtcgaccgcttctcctaccacttcgcccccgacgactccgtcgacacccagagcttcatcctcttcggcgacgacgccacgccgcagaccagccacaccctctccacccggctcctcgccagcgacgccaacccgagcctctactacgtcgagctcgccggcatccaggtcgacggcaaggacctcgccatcccgagcgggacgttcgatctccggaataaggacggctccggcggcgtgttcctgagcatcaccgacctcgtcaccgtcctggaggaagcagcgtacaagcctctgaggcaggcggtggcgagcaagatagggctgcccgccgtcaacggctcggcgctcgggctcgacctgtgctacaccggcgagtcgctggccaaggcgaaggtgccgtccatggcgctcgtcttcgccggcggcgccgtcatggagctggagttggggaactacttctacatggactcgaccaccgggctggcgtgcctgacgatcctgccgtcgtcggccggcgacgggtcggtcctcggcagcctgatccaggtaggcacgcacatgatgtacgacatcaatggctcgaagctggtgttcgagtcgttggcgcaggcggccgcgccgccgccgtcggggtcatcccaacaaacttcgtcgaagacgaaccaacaagcgggcgggcggcgctcggcgtctgccccgccaccgctgatctcgccggcgatttcaccaagcgccctcgtgttcctcttccgccccgtcgtcgccgtgtccgccactgccgtgtcctccttcggcgccgtgagatcagcctacgcatcgtcggtggcagcggaggcagaggcggatgagccagcggcggaatatgcggttgcagcggccgaggatccgctccggtggcggcaccgaagtctccttaacctctgccttcgacgtcttgcaccgggagaaggcggcaataaggtttttgggaagcgcttcgcgcgactgctccctgttcgtccgcgacggctcgccttcctctccgctcgcgtgttgcgcgccttcgtcgaagctcgtaaccgcgagtag

SEQ ID NO: 6183 - DNA, 465 bp, Oryza sativa
  Clone ID: PAT_MRT4530_1289C.1
atggccctcgttggcggtgacactgatgcaagatgtcctcaagaggtcctcgggaccgggtccatggccgtctccatcgtcgcaaagaacggcgcgctgctagcgtcgtccaggaagccgagtgtcatcgtcgaccaggcgttgggaactcaagcaggcgcagtcgccctccaacttgatggcgtcattggggccctgcccggcggcagcctggaggcgaacgctctcgctgctgaccgtcgtgctggtgatggtggccgtgttagcgagcacggcgatagcgcagagctgcgggtgcgcatcgtactagtgatgcagcaagtgggggttctggcattctgcggcaccggcagcgactactacggcacggggtgccaggcgggtccctgcgacgtgtcgaccaccaatgacgtgtctgtggcgagcatcgtaacgccggagttcttcgcggctctcgtcgcctag

SEQ ID NO: 6184 - DNA, 579 bp, Oryza sativa
  Clone ID: PAT_MRT4530_128C.1
tttttttttttttttttttttttttttttttttttttttttttttttttttttttttggggctacctaagcgaaaaggaaattcgctaccctaagacaagtaaaggtaccggcgccggttaccgggggtttcattcaaaggttaaaaaaatttttctttcgacctttcaaaaccggggaggggggaaaatctatacatcggggtaccacttaacaaaagcccggggttttaaaaaaaaggcgctaccccccgggatgggccgctttcctaaacaaaaaaaaggagagcaccccctttccccaaagtaccggggcattttggccaggtcctttgaaaagggttttttgacgcgccccaaaataccctacttggtcacccggggcgggttgggggaccggcaactcacccggaggaacgcccccccaaatcgaaagtttttcctggaaggttcaaccggcggtggctatgacaacaggcgggacccactattaaaaaccccgcgaatatgggagggggggaccctttggttttttgggaactttaatttaaataaaagacaaaagggccctacgggagaag

SEQ ID NO: 6185 - DNA, 2018 bp, Oryza sativa
  Clone ID: PAT_MRT4530_12900C.1
gaacataaaccattttttccaccatattaattaattcacactgtcaaccacaatgtactttttctcccacgcatacagttcccaaattactcagatcagattaatttgaaccaaactaccattcgatgcagccttcttgtcctcctgttcgtcaacagcatcagcagcagcagcagcaatcctctgatcattcctgtacacatacctccacgcaaacaggaggtacgccatgaacgccaccagctcgatgccagacaccagccagtagaagagatcgagcctgctctcgttcaggttcgccccgtccagccacccgccgccgccgcgccgccgcgtgacgcggttgacgagctcgatgagcatggtgttgagccacgccgccatgccgagcatgcagtagaagatggagctcccgatggacttcatcccgtcggacgcctcgctggagaagaactcgaggagccccacgaaggaggtgacgtcgacgacgccgaggaggaagaactgcggcgtcagccagaacacggacatcatcgccgacgacgacgacgacgccactagtctcctccgcttgacctcgacggcggcggcgacggcgcaggacgccagggaggagacgaagccaacgccgatccgctgcaggtgggtgacgccgccgacgcggcccgtggcgcggcgcagcgccggcacgacggcgcggtcgtagacgacgaggatggcgagctggaacacggtggggatgacgaagagcgtcgccggcgagacgcggatggcgcccatccgggtgtccatgatgttcccctgctgcaccgtgaaggtgagcaccacggacaccggcatgtaccccagcgccgccgtcaggaagatgggcaccatccggagcacgatcttcgtctcctccacctgcgacacgctgcacaccgaccacgctccgccattgctgccgccgccgcgcacaatcgcagccttgtcaaggcactttaatcctcgtgttcgctgaagaatctcaaggcctttagcagagtcatcgttggttggctgatacagctcatcagggttctcaggcaactgaagatttcttttcttgaatgctaccaccaggacctgcaggattcttgtgatggggctcccggccggcaccttgttccggtaggtgggcatgccggcggcccagacgaggaggccgagcagcacgacggcgccgcagacggcgaagccggcgtcccaccccttgttgtcctgcacccacaccacggccaccagcccgacgagcgcgcccagcgacacggcgaacgcgtaccagttgaagaagctcgccgcctgccgctgctccgccgcgtcgccctcgtcgaactggtcgccgcccagcgccggcaggcacgcccgcaccgcgccctcccccacgcagatcaggtacagccccagcatcagcaggctcaggttcgacccgtgcaccgtctcgcacgtccccggcgccgcctcggtcgtggcggcggtggcgccggcgccggcgcctgcagcggcgccggcgagctcgcatggcgccgggtgcagcgaggggacgtgtgcttggatggcgaggaggatgtagcccaagatttctattggggcgaagaagaggacggtgtagacgcgcttgaggtatgagtcggcgaggaaggcggccgggatggtgaagacctgcatcatggcgacgaagctggcggaggtggtggaggcggcggccacccccatgttcatcttcacactaaggtagctcacgatgttcgtcatgtttccgatgttcgacacgttgctcagccacacaagcatgtggatgtagatggacgccctgactcctccatgcttccaggtgtccaccggcctccccctccaatccactagccctgatgagctgcccatcacctctactctctctctctctctctcaactactgaatcagattgtgctctgctctgctctgctgcttatatatttctccacatgctttcagagaatgattcagaaagaaagaaag

SEQ ID NO: 6186 - DNA, 270 bp, Oryza sativa
  Clone ID: PAT_MRT4530_12901C.1
gcctcgagaaaatttttgcactgttggttaaccagattaatagggagtgaatgttttttttaagtgttgatagtttctagtcaaggaaacatcccaaatgacaggccctaaaaaaaaaaaactccattcacatgttaaaacgaagaattgctcacaccatctacatgtgcaggaacctaaatacctacttttaccccgcccaaatcacgaagccatttaaagaaaaaaaactggggtccgcgaaggttaaaaaacaccccttttaggtga

SEQ ID NO: 6187 - DNA, 1500 bp, Oryza sativa
  Clone ID: PAT_MRT4530_12902C.1
atggcggtgcactatggattaggtcaatttcagtcgttttggactgtcatgtgggcccttccaatccttgtgctcccatatgattggtcgaagtggttccgtaggcggcagaagaaggccatgggcgacgccctcgacaagatcaaagcagagctgatgctgctgggcttcatatccctgcttctcaccgtggcacaggcgcccatctccaagatctgcatccccaagtcggctgccaacatcttgttgccgtgcaaggcaggccaagatgccatcgaagaagaagcagcaagtgatcgccggtccttggccggcgccggcggcggggactactgctcgaaattcgatggcaaggtggcgctgatgtcggcaaagagcatgcaccagctgcacattttcatcttcgtgctcgccgtgttccatgttacctactgcgtcatcaccatgggtttagggcgcctcaaaatgaagaaatggaagaagtgggagtcacagaccaactcattggagtatcagttcgcaatcgatccttcacgattcaggttcacgcatcagacgtcgttcgtgaagcggcatctgggatcattctcaagcacccctgggctcagatggatcgtagcattcttcaggcagttctttgggtccgtcaccaaggtggactacctgaccatgcggcaaggcttcatcaatgcgcatttgtcgcagaatagcaagttcgacttccacaaatacatcaagaggtctttggaggacgacttcaaagttgtcgttggcatcagcctccctctgtggttcgtcggaatccttgtactcttcctcgatatccacgttgggaccaagctagagatggtgatcatgcagatggcccaagagatacaggacagggccactgtgatccagggagcacctgtggttgaaccaagcaacaagtacttctggttcaaccgccctgactgggtcttgttcttcatacacctgacactcttccatgcaacacctggtctgaagaaatgcttccatgaaaatatttggctgagcatcgtggaagtcattgtggggatctctcttcaggtgctatgcagctacatcaccttcccgctctacgcgctcgtcacacagatgggatcgaacatgaagaagacaatcttcgaggagcaaacgatgaaggcgctgatgaactggaggaagaaggcgatggagaagaagaaggtccgggacgcggacgcgttcctggcgcagatgagcgtcgacttcgcgacgccggcgtcgagccggtccgcgtcgccggtgcacctgctgcaggatcacagggcgaggtcggacgacccgccgagcccaatcacggtggcctcaccaccggcaccggaggaggacatatacccggtgccggcggcggctgcgtctcgccagctgctagacgacccgccggacaggaggtggatggcatcctcgtcggccgacatcgccgattctgatttttccttcagcgcacaacggtga

SEQ ID NO: 6188 - DNA, 3599 bp, Oryza sativa
  Clone ID: PAT_MRT4530_12903C.1
atggaaaccagagtcaagatcatgctcaagctcctgggagaggaagccgatacgttcggcaagagagccgagatgtactaccgcaggaggccagaggtgattaaccatgtggaagaggtttacagggcctacagagctctcgttgaacgctacgaccacttatccaaggagctgcataaggccaaccacaccattgctactgcatgcccacaacacgacgtctccttgttacaagaacaagacgatgctgaattcacacccatcagaatacaggaatccactactactgtacaggaggttttgaacccaaaaggacatgcgcgcccctgtgctcctcacttcaccaaacagaatgcgcaacaagagatcgacacacttcaaaaggctatacttgtcctgcaaaccgagaaagaattcgttaagagctcttacgagactgggattaccaagtatcgggagatcgagaagcagattgcagatatgcaggaccaggtatgccacatccaaaatgagtttgatgcacatgcgtccatcgaggatgatgaagcccgtgccctgatgaccattacagctcttagatcttgtcaaggcacagtagctaatcttgtgaaaatatttgaagagttagtcagggttgcagcaggggagtccgaaaaagtaaattatctccgacaaaaactgtatgctatgaactacatcattgacccgtctaagggagaagttggcacaacaaacatcgcagtgaaaaatagagtttatcctaatactcaggaaatactggagctgcaacctatatatgaaaaaatcgaaaagttttttgagctcaactctgaatctgttgtgcaggagatggcagagagagttgatgagcttgttgataaggtcatgaacttggagctcaaattcccaaagcagtccgctcaaatcaagcagctgaaggaagataatgatagcctcaaagataggttggatgatctacaagatgagatagcacttcgagatgatccaagtgacttaagtgaacagctcaagttagcagaagatgagttgaacagagtcaaggctcttgaaagatctgttattgaggaagaagttcttgttagcacagtcttttctgaagttgttagttgcatcactaatatctcaaaggcctttggatctattgatccagaggacatgactagtttatcagctgcagttgaaaatgatggggaaataacatcagatgatatcagcacctcactgccagaagaagaattcaggggtacagaggaagcaactacagatgataatttgggcagagacaggtgtagaaaagaagatgcctcaggagttgagggtcatgattcactagatggtactgatggcattgatgactgtaagaatggcaacgaggaaaactttcaaagtgaaaatcgcttaatccaagaagacttgatggataaaaggtcaatacaagctagcaataacattgatcgaattgttattccaggcaaagaaaatggttttaacaacgcatgtgaaggcaaaatagattgcagcccatcaggtaatacgaagaaatatagagacataggaaatgatgttattgacaactctgttcaaggggaaagtttgaaaggtgaacatccaccaacggtaataagtcagactcacctcccacactcagaatgtttagatactttaaccaataaaagtgactccgatgagaaagggtcatcagtggttgttactgtgaattcattcggaggcagcaagagaatacaaggcttaaggattggtggcgatgaaaattctatgtctgggaacagcttgatccaggaagaactcagagatgacaaatcactaaaaacacctggatatgttaatttggttggttctacaaaccaacatagtttgagtgatggaagcaccactgaagaaatctcattacccaaagtttctaatagttgtttcagtgatgcagatatgagactggaattatgtcatactgaagaagcaatatctgttgaagaatggccaaaacaagatggtcagctgattgccccagaaactatgaaaagtttgaacggaggcagcaaagttgactcatctgagaaaggtggccgcacttcattagagcatatgaacagcatacaggatttgaagactagtgaacttgtggatgcacattcgtcaagagtgtatcagcaagtacccaaagtaacaacaaaatcaaacaatattgctagttgcattcctcatggtgagctagagatgagaagttcggatggcagagaacatacaagacaagcaagtaccttgagcaagcctggaagcatgagcttgcgcgtcaattctagtttggttgcagaaagagatgcacctagctggcaggagtttctccttgatggcattgaaggtagagaagcattattgctagacgactacactttaattctccggaactataaagaaacaaagagaaggcttgctgaattggaaaagaaaaatgagcaacatcccaaagagacaaagacagtaataagggagttgaggaatgcaaattccatgaaatatgttgagatccagtccctaagagatctcctggatccttcagaagatatatcatccacacatagtaaaatgggttttaacagatcaaatcatcctttggacacagaaatttctgtgctggagggaatcgatgtaagacacactggtgtacggaagaatacttcacctttcgaagtgaagttcagatctgagattgatgctctggttgaggaaaacttgcagttcttggtaaggtttagcatggcttgccaccgcatgcaggactttgacagcaaatatcaggagctacaaaagggaatgggggattttgaagttaagaagacaggagaacctgatgctgcagccgagtctgatcctgctgaaaagaagttgagagagctaagaactgaactggatgtatggtttgaacagaatgcacttcttgatcaagacctgcagctcaaaaccatgtctctttgcagattgcaggaggagatagctgaagccttgcgtgctagcgcagagactgatggtggtaggtttacaccatacgaagcagccaagtttcaaggggaggtactgaacatgcaacagtctagtggtaagatcgagagggagttacagtcagcactgaagcgcatgagagaacttgaaggcaaggtcaatgacggcttgcagaagctgcgtgagagctttgatctttcatgcaggaggtcatctttggtggaggaagaaagcagcagcaccagctaccacagccaattcaaacacttcccgactagaacaagagtgccattgcggaacttcctattcggcacaaagccgaagaagaaatcaatatttgcctgcataaatcctacgttgcagaaacagttcagcgatctgtgagttggcagacactgtagaatacatgtactccctctgttccaaaaaaagacaaaccctggttccgtacccgtttgatcgtccgtcttattggctgtctttgcttgcagttggcagacactgtagaatacatgtcctccctctgttccaaaaaaagacaaaccctggttccgtaaaaa

SEQ ID NO: 6189 - DNA, 1894 bp, Oryza sativa
  Clone ID: PAT_MRT4530_12904C.1
gcgagcaagcgttcacctcaccacctcaccctgcagcgacagaaagagtctgtagtagcgtacgatcgcggctagctatcgagctccagcgagaggcgtacgtgagtgcgtgcgtacgtgcgggagggaggaggaggggagatggcagggggaggaggggggagggcgttgccggagacgccgacgtgggcggtggccgtggtctgcgccgtcatcgtgctcgtctccgtcgccatggagcacggcctccacaagctcggccattggttccataagcgggagaagaaggccatgggcgaagcgctcgggaagatcaaagcagagttgatgctgctgggcttcatatcgctgctcctcactgtggcacaaacgcccatctccaagatatgcatcccggagtcagctgccaacatcatgctgccgtgcaaggcagggcaagatatcgtcaagggcctgaagggaaaaaaggaccatcgccggaggcttctctggtacaccggagaagaagagagccatcgccggtcactggccggcgccgccggcgaggattactgcgcgcaatcgggcaaggtggcgctgatgtcatcgggcggcatgcaccagctgcacatattcattttcgtgctcgcggtgttccacgtcacctactgcgtcatcaccatgggtttagggcgcctcaaaatgaagaaatggaagaagtgggagtcacagaccaactcattggagtatcagttcgcaatcgatccttcacgattcaggttcacgcatcagacgtcgttcgtgaagcggcatctgggatcattctcaagcacccctgggctcagatggatcgtagcattcttcaggcagttctttgggtccgtcaccaaggtggactacctgaccatgcggcaaggcttcatcaatgcgcatttgtcgcagaatagcaagttcgacttccacaaatacatcaagaggtctttggaggacgacttcaaagttgtcgttggcatcagcctccctctgtggttcgtcggaatccttgtactcttcctcgatatccacggtcttggcacacttatttggatctcttttgttcctctcatcatcgtcttgttagttgggaccaagctagagatggtgatcatgcagatggcccaagagatacaggacagggccactgtgatccagggagcacctgtggttgaaccaagcaacaagtacttctggttcaaccgccctgactgggtcttgttcttcatacacctgacactcttccataacgcatttcagatggcgcatttcgtatggactatggcaacacctggtctgaagaaatgcttccatgaaaatatttggctgagcatcgtggaagtcattgtggggatctctcttcaggtgctatgcagctacatcaccttcccgctctacgcgctcgtcacacagatgggatcgaacatgaagaagacaatcttcgaggagcaaacgatgaaggcgctgatgaactggaggaagaaggcgatggagaagaagaaggtccgggacgcggacgcgttcctggcgcagatgagcgtcgacttcgcgacgccggcgtcgagccggtccgcgtcgccggtgcacctgctgcaggatcacagggcgaggttggacgacccgccgagcccaatcacggtggcctcaccaccggcaccggaggaggacatatacccggtgccggcggcggctgcgttttgccagctgctagacgacccgccggacaggaggtggatggcatccttgtcggccgacattcccgattttgatttttccttcagcgcacaacggtgacgggggcgatcggtttctgtattgatgctgtaccaaacataggagtttaatatatatataattgttacggtaaaaaaaaaaaaaaaaa

SEQ ID NO: 6190 - DNA, 1753 bp, Oryza sativa
  Clone ID: PAT_MRT4530_12905C.1
atggcagggggaggaggggggagggcgttgccggagacgccgacgtgggcggtggccgtggtctgcgccgtcatcgtgctcgtctccgtcgccatggagcacggcctccacaagctcggccattggttccataagcgggagaagaaggccatgggcgaagcgctcgagaagatcaaagcagagttgatgctgctgggcttcatatcgctgctcctcactgtggcacaaacgcccatctccaagatatgcatcccggagtcagctgccaacatcatgctgccgtgcaaggcagggcaagatatcgtcaagggcctgaagggaaaaaaggaccatcgccggaggcttctctggtacaccggagaagaagagagccatcgccggtcactggccggcgccgccggcgaggattactgcgcgcaatcgggcaaggtggcgctgatgtcatcgggcggcatgcaccagctgcacatattcattttcgtgctcgcggtgttccacgtcacctactgcgtcatcaccatggctctagggcgtctcaaaatgaagaaatggaagaaatgggaattagagaccaactcgttggagtatcagttcgcaaacgatccttcacgattccggttcacgcatcagacatcgttcgtgaaaacggcatctgggactgtcaagcacacctgggctcagatggattgtggcgttcttcaggcagttcttcgggtctgtcaccaaggtggactacctgaccatgcggcaaggcttcatcaatgcgcatttgtcgcagaatagcaagttcgacttccacaaatacatcaagaggtcattagaggacgatttcaaagttgtcgttggcatcagcctcccattgtggtttgtcgcgatccttgtgctcttccttgatatccaagggttcggcacgcttatctggatctcttttgttccactcgtcatcctcatgttggttgggacaaagctggagatggttatcatggagatggcacaggagatacaggacagggcaactgtgatcaagggagcaccggtcgttgaaccaagcaacaagtacttctggtttaaccggcctgattgggtcttgttcttcatacacttgatactgttccagaacgcatttcagatggcacatttcgtgtggactctggcaacccctggcctgaagaaatgcttccatgaaaacatgggcttgagtatcatgaaagttgtagtggggatattcattcagttcctatgcagctacagcaccttccctctctacgcactcgtcacacaggtgaaaccatttagacaaaaatcacttgtaaatgctcttggaggtctcaattccaacgtcctcaacctttccgtgtgtttgcagatgggatcaaacatgaagaagaccatcttcgaggagcagacgatgaaggccctgatgaactggaggaagacggcgagggagaagaagaagctccgggacgccgacgagttcctagcacagatgagcggcgacacgacgccgagccgcggctcgtcgccggtgcacctgctgcacaagcaaagggtgaggtcggaagatccgccgagcgcaccggcatcgccggggttcgccggagaggccagggacatgtacccggtgcccgtggcgccggtggtgcggccgcatgggtttaaccggatggacccggataagaggagggcggcgtcctcgtcggccatccaagttgacatcgccgattctgatttctccttcagtgtacaacggtga

SEQ ID NO: 6191 - DNA, 715 bp, Oryza sativa
  Clone ID: PAT_MRT4530_12906C.1
cgggctgcaggaattcggcacgaggtgaagttcaaactttccttgcggtaagacaactagacaagtgaatgaatctgcgtgttaattttagtacacttaatcctctttaaatcttacttgttagtgtaccttttgctctgaacttggactgctaatatttacttgtatggctttcactggccaatgattgttttgcctctatttcaggtcttcatgttgttcttataatgttattgcactacgataatcagaattcctgtcagcttgcttctaactaggtttagagtaaattgcatatttcaaagcttgcacacacatgcatacaattgtgttggactaattacttccaagttctcgcacttgttggtcacttcaatcacctagaggcatctattcagtacacattcttgaaaagtgttacaattgatggatccaataaaattagtttctttccactgtgaggataatatttcactgtgtataactcttttagtatagcattttcatgtacaacagggttagacccttcctttgctgtagataggtgaaccagcatgccaattatagcacacttaatcctctttaaatctcactacttaatgtaccttcagcctggagctagggctgctaatatcagcttgtatggtattccactgtacaattgattgctgtgcttctattttcaagtcttcatgttgttcttataatgttcacg

SEQ ID NO: 6192 - DNA, 387 bp, Oryza sativa
  Clone ID: PAT_MRT4530_12907C.1
atgggtgcggctacaggaggaggccaaggatttggggggaggggaagggggcaggcaggatcgctggggatgacggttggtctgcaccgtcgggtcaagcccgtcctagtcggcgtcgaagttgggggcacgctccgcctcagtcttgtctcgggcggcgacgtccacttttcctggtggctgcggaatggacaccggttcaacgcggagtgcacagagcggtggctgcgggttagcgccacctgcccagtgtgccgtgacatgccgtcgtcgtcgccgatggccacaccgctcgcggaggccgtgccgccgctgccatggccgaagtggaaaagaaaagagagagataagggagagagagggaagaggaagaagggtcggaggtag

SEQ ID NO: 6193 - DNA, 1123 bp, Oryza sativa
  Clone ID: PAT_MRT4530_12908C.1
cccacgcgaactaggagatgtgggcggacgagtgacaccaccggaattccccaccactctcttgcgtccggaagttgaggggttagcttttctgtccgcacgcgggctactcggctacacgagagcttcccgttgcgcgagcatggccaccgcctcctggccgccgacgcccaggtctccgcgaccgcaggcgccgtccgtggagcgcgccaagggcccctcaggcctcgacaaggtcgtgctccgcgaggcgcggggattctccgcggaggtccatttatatggaggtcaagtgacctcttggaagaatgaccgtggggatgaattactttttgtaagcagcaaggccactttcaagcctccaaaagcaatccgtggtggcatacccatttgcttcccccaatttggcactcatggaattcttgagaaacatggatttgcaaggaatcggttctgggctattgatgataatcctccaccttttccaacaagcactgctgctaaagcttttgttgatcttattctgaagacttctgaagaagatctcaagatatggcctcatagctttgaattccgattaagagttgctcttgggcctggaggagatttggctctcacttctcgaataaggaacaccaacactgatggaagaccattctcatttacatttgcataccacacgtacttctctgtatctgacataaggggtcataagcatgacctatgtgcctttgtgccattcaagtctgctgcaaactaccttagtgaagtgcgcattgaaggcttggagacactggactacattgactgtctgaggggaaaagagcgatccacagagcaaggggacgctattgtgttcgaatcagaggttgacaaaatatatctagatgcaccagcaaaaattgcaatcattgatcatgagaagaaacggacatttgtcttaaggaaagacgggcttccagatgctgccgttgagaagcccattaccttgaagcctggcgaagagtggaaaggaaaaatggatctctccgcagttccttccagttactgtagcgggcagttagatccaaataaggaacacttaatgtcacttatattatctggtgctgatgctgcatcttag

SEQ ID NO: 6194 - DNA, 698 bp, Oryza sativa
  Clone ID: PAT_MRT4530_12909C.1
tttttagagcgatccacagagcaaggggacgctgttgtgttcgaatcagaggttgacaaaatatatctagatgcaccagcaaaaattgcaatcattgatcatgagaagaaacggacatttgtcttaaggaaagacgggcttccagatgctgttttgtggaacccatgggacaagaggacaaaaaacatgcaagactttggggatgaagaatacaaacatatgttgtgtgttgaacctgcagccgttgagaagcccattaccttgaagcctggcgaagagtggaaaggaaaaatggatctctccgcagttccttccagttactgtagcgggcagttagatccaaataaggttcttcaaggctgagagttctaatttactacaccatgtacaggtaacggactaacgatgtacttattcgctctagctgtgcaattttgtggtggcttggctgtgaatttagaagtaaagatactgtaattgtaacagcaggcacagataagctgagtactccaccatgccttacagttctctaatgtagagagacaggaagttttattagtattggctgttgaagcaatctatcgcagtgtcatgtagctgatcgcagaaaacattagtaatttagtacctcgtgcttaagagtcatgtaccatcatttatgctatgttttcattacatgtccaacccaggttttggag

SEQ ID NO: 6195 - DNA, 660 bp, Oryza sativa
  unsure (1)..(660): unsure at all n locations
  Clone ID: PAT_MRT4530_1290C.1
gagcagcagcagcagcaacgcgcatgcacctgcagcgcgccgccgcgcccgccaccccgncggtggacgcctccgccttttgttcccctttacgntgacgggttaacttgcccccttggcgtaactccactggtccactacgcctgtttccctggtggtgaacctttgttaccccgcctccaccaacttcccaccaccaaccaataccgacgcccggaacgcnctaaacgtgtaaacgccctggggtgccctaactgacgtgacgcctacacctccacccttaacttggncgtttgncgcctccacctggnccccgccttttnccacggttcggggaccacccctggttcgttggcccgcctgcattaactgaacttcggnccaaccgccgccgcgggacgacggncgggtttggcgtatttggggccgcctccttcccgcctttcctcgcctcacctgacctccgcctggcgcctcgggtcgttccggctgcgcgcgaccgncgcgtactcagcctcacctcaaacgggcgggtaactatcgggttacttccacccgacantcacgggggactataccgcccggaaaacgacacactgttgacgcccacaaggggccagcccaaacggccacggacaccgtaaaaaaggccgccgttgt

SEQ ID NO: 6196 - DNA, 234 bp, Oryza sativa
  Clone ID: PAT_MRT4530_12910C.1
tgggttattgaaaaaaggggggtgttatttattaaaacgcttgcatatgatatcagataagtagagtcaacaagacaaaactagatttgtcaaagcacacctctctaattccacccacatacgccattatttttgggcaatagcaaacggctttccattcctcccttttaccagtctcaaaccataaactcccacaacaaattctcctaagtgacggccatattatatgtttta

SEQ ID NO: 6197 - DNA, 2145 bp, Oryza sativa
  Clone ID: PAT_MRT4530_12911C.1
atggcggcggtggacgggggtggcggcggggagctcggtgggggagggttgctcggatctaggctgatgaagcacgggaggggcaatgcgggggaccaggagcacgaatggaggccgccggcgaagcaggcgaggggcggggacgcgtcctccgccgcggccgccgtggcggccgcggcggcggtgtccgaggcggtcaaggtggcggcgccgttcctgctcggggcgtcatgtagccccggccatggcggggagcagatgctcagcttctcgtcctccgcctcgtcgtgctcctccggcggcggtggcgccgccgtggccgctgcggcggcggctggcggggcgatgccgctgtactatggcacgcctgcttcttgctcaggattgagctcagtgagcttgagcagcagcatgcagggtgcaatggccagggtgaggggtcccttcacgccgtctcagtggatcgagctggagcaccaggcgctgatatacaagtacttggctgcgaatagccctgtaccacacagcctcctcatccccatcaggaggagcctcacatcgccctactcacctgcctactttggctcaagcacattgggatggggatctttccagctgggctactccggcagcgcggatccggagcccggccggtgccgccggacggacggcaagaaatggcggtgctcgagggatgcggtcgccgaccagaagtactgtgagcgacacatgaaccggggacgccaccgttcaagaaagcatgtggaaggccagcctggccatgccgcgaaagcgatgcccgcggcggtggcagcagccgctgcctctgctacccagcctagtgctccggccgcccacagtggcggagctgttgctggcctcgctatcaaccatcagcaccagcaaatgaagaactacgctgccaacactgccaatccttgctctctgcaatatagcagggatctggcaaacaagcataatgagagtgaacaagtgcaagactcagacagtctctcgatgctgacttccattagcacgagaaatacgggcagcctgtttccgttctcaaaacaacataatccttttgaagtgtccaactcaaggccagattttggcctagtatcacctgattcactgatgagttctcctcatagctccttggagaacgtcaatttgctcacttcgcagagtctgaatgaacaacagagttcagtttcccttcaacactttgtggactggccaaggacacctgcacaaggagctctcgcatggcctgatgctgaagacatgcaagctcagagaagccagctctcaatatctgctccaatggcgtcttctgacctgtcatcagcctcaacatctcccatccatgagaagctgatgttgtcaccacttaaactgagccgtgaatatagtcctattggtctcggttttgcagcaaatagagatgaggttaaccagggagaagcaaactggatgcctatgttccgtgattctttgatgggcggaccattgggagaggttttaaccaagaataacaacatggaagcaaggaattgcctatcggagtctctgaatcttttaaatgatggctgggattcaagctcagggtttgattcatccccagttggtgttctgcagaagaccacctttggatcagtatccagtagcaccggaagcagtcctagactggagaatcatagtgtttatgatggcaacagtaacctgcgggatgatctcggttcagttgttgtaaatcatccgagcatccgcctggtgtgagctttttgatcaccaaaaaatgcaccaagatgacaggcatgaggaaacgattcaatcagttttccccttgttacatatcgttatgacgtcttcaagtgtgagcatttacctcggtgctttgtcattcagactaatcttgtgtttttggtatttctgctctgttatttttcctttgctttgtaaccttccccttggatcttgacgtgatatgacgtgtggtatggatggatttggtactccattgtggcatatcatcttaaaataccccatcctgggaggtcataatccgggatgaatgtaatccgatccttgtcttgcttaaaaaaaaaaaaaaaaaaaacaaaaaaaaaaaaaaaaaacaaa

SEQ ID NO: 6198 - DNA, 637 bp, Oryza sativa
  Clone ID: PAT_MRT4530_12912C.1
aaatgaaatgttgaacaaatggtgtaccgtaaactccctccgtcccaaaataagtacagttttgcactattcacgttcaacgtttgaccgttcgtcttattaatttttttttataattagtatttttattgctattagatgataaaacatgaatagtactttatgtgtgactaaatattttcaaatttttcacaaattttttaaataagacgacggtcaaacgttgagcacaaatatctacgctggcacttattttaggacggaggtagtacatcagactgcttgaatcgcccattgtttggcattcagtatttgtttggcatttcgatgaagcttcaaccttgccaagcccatacaatatcctttagtgctggtctcatctcttgtttgaccttttgatactcaagtgtatcaccatttatcttcgtaaattccactaaatgaaaatctggtgtgatctgaaatatttcagcattgatggacattacacctttccttccaggttttgatccttccatctttaacaaaccaccatttttcttcaagaattttaatcgtaaattcttcgcaacatcctcaagctttttggtgattgtcgtagctgtgttagtggatgtaaattttgattcctctttgc

SEQ ID NO: 6199 - DNA, 408 bp, Oryza sativa
  Clone ID: PAT_MRT4530_12913C.1
atgacgacggcgacggcggcggcggcgagaacggctcaagtcataagcaagaccgccgtcctgagcaccgccggcggcggcggcagcaagatccacggttgctactcctcttcttcctcctcttctcgcgctccagtggtggtggcgacgacggcgtcgttcttgcaccggtgcttcctctgccgccgggagctcgccggcggcgacgacatatacatctacagaggggacagggcgttctgcagcgacgactgccggttcaggcacatcttgacggaggaggaggaggaggacggcgacatgagctgccgtgccaaggacgccgcggtggcggcgccaactcgccgccgctctcgcaaccggcgggccgtcgccggctgcggcggcagcggattttttgcgtactaa

SEQ ID NO: 6200 - DNA, 504 bp, Oryza sativa
  Clone ID: PAT_MRT4530_12914C.1
taaactagtggatcccccgggctgcaggcgagcatatatactaagcaaaatcatgagcactgcacgagcaaatcttgtcccgcgtcgtctgtcgatcatggcactgctcttcttaggaattgtgattggtgatgcggctagagagactccgggaacatattttgactgtctcttggtagaatggatggtcataatcctacggtggcttatggtgcaaatactcactcagacagatggggaataggaacaaaggagagacccccgctggccggccgttctagtgaaagaaaactagggaccactacagatggagcacgttttgaaacccttagttggtattgcagttatatcgggaaaaaatgtctgtagaatatatgtatatctagccagtccagtcctagagtaataagtgtggcagctttctttcagtacatcgctatactataatgttgaaataaataaatctcttggactgttggactgtaaggcatgtatgctgtattt

SEQ ID NO: 6201 - DNA, 465 bp, Oryza sativa
  Clone ID: PAT_MRT4530_12915C.1
gctagatctctccactgcaagctcatgatcttgtctgctcccagatggtactgatgcatatgctcttgccaaaaaggttggtcgatttaaacagattaaaagaaccgaaggagtgtcaacgacagacattgttggaagaatgcttctttgtgttagagagagatcagcttctgatagtcacaaccactcttcactacaaaggcagttcagtcacgggcatggccagaaaattgatgatagtggatctggaagtggaactaggatatctcattttcttcctacatctcggagaatagtcagttctcaaatagcaggggtccaggtccagattctcggatagtgtacatagatggtgcatttgatctattccatgctggacatgttgagatattgcgcctcgctcgagagcttggagatttcctgcttgtgggtattcacacagaccagactataagttcaacaaga

SEQ ID NO: 6202 - DNA, 510 bp, Oryza sativa
  Clone ID: PAT_MRT4530_12916C.1
atggagagctcacggacgtgcgagggaagcggcgcttcggcgatgattggcggcaaccgaatggtggccgaggtgcgggcggcactggcgagtgcgacgacagcggcttcacggcgtggcggcggctctagcggcggcggcgcgcggccggagatgggcggcggcagtggagctcgggtgtggcatggggggcgggagacgcggggagagagcggcgacgtgggcgcgaggtgcgggcggagtaggggcgcggataggcgggaaaggcagcggcgcgggctgttggagctccgactccaacggccggaggtgcgaagccaggatttgatgattggggtcgctggccacgagacgcaggaactcaccggcatcttggccgacagtcggcttgaggggtcccaggccaaccgtggtacaaccgtggcacctctggtggcttggccactgcgcacctgtgagctcaagcaacatggaccactaatacccgatgattccgcaatccctccctag

SEQ ID NO: 6203 - DNA, 635 bp, Oryza sativa
  unsure (1)..(635): unsure at all n locations
  Clone ID: PAT_MRT4530_12917C.1
tatgggagggaacactggatctatgtaggcatgatacattggagctgatgcccaaagactggctaaatgttgactagaggtggtcaacctatggacttcttcagtgatccaaataagggcctcagctttcacaggatggatgatagcatccagaggccggtgctcatcatcactcccaactctctgctgatcccactgtttcaagaggacattggtaaggtaatgtaaaggctgcttatataactgcttcaccgacctgccgagtcccagccatgttgtgcatgggattacagatccacggtgagcaggaactggaatatgcttcatatactcttgatacatttcagccttcctgatcagtgcacctgcatgatctcattatagtaagcatggaaatttgtatctctacgtagaaaggaaaaaaaccttaaaactacatgagccaatccaaagcagaacgctattgtccatgtctgaagggtataaaatccagctcaaagcctctattagtgcttgagaactaaaattatactccatccacaagagttagacctatttcatatttgagtnttttttccaaataagttgttcctanttgtagtgtctatgcntccaaaacttaaatggagaggtaa

SEQ ID NO: 6204 - DNA, 1224 bp, Oryza sativa
  Clone ID: PAT_MRT4530_12918C.1
ataccacactattttcagcccgtcatattatattcattatattagtatcaaataacaagtgggctaagcccatataggcccaacaatcaaacataataacaacccatataggcccaacaatcaaacataataacaacccatatagcacaaaggtttcagcccaattagcatccaacacaacccgacaaacatccaatacaacacaaaatttacaacacagcaaatcagcaaatcaactggttggccactcgtgggaagtgtttgaactgtggcagggataggaagtgcttgaactgcggcagggacagggacaagaagtgcttgaactgcggcagggccggcctcagcttgctcaggaacccctcaagtaatgaagtttcagcaataaatcacatatatgaatcagggaggatagatatacatagaatcatgctgctgctgctgcttgccttccgcctgctgcatcgcgcctgctgcctgctgcctcgccacttgccacgcgcatgtccctgccgcgtagccgtgctgccggacaccagcgcttttctctgaagcatactttgttggtcttcatctccatgctcagttacttgagcaacctactaacctcgtcagcatgcagagatccagagtttagatgagccaagaaatctagacaggctgctgcaagagaggacatggtgaagcagcagcagtaatcagccgccgccggtgccggtgacgccgaggtctggcttgccgtcgtcctcgctgcttgtatgaggccagctccaagaacccccgctgcttgctcctgtaaagcagcctgttgatgaggcgacggcggctctcgtcggaggagaggtcgatggtggtggtggaggcgctgttctgctgggtggtggtgctggtggtggtggtgaaaccgaagaggacgcggtggggggggagggagtcttgacgaatccggtggcagtgcgggaagaggaggaggagaggcgctggtcggggtcgctccaccacggcacctggtcgagcgtcacggccggctccacccggcccacgcccggcgccgccgccaccgaggaggccgaggccgacgcggccgtcagcgagcgctggatcagagccgcgagcgcgagggtttggggaaaggaggaacgagatctggactcagatttggaatcgtggctgagggaagtagcaattttgatgcgattttaccagaataaccctggtagttaa

SEQ ID NO: 6205 - DNA, 1333 bp, Oryza sativa
  Clone ID: PAT_MRT4530_12919C.1
caaatagcccaactcgtgatcgcgccgccgccgtgctctccaccggagagagcggcggaggagagcaagtggggataggggccggtcggggttgcgacgggcgggaccgggaggaggcgcacgctgcctgaatgccggcgccgtcgacgacctcgccggtgattggttcgcgctccggcgatcgtcgagggccgcccgggcaggcggcgtgagcggaggaggcaaagcgagtggccgcgagacctccgcttccattcgcgcggctcgcagttcgcaaacccttaccaaatttgctccagctagaaaggctaagatcaagaacagagcatcttccgcgccttccacaagcacaccctggattcgcaattattgggggcaactccactataaaaagcgaaccatccacaagccggaaggccgcgcgaaggcaggaggctcacaacaaggacaagacaggaactgaaagccctagtactaagaacagcaaccacctctgaaagctttacaagttcgcaggggcttaactgcgaatgaacatccagaggaagccaggagactggaactgcaaatcgtgccagcatctcaacttcagccgccgggactactgccagcgctgccataccccacgccaggacctgccgcttggcgatggttatgtcccaggtggtgtgctgacctccctggacattcgcccgggcgactggtactgcaactgcggctatcacaactttgctagccgagcaagctgcttcaaatgtggcgccattgtgaaggaccttccagcaggccaaggtggtggtgttgccaacggtgactttgcccgtgccctcgacagcagcgcagttcgtgctgggtggaaggcaggcgactggatttgcacaaggcctggttgcaacgtccacaactttgcaagtaggattgagtgctataggtgcaatgcacctagggaagcaggtaatgtgaagtaagaaaagactgacgcgaccaaagatcgtgagacgtgacgagctggccgaggatgaataaagtgactgctgtcagttgtcacattcacaggctgcgatccagaaactatggatgggactatgtagtaacgtgctgatatattattgctaagtgttactactgcatggttgcaagggtggtagaagtaccttagcttccaagatcgttgtaatgtgtgagtttaattttggcgttttaagtaataagtctagtgattgcaggattgtacggggtaatgtacttgcattatccattataatcttaagcatccaatataattatgcaaaaaaaaaaaacttaaaaaaaaaaaaaaaaaaaaaaaaaaaaa

SEQ ID NO: 6206 - DNA, 1729 bp, Oryza sativa
  Clone ID: PAT_MRT4530_1291C.1
ccggccgggctctcctcctcccctctctccccgtccggcaacgcagcctcaccgttcaggcggcggcgaaggccgcgtcgaccccgcgcagcgcaggcgccatggccgccccggaggcaccctcctgctacgttgggatcgcgcggcagtccgccgccttccgcctcatgaagcaaatggggtgggaagaaggtgaaggccttggtaaagataagcaaggcattaaggggcatgttagagtgaaaaacaagcaggacactcttggtgttggtgtagacagtcctcataacaaatgggtatatgacaccacccaatttgacaatatactaaagaaactgaaagtgcaatccgctactcctgctataaaagaatttgaagatgatgtaagcaattcaccagatagtacaccaaaggaagctaaaccaacaaacaatgaagttaccaaagttacccgaccccaaggaagatataagaaaagagagagggggaaaagtgtgagcggttattcagcaaaagatcttgaaggcatacttgttcgcaaaagtgatgacaattgcaaagtggaccaggaagttgaaccaacatgctgtgatgaacctgatcccatcatctgtcaagatacagtatcgcaagctgatgatgtgaactggtgggggcataaatttggattcaagtcaggcggctttctaggagcaaaatcgcgcaagaacaaatcttctgctacaaaaggtacttcaaatgtccgccagacatttggggaagaagaccaagaaaacctatacaatcttgttcaggacaaagccacatctggaaagcagggtcttggcattaagggtctgccaattaaagttgccggacaccgttggaaagggaacaaaacttcttttggtgatagcgatgaggaaaattcaacccaatccaatgaattatcagagttggaagaagatggtgatgaggaagaatctgctaacgataatgaactaatagacgccaatgtgaatactgtgaaagaaatgtgcgtggatgttaaccataacataaacataaaaccaaggtcaagaaactttgcaaaacaattcttcgtcaggccccagcacaatctatgaaattgaaggaacttaaggtagctgttgaagcacattcagagtctatgttctccaacttctcttgtaggcgtgaagctctattgttcttaaagaggaagctccaaggaagcagaaaattcaatattgatggcaaacgggttcagcttgtatcgtaaattacgaagccgttgccgttcgggtgtgacatgaagccattgtggtcatattaggctattcgtgcttctgatgagtgtacgaaagtacggagcacagtatgctctgcggtatagatgtaagaagtaatacccctcacgcatggggggtcaaattttgcaaaacttacgaacggctgagatgctaattgtgtgtacactgttgagcacatttgattttcatcgttcatttccctacagcaaatgtttggcagccggttctgaataccaatgcacgtcaatattgtaccttagctggtgtattagctggtgtatcttcaattattatacttctgtttggagcgtgtggtatatgattggagctagtttgtgccaacgttcagaggcgctctacttttagaacatgttttttgcacattgattttgttattatctgaaaccggtgccaccccctgatgattttgcctgatt

SEQ ID NO: 6207 - DNA, 414 bp, Oryza sativa
  unsure (1)..(414): unsure at all n locations
  Clone ID: PAT_MRT4530_12920C.1
aacatgatacaaaaggcacatctttattatatcgataatatttacattattacaaaggcacttcaggcctaacaaataaaaataaacaacagcggacttagcgggcctacggcgtccatcattcacagngggctacaactgggtgtataangcgcaggactcgcacctttaggactttcgttcttcaaaaagcttctctttacnnntgaagggnngggacgagnanntagatgcaagaattgaggtattacnaccacagttacttcaagcaaggtcacaactgggnnnagatgcanntgaataanntgcaagggggttacagagggngttaataatatagggttttaggttttttgcagttaaacaaaccatttaaaagttcaacttagtttgccccaaaagctatttttataa

SEQ ID NO: 6208 - DNA, 3088 bp, Oryza sativa
  Clone ID: PAT_MRT4530_12921C.1
atggaggtgtgctgctgctcgacgtcatcggccgtgcccgggaggaggttcgcggcggccggggcggcggcggcggcggtggcggcgaggtggggcgccgtgggggtcgggagggcggtggtgctggcgcacccgctgcgcccggcgccgcgcggcgggcacgcgcacgcgcagcaggcgggcgcgcggcgggcgcggcgcgcggtcgtcagggcggtgttcgagcggttcacggagcgggcggtgaaggcggtggtgctgtcgcagcgggaggccaaggggctcggggagggcgccgtggcgccgcgccacctgctgctggggctcatcgccgaggaccggtcggcgggcgggttcctctcgtcggggatcaacatcgagcgcgcgcgcgaggagtgccgcggcatcggcgccagggacttgacccccggcgcgccgtcgccgtccggctccgggctggaaatggacatacccttctccggcagctgcaagcgggtgttcgaggtcgccgtggagttctcccggaacatgggctgcagcttcatctccccggagcacctcgccctcgcgctcttcaccctcgacgatcccaccaccaacagcctcctcaggagcttgggagcggatccgagtcaactagcatcagtagcgcttacccgactccaagcggagcttgcgaaagatggcagagaacctgcaggagcatcatctttcaaagtacccaagaaatctcctgctggagctggaagatctgccttctcgaaatctttaaattcaaagaaagaaaagggtgcgcttgatcaattttgtttagatctgaccacacaagctagtggcgggtttattgatcctatcattggccgtgaggaggagattgaaagagtagttcagataatatgccgacggacaaagaacaatcctattcttttgggtgaggcaggtgttggcaaaactgcaatcgctgaagggttggctcttcgaattgcaaatggagatgtccccatttaccttgtggcaaagcgtataatgtcattggacgttggtctacttattgctggtgcaaaagaaagaggtgaactggagtccagggttactagtttaattcgtgaagtccgggaagcaggggatgttattcttttcattgatgaggttcacaatcttattggatctggcactgttggaaagggtaagggtgctggccttgacattggcaacttgctgaagcccccacttgctagaggtgaattgcagtgcattgcagctacaactctagatgaacacagaatgcattttgagaaggataaggctttggctcgccgcttccagccagtattagtagaggagcctagtcaggatgatgctgtgaagatattacttggtcttcgtgaaaaatatgaaacatatcacaaatgcaaatttaccttagaagccatcaatgcagcagtttatctgtcagcaagatatattcctgacaggcagctccctgacaaggccatcgatctgattgatgaagctggcagtagagctcgaatggaatcatttaataggaagaaagaagggcagtcttcaatcctcttaaagtcgccagatgaatactggcaagagataagagctgctcaaaacatgcatgaagtggtgtcatcaaaccagatgaagtattcccctcgtcaagagaatggcagtgctgccattaaagcaccaagcgaggacatgaatgagttgacatctgaactccaagttgaggaaccaattgtagttggaacagaggaaattgcaagagttgcctcattgtggtcagggataccagtccagcagttaactgctgatgatagaaagcttctcgtaggactagatggtgaactcagaaagcgtgtgattggtcaagatgatgctgttatggcaatatctagagcggtgaagagatcacgtgttggcctcaatgatcctgacagacctattgccactctacttttctgtggtccgacaggagttggtaaaactgagcttactaaagctctagcagctagttattttggatcggaatctgctatgcttagattagacatgagcgagtatatggagaggcacactgtgagcaagctcataggctctcctccagggtacatcggatatggtgaaactggtactctgacagaagctgtcaggagaaagccatttactgtagtattacttgatgagatagagaaagctcaccctgatattttcaacattcttctccaaatttttgaagatgggcatctgtcggactcacagggccgcagagtgtccttcaagaacacattgattgtcatgacatcaaatattggttctacatcaatttcaaagggaagacgaagcatgggtttcatgacagaagatactgaatcaagctcatatgttgcaatgaaatctctagtaatggaagagttgaaggcatttttccgtccagaattgctcaacagaatcgatgagatggttgtattccgtcccttagagaaaactcagatgctagcaattcttgatatcatcctacaagaagtgaagggtaggctgttagcccttggaataggcctcgaggtgtccgatgcaatgaaggacctgatttgcgaagaaggctatgacaagagctacggtgcgcggccactgaggagagccgtcacccacctgattgaggatgtgatcagcgaagcaattctatttggcgaatacaagcctggggacacgatactgatggatattgatgccggggggaaaccttgcatgagccacctgaatgagaaggttgtccagttgtctgatccgacacggacattctgaagttctgcatactgcttagtacattagagatctaatttttcattctttcgagattactaattctttttttaggtagacacggaatatatttcattatgtacataacagttaagggattcgttcgggcatataaatgtcttaaaacttgtacccaactgtatgttgttgttcaattgatcaaatatattattttgaaaccaaaaaaaaaaaaaaaaaaaaaaaaaaaaaaaaaaaaaaaaaaaaaaaaaaaaaaaaagggggggcctcgtgc

SEQ ID NO: 6209 - DNA, 345 bp, Oryza sativa
  Clone ID: PAT_MRT4530_12922C.1
atgccccgcccgcggtgggttggcacttgggcacggcggtctctcggaacgggagtgagtggcagggacgtgcgcggcgcggcgcgggacgtgcccccgagcggtggcagccggaacggggaatacggggtgtgtgtctgggtgatgctgtcgcgcggtcgcgggcgcgacatcatgatggatcgctggcgacttcggctgccgggggccgccaccgccacctcccgcgtttgcgtctccaccggtttcgggccccggcgcggcatcattgggcaactctgcatctcgggggagagcggggtgacggctacccaaggaaggagccaaatagatatgggactccac

SEQ ID NO: 6210 - DNA, 349 bp, Oryza sativa
  Clone ID: PAT_MRT4530_12923C.1
atggcggcgcgtcctcgtgacgagggagcgaagagtgggcagggatgggatgatggtgcatctgtgaatcaacaattcaatctaagaaatcagcaggggcttggccgacatcctcagcaccaatttcagcggccgccggttatcccgaggcgtgatcaggatgatacattgcggtcggatcagcaagctcggaagttccaaccacaggtaaagctaacggcaatgcaagggcagcaactggagaaaccgctggcagatggtgggcaaccacaaactactgcgataatcaaggccaaaaagccgaggccaccactgtcacctgtgcaaaacgagtggacacatagcacag

SEQ ID NO: 6211 - DNA, 361 bp, Oryza sativa
  Clone ID: PAT_MRT4530_12924C.1
cgccgtcctcgttttttttttttttttttttttgattgtaggtcttttatgtcttttctcttttcttttgttgcggcgccgcgtggtcgcatttggcgggacgcgggagaggtagacgcggcggtggaacccccctgcacaagcggaggctgttgcgggggggcgtggggggcgaattttttttttccctgggtgggtggttagagggcttttcgccccgggaaacccccgggccccgatacccccccgactgggtgttgtgctgtttctgccccggttggcttggggtccctgcccccgatgggccccacccttcggttcccccagttccccccggcgccccccccttctcccccccccc

SEQ ID NO: 6212 - DNA, 312 bp, Oryza sativa
  Clone ID: PAT_MRT4530_12925C.1
atggcgtccgggtggtatctcgtcgttgccgggctagctaccatggctgcatgggcacggggcaacttcgacgcggttgtgacgatggggtgtgtcggggatggcctcgacagtgagcttctgcttctacgacaccattggacctatgcaccgtcttcgccactgcaaccgccggcggtagttgtgatgggattttcttctctgcccaacaccacgacgtgccagatcgacaccaggtgtcatctcgggctttggatgaaaatatcgtcttgttccgatggcaatggcacacaaatgttaggaccttcttag

SEQ ID NO: 6213 - DNA, 775 bp, Oryza sativa
  unsure (1)..(775): unsure at all n locations
  Clone ID: PAT_MRT4530_12926C.1
tttagtcttaccagttaataccctttatatcagtaacatgagcattatccaagaaattgtgttcagtttttattttctttaagtgttagctcagttaattattcttttaagcggtaacttgcttaattttttttgtctctagacattcatccgagttttggccttgcagcagctatccactggcttttgcagttatctacttgtagctggacgtttgaatatatttttttgaatatagatggaaaaaaatcaacacgacaatgaaaagagaactcttttctagtgaaaatgttctgtttttacaacaatgccaattatctgtggtcattcttaagtaattgctaaagaacataaaacatcacatatataactaacaacttcctcttaatccatatgttttacagccattgtcatttcgacatttcccttgatcattttaaacttttaagtaattgctgaagaataaaacataattcatatgtcactttctccaaatctatttcagagggcaacacttgcaattaatctgttctgaagtttctcatttacgtgtttactcccaaggaattattccattgaagtatcattgtctagctttgctatttagccaggaaatgcattcaatcctttattctctttgagtgattcctgtgagttcagctggccatacatgggataaaatgcttaagagcttatgagttgtgtgtggatacgcgaagaaacanacatggtattgaatatggaaatatgctagcctggttcgttttaaactaaa

SEQ ID NO: 6214 - DNA, 155 bp, Oryza sativa
  Clone ID: PAT_MRT4530_12927C.1
ctttcctcctaaaaccactaatggaaatttaattggctcaaagaactgaatgcctttcttgagtgtatattcagcaatgattgccaaaaaaaagaggtgatgaaaaatcaacttgccaaacatgctacaggagaaaaactcgtttacacatattg

SEQ ID NO: 6215 - DNA, 415 bp, Oryza sativa
  Clone ID: PAT_MRT4530_12928C.1
atggcagcgaacctgtacatgcgacaccacgggccgcaccctgcaaggggcgtgccgacgtgccatggaagcactggccggagaggacgtaaggaacaagaagaaaagaaggaaaaagcaagaaaaattgatgaccaccggagcacgacagccgcggcgtcgcatgccttgccgtcgatccggcttcatcccacgccgagcatcgtcgccggctctcgccaggtcgcgcacgctgtcgttcccacctcgccggcagccacacgaaagcgatctgctgccgcccgaccctgtcgcgccctcatcgagccgtaccaccggtcgcacggattcgctggcatcggcgccgatctgcctagccgccggccggccgtgccccgcacggtaccgccacgcgcgcagtcggacggccccgccg

SEQ ID NO: 6216 - DNA, 183 bp, Oryza sativa
  Clone ID: PAT_MRT4530_12929C.1
ttgcccgaagatcaacggcgtcgttgtctggtcatagctcttcggccagccagtcgcctgcggatagtcataccgaaggcattggtaatggaagacgccggcgtagacatcagcagatgccacgaccttcgaatagccgatgggtcgcgccgccgtcgccttcgaatcgctgatcgagataac

SEQ ID NO: 6217 - DNA, 168 bp, Oryza sativa
  Clone ID: PAT_MRT4530_1292C.1
cggacataattactggtcctgaggcctaatacttggcctcgatggccaaatttgctatctggagtaaattgaaattcgttatcatgtcctaacatcatacctagcctgaaatctgtaatgccggctcacactggggcgcctaatgagagacctaaccatcatgagttg

SEQ ID NO: 6218 - DNA, 1371 bp, Oryza sativa
  Clone ID: PAT_MRT4530_12930C.1
atggctaggactaggagcaacaaggatcggcggcgacggcgagcctgcggcgaggaccgcctcagcgctctcccggacgacctgctccacctcatcctgcgccgcctcgacacccgcgacgcgctcgccaccgccgcgctgtcaaggcgctgggcggccgtcccgcgcgagctccccgccctcgatttccgagtcaccgacctgctgccgccgcgctaccgccggtgccttgccatccgcggcaaggccaggaggctgtcgctggaggtgttcgacttcgacgcctccccctgcatcaaccagctggtcgtcaccgccgtcgattcctggggcgtcacggacctcgaggtgtccgccgtgccgacggggccgatcatgcacccgccgccggtctacagcttcccccttcgccgcatcagccgcgaccccggcgcgtcgcggctgcggaggctcaagcttcgcaactgcctgccccctccgctgcaggggtttggctcgctcgccactctcgtcctgcaaggattgccgtgctcgacgcggcccgccgtgtaccgcgtggtcgccgcgtgcccgcagctgcaatccctgcatctcagctcctgcaggtcccggaaattcgggtgcccgctcaccttggacgcgccgatgtcgcggatcagggagctcgtcgtcgacggcggctacatggcggtcgagatcaggtcgctccccatgctggagagcctcgccagcaatggagacgccgtgtttctgacgcaccccgacgccgcgccgtacctccagcgcgtgagcctcgagcacgccattggctccctgcaaggggacgagctgttcccggccatagagcgcaggaggctgcgcttcttgatccccagcatcagggagttcctccagaacgccaatggcatcaccgatctcgtcctgcgcttcaccgggccgtacatgtggatcttgttcttgccgacgagccctttcgccccgatgcccaagctgcggcggctcctcgtcgccgacgtgcctccatcctgggacgcatcgtggccacgcctcctcgtcgaggcgacgccattgctggagaccctccatgtccaccatcacagcgaagaggaggagctggtggtgatgggcttccggagcgcggagaggcggcatgtccagctcgtgaggttcgccatggaggcgtcgacgtcggcgctgcgccgcgtcgcgctgtacaagcgtgggcacgtcgagcacaagggccccggcgcctgggaggccgcggcggcgagagacgacgcgtggagcgacgaggagaggcgcggcgtcctggagcagatcacggaggggatgtgctgctcgacaggccaagtacaagtcatcctcggatga

SEQ ID NO: 6219 - DNA, 537 bp, Oryza sativa
  Clone ID: PAT_MRT4530_12931C.1
atggctaagcaatccctagtcctaactctaatcatgttagaaccccaagttgacaaagaaacaaggtacaacaatagcatggctacggcaatagggctgacgtcagcacggggaagcgcggcgctgacatgcggggcccaccggtcagcggctcgggagagggaggaaaggcgccggcacgcgggacccaccggtcagcggctcgggagaggagggcaggagggcggcgacacgcggctcggcttggctcaaggccaaccgaccggccgcggcgacggcggcggcgcgcatgcaagcgcgttgctggcaacggcaaccggcggtggaggcgacggcgcaaaaggcgacgcgaaagcggcggcagcggacggcggccatgaccgaaggcgacggcgagcgcgggcggcggcgacgcacgaggaaacggggaaggaaaggagaggggagggagtcctcaccggggaaatggcggcgaccggcgacgaggaacgacggagggaggtcgacacgcggcggacggcgaccgggatgacctag

SEQ ID NO: 6220 - DNA, 1169 bp, Oryza sativa
  Clone ID: PAT_MRT4530_12932C.1
acttcagagccaggttcttttgggagggcctggaaaagaagaggaaataccacatgttgaaatgggaagctctaagcagacctaaggaatttggaggacttggtttcattaacacaaagataatgaatagggctctgctttgtaagtgtatttttaagctggaatcaggagctaatgacccctgttataggatgttgaggatgaagtatatgagaaatgggggaggtttctttcaatcttctgctgagggggggttcacaattttggaagggtttgcatgaagtgaagaaatggatgttccttggtagttgttataagctgggaaatgggaagtcaattagattctagagtgatgtgtggttaggtgaaattcctttaaaaacccagtatcccatgttgtttagtatttgttataaccctaacagtactgtgaaacaaatgaacactggggggaatgggagattggtataagaagaacaattggaaacagagaagtaggggagtggaatgatttgcatgagaaactaagagacatacagctaacttctaacaaagacacaatgatatggaaattgacaaaaacaggagaatttactaccaaaactctgtatagggagatgatcttcggaggtgtcaaagatactagatcccacaggatatttggaaggcttcaatccctctgaaaataaaaatcttcttttggttagctttgaaaggaaggacccaaacagctgctcaactaaagaaaatgaagtagggggggggggggggttgctaactgcaaattgtgtggtagagaagaagagattgaccacttgctgttcatgtgtgcccctgcacagtttatgtggtgttgcctgagagatgcttttaattgggacaaagtgcatgtgtgtagagctgatctcctagagattatgcaaaagaagagtgggaagaactctgtttggctcacaatttttgatgcctacttctaggccatatggattgctagaaatgattgggtgtttaataataagctgctagctgatgtgattaacctgcctcacaaagttgtctccttcttaatacagtggaggcgcttagcacctgcgaaactgaggggagacctggatacattaaggggatctctgcttgccagcattagcgagacaggagggcttggcagc

SEQ ID NO: 6221 - DNA, 251 bp, Oryza sativa
  Clone ID: PAT_MRT4530_12933C.1
attatgtaagcagcagagggtagccaggacgcggtgcctttcatcgggaacaccggcaatccgcctagcctgcccctgaccatgggtcatgcagaaaagagatgccgaatggcagaagctaaccgaatcaacgcgagcgaggagaacaaaggcaaggatcttgagcacgtgcagtggtcaaaagctttaaaaagttcatcaggccctgattgaaagactatgagaagacaaattaacttacgtgaccatga

SEQ ID NO: 6222 - DNA, 173 bp, Oryza sativa
  Clone ID: PAT_MRT4530_12934C.1
cagcagtggagtgcctcttcgagaccctccgctgcctccccggtggctgcgagcgcggcgcctccacctgcatctcctgtagctggttcatcatggaggacgacgaactgggctggtcaccactgacggcctttcacccgtcaaaggtgaagagagttatcactgaccactga

SEQ ID NO: 6223 - DNA, 438 bp, Oryza sativa
  unsure (1)..(438): unsure at all n locations
  Clone ID: PAT_MRT4530_12935C.1
aagaaagacgtaaaggaaaataatttatagtgtggtgggagtataagtatattgcacatagcnatatatggggtgaggtagcaccagggattaagtcaagaacgaaccgcgcgctaggctttaatctattgagcagatatgtttttactgctgctcaagcttgatgtgctcatgtggtggttcgggtattgacttaagtctctgacacaagaagttaaaaaaaaaccctagtagggattctcctatatgtatctagcacgtttgtttaacccttttgtgaagagtttttccttcttgtagttctccatatagagagatggtgtgacctgatgagagataaatcgtagtatgtatcccccagatggcttgtgtttgtttattttgcataatgttaattaattcgtttgggttgatgtataaaaaaaaaaaaaaaaaaaa

SEQ ID NO: 6224 - DNA, 168 bp, Oryza sativa
  Clone ID: PAT_MRT4530_12936C.1
atgcgcggatgtgcacgccgacgaccgtgcggggctgcgtcggaggaaggtgacgccgacgatcaggataggcttcctctgcgcattctgttgatgccggcgtcgcccatcgcaacacggggagacgttgtcgccccggtggccgatgaggctgccggctgcccctag

SEQ ID NO: 6225 - DNA, 180 bp, Oryza sativa
  Clone ID: PAT_MRT4530_12937C.1
gcacgagcatatcatccctccgcccgcttcctcgccgcgatccaggaggatgccgccggagcaagccggagacctcgccgccgttatggtctctgcttctggagagtggagactctggttagcatcagtcacttgacccactacaaataatagaagttcctggggatgaagaaccaataa

SEQ ID NO: 6226 - DNA, 1641 bp, Oryza sativa
  Clone ID: PAT_MRT4530_12938C.1
atcaagatggatagaatggtaatcaaacctgcagctgtttgctccgagaaagaagacaacgagaggatgcaaaaggctgcttctacattccaccccaccctgtggggtgatttcttcgtcgattaccagccaccaaataaatctcagcatgcatgcatgaaagaaagggctgaggtgctgaaagaagaagttaggtgcatggtaaagggctcaaaggaagtatctgagatactagaccttgtgctcacactgcaacggcttggtttggatagctactacaagaccgagctagatgatctactgtattccatttacaattccgattttgacgataaagatctaaacctagtttcccttcgattttatcttctaaggaagaatggctatgacgtgtcgtctgatatatttctatgtttcaaagacaaggaaggaagttttgctgctgatgaagtaagaagtctcttaggcttatataatgcagcacatgtaaggactcgtggggacaaagtacttgacggagccattgccttcacgaaatcccaccttgaagctaaattggaacatttgaaatctccgttaaaagaagaagtatcttctgcccttgaaacacccctttttaggagggttcgaatattagaaacaagaaactatatcccaatctatgaaaagatctctggacgaaatgagaccatacttgaatttgcaaagttgaatttcaacctacttcaatttctttattgtgaggagctaaaaaagatcacattatggtggaaggagcttaatattcaatcaaatctaagtttcattcgagatagaattgtggaaatgcatttttggatgacaggagtatgccctgaattcaattattctctgtcacggattatacttataaagatgatggcctatatcactataatagatgatatatttgacacccatggtacaacagaggagagtatgatgcttgcagaagcgatatacaagtgtaatgaaagtgcaatagtgagacttccagaatatatgaagtgtttttacttgtatttattgaagacatttgacttgattgaagaggaacttggaacaagtaacagttatcgtttaaagaggttagttcaaggatactcacaggagattaaatggcgtgatgaacattatatcccaaaaacagtcgatgaacatttggaggtttcaagagcgactgttggagcttttgagatagcatgtgcttcctttgtggtaatgggtgatatcataactaaagaaactcttgattggcttttgacatatccggagcttctcaagtgtttcacaacattggcaagattatccaacgatatagtttcaacaaagcgtgagcaaaaaggggagcaccatgtttctactgtgcaatgttacatgtttcagcatggaacaacaatgcatgatgcatgtgtgaagataaaggagttgattgaagattcatggaaggatatagtaaaagaataccttacactaccaacagaacaaccaaaaatagtggctgagacaattgttgatcttgcacgaacagccgattacatgtataagaaaacagactcatacacttttgcgaatacaattaaggatatggtagcatcgttatatgttaaaccgatatagttc

SEQ ID NO: 6227 - DNA, 201 bp, Oryza sativa
  Clone ID: PAT_MRT4530_12939C.1
cagatcctgatcctagcatatctgcgccctcgcttaaacatgaactcgaaatcacgctggcggggagaattgctcgtaatgcacacactgcacccagcatctaacggacctggacgcatgtacagagcacgagtgataggtgtattgaattacacttgtggaaataaataagttccattcttcgtggataaaaaaataaaa

SEQ ID NO: 6228 - DNA, 606 bp, Oryza sativa
  Clone ID: PAT_MRT4530_1293C.1
gaccgtacgtgtgagatgaataatcaaaaggcaaaatttgctacaggaacaggtaaagagcgtgtaattagctggaagacaccataaaaacgtaatacggctgatggacactacaaaaattgtgtgattggctatatgatactggccgcattattttattatttctggatcaaaagaggtgagatattttccaaaatgaccaaattgccccttctctttccttcgttttctcctttgctcggaacgcgcgcggtggggcgaggttggcgcaagctcaatggcggcagtggggcggcagacggagaggcccgccgtcgatggccctcaggctatacctcgacatgtccagcggcggcagtgcgctggcgccgggaggagggtagtcgagtaggcagagccccgcggcgtggtgaggtcgtagtatatgcggccgtcgaggccgttgagggagttggtgaaggagacgaggacacaggagagcgcgagcagggcgaggagggcggcggtgaggagccaggcggtgccgtcataggagccgttgttggtgaaggtgggcgccagcagcgcgggcccctgcctcgcgcccgccgggggcaccttcgctag

SEQ ID NO: 6229 - DNA, 3372 bp, Oryza sativa
  unsure (1)..(3372): unsure at all n locations
  Clone ID: PAT_MRT4530_12940C.1
atggcgacggcgcgcggcgcggcaggcggcaacggcgcggcgcggggcgcggcaggcggcagcggcgcggcgcgaggcggannnnnnnnnnnnnnnnnnnnnnnnnnnnnnnnnnnnnnnnnnnnnnnnnnggcgaacacgccatatggggcccacgctccggctgttgcccgcgcgcggccccccggtactgcaagaggcgggggggaactccggggggcgcgagggggtgggcgtcggaggagcttctttaaacaacctggcggacgggaggcggcgccttgcttgctcggtctggggacggggggcaagactggggcaaacggccggcaaacgggggtttatatagggcgggggagggctttgggggggaggggcaataccacccacaaggacatggtggccgtggaggagcaggctactaccatggtgctgctcctcaacctcgcggcgcaatggtggtgcagcaatggcgtcctgctactgctgctgctgagcatttgggccatcaacagccctacaacagcagtgtgagaccacagcactattatggtccgtctgccatagctcccgagctgctccaagcaatggatgctccacatgagcctgaagagattgtccaacatgttcctgtgtccaccaaatcatttaaatttcctcaccgccctggaagtgggagtattggaaccagatgtttagtgaaggcgaatcacttctttgctcaactgccagacaaggatcttcatcagtatgacgtttcaatcaccccggagcttacatcacgaattcggagccgtgctgtgatggaagagttggtgagactgcacaagatgtcatacttgggaggacgtcttccagcctatgatggtaggaagagcctttacacggccggtccattgccgtttacttcaaaagaatttcgcatctctttgcttgaggaagatgatggttctggttcggagaggtgtgcccctattccttttttgcgtcagaaaacatataacgtggtgattaagtttgctgcaagagctgatcttcaccgtcttgagcaatttctagctggaaggcaggcagaggctccccaggaggccttgcaagttcttgatattgtcttgcgagagttgccaacagcaaggtagatttctttgaaacattacgtagaatcagatatgcaccctttggtcgatccttcttctctcctgacctggggaggagacgatccctcggtgagggactagaaacctggcgtgggttttatcagagcattcgtcctactcaaatgggcttgtcactgaatattggtaaaactctctctgttatatgtcggcaactgctttctttgagccgttaccagtcatagattttgtcatacagcttttaaatactgacatccgctcgaggcccttatcagatgctgagcgtgtcaagatcaagaaggccttaagaggagtgaaggtaggagttactcaccgtggcaacatgcgccggaagtatcggatatctggtttgacatctcaggcaactcgggaactgacttttcctgttgatcaaggaggcacagtgaaatctgttgtacaatattttcaagagacatatggatttgcgatccagcatacctatcttccttgtctgcaagttggcaatcagcagcgtccaaattacctaccaatggaggtctgcaaaatagtggaaggacagaggtactccaagagactgaaccagaatcagataagggctcttttagaggagacatgtcagcgcccacacgatagggagcgtgacataattcagatggtgaatcacaactcctaccatgaagatccttatgcaaaggagtttggcattaagatcagcgagcgtctggccttggttgaggcacggattttacctgcccctcggctcaagtataatgagactggcagagagaaggattgcttgcctagagttggtcagtggaatatgatgaacaagaaaatggtaaatggtggtagagtcaggagctggatatgtgtcaattttgctcgaaatgtgcaagagagtgttgctagtggattttgtcgtgaactggcccgcatgtgccaggcctcaggaatggcaagtatccctgagcctgttcttccatctatgtatgcacgtcctgatcaagtggaacgagctctgaaagccaggttccatgatgcaatgaacatacttgggccacagcacaaggagctcgatttacttatcggactgcttcctgataacaatggttctctttatggtgatttgaagcgtatatgcgaaattgaccttggattggtttcccagtgctgttgcacaaagcaagtgtttaaaatgaacaaacaaatcctagcaaatcttgctctgaagataaatgtgaaggttgggggaaggaacactgtactggttgatgcagtgtcgagacgcattccgttggtaactgacaggcctactattatattcggtgctgatgtcacccatcctcaccctggcgaagatagcagcccatccattgctgctgttgtggcctcccaagattggcctgaagtgacaaagtatgctggtttagtttctgctcaatctcacagacaagagttaatagatgatctgtataacatcacgcatgatcctcatagagggcccatctgcggtggaatggtcaggtatatgctattaattggtgatgtccacattttcagggaacttcttatatccttcaaaagatcaactggtcaaaagcctcaacggataatattctatagggatggtgttagtgaagggcaattttaccaggttctattgcatgagcttgatgcaatccgaaaggcttgtgcatcactcgaagcaaattaccaaccgcaggtgactttcattgtggttcagaagcgccaccacacgagattatttgcacacaaccacaatgatcagaattcagtcgacaggagtgggaacatattgcctggtgagtattgtactgttgttgactccaagatttgccatcctacggagtttgacttcttcttgtgcagccatgctggaatcaagggcacaagccgtcccgctcattaccacgtcctgtgggatgaaaacaacttcacagctgatgcgttgcagaccctcaccaacaacctctgttacacttatgcgaggtgcacacgatccgtatctattgttccaccagcatactatgctcatctggcggcgttcagagcccgtttctacatggagtcagatagctcggacagtggttcaatggcgagtggtcgtggaggaggttcgtctacatcgcgcagcactcgtgctgcaggtggtggagccgtcaggccccttcctgcactcaaggacagcgtcaagaatgtcatgttctactgt

SEQ ID NO: 6230 - DNA, 375 bp, Oryza sativa
  Clone ID: PAT_MRT4530_12941C.1
atggatgatgtggatttttcatcaaatcaagccacacctaaggagtcaatgaactccaaggatgatgcgaaggtgcagccttcatcagggcaaacaccaaacaagggaaattattacatgggccacgcgaatgccatcacgatgatgtttcagtatatacgtgatggttgccggcgtgttgagagttccatggaagactacaagtgcaagaaggtagaagaaggacatgatatcgacatcagagattatcctagccatacctcatccggtacctacggggggtggcaagagggatctagtgccatctctgatctcgacgagttcgtgctcaaggaggaagactaccctgtcatcgactacgggttggttatctag

SEQ ID NO: 6231 - DNA, 2973 bp, Oryza sativa
  Clone ID: PAT_MRT4530_12942C.1
atgggatcaaggagaccaagactgcctgggtttggtgaggactgtgagcctcgtggtggtgggagaggaggaggtggccgtggccgtggcagctactacccacaggcacagcaataccacccacaaggacatggtgtccgtggaggagcaggctactaccatggtgctgctcctcaacctcgcggcgcaatggtggtgcagcaatggcgtcctgctactgctgctgctgagcatttgggccatcaacagccctacaacagcagtgtgagaccacagcactattatggtccgtctgccatagctcccgagctgctccaagcaatggatgctccacatgagcctcctgccaatgtctcctcaccagaagcagcctctccggaggcatcatcaccacggtctcttgctcttgaggtcacagagcagcttcaggacttgtctgtgcagtaccaattaagtgagagccaggaagagattgtccaacatgttcctgtgtccaccaaatcatttaaatttcctcaccgccctggaagtgggagtattggaaccagatgtttagtgaaggcgaatcacttctttgctcaactgccagacaaggatcttcatcagtatgacgtttcaatcaccccggagcttacatcacgaattcggagccgtgctgtgatggaagagttggtgagactgcacaagatgtcatacttgggaggacgtcttccagcctatgatggtaggaagagcctttacacggccggtccattgccgtttacttcaaaagaatttcgcatctctttgcttgaggaagatgatggttctggttcggagaggcgtcagaaaacatataacgtggtgattaagtttgctgcaagagctgatcttcaccgtcttgagcaatttctagctggaaggcaggcagaggctccccaggaggccttgcaagttcttgatattgtcttgcgagagttgccaacagcaagatatgcaccctttggtcgatccttcttctctcctgacctggggaggagacgatccctcgatatgtcggcaactgctttctttgagccgttaccagtcatagattttgtcatacagcttttaaatactgacatccgctcgaggcccttatcagatgctgagcgtgtcaagatcaagaaggccttaagaggagtgaaggtaggagttactcaccgtggcaacatgcgccggaagtatcggatatctggtttgacatctcaggcaactcgggaactgacttttcctgttgatcaaggaggcacagtgaaatctgttgtacaatattttcaagagacatatggatttgcgatccagcatacctatcttccttgtctgcaagttggcaatcagcagcgtccaaattacctaccaatggaggtctgcaaaatagtggaaggacagaggtactccaagagactgaaccagaatcagataagggctcttttagaggagacatgtcagcgcccacacgatagggagcgtgacataattcagatggtgaatcacaactcctaccatgaagatccttatgcaaaggagtttggcattaagatcagcgagcgtctggccttggttgaggcacggattttacctgcccctcggctcaagtataatgagactggcagagagaaggattgcttgcctagagttggtcagtggaatatgatgaacaaggactttgctttggagcctgttcttccatctatgtatgcacgtcctgatcaagtggaacgagctctgaaagccaggttccatgatgcaatgaacatacttgggccacagcacaaggagctcgatttacttatcggactgcttcctgataacaatggttctctttatggtgatttgaagcgtatatgcgaaattgaccttggattggtttcccagtgctgttgcacaaagcaagtgtttaaaatgaacaaacaaatcctagcaaatcttgctctgaagataaatgtgaaggttgggggaaggaacactgtactggttgatgcagtgtcgagacgcattccgttggtaactgacaggcctactattatattcggtgctgatgtcacccatcctcaccctggcgaagatagcagcccatccattgctgctgttgtggcctcccaagattggcctgaagtgacaaagtatgctggtttagtttctgctcaatctcacagacaagagttaatagatgatctgtataacatcacgcatgatcctcatagagggcccatctgcggtggaatggtcagggaacttcttatatccttcaaaagatcaactggtcaaaagcctcaacggataatattctatagggatggtgttagtgaagggcaattttaccaggttctattgcatgagcttgatgcaatccgaaaggcttgtgcatcactcgaagcaaattaccaaccgcaggtgactttcattgtggttcagaagcgccaccacacgagattatttgcacacaaccacaatgatcagaattcagtcgacaggagtgggaacatattgcctggtactgttgttgactccaagatttgccatcctacggagtttgacttcttcttgtgcagccatgctggaatcaagggcacaagccgtcccgctcattaccacgtcctgtgggatgaaaacaacttcacagctgatgcgttgcagaccctcaccaacaacctctgttacacttatgcgaggtgcacacgatccgtatctattgttccaccagcatactatgctcatctggcggcgttcagagcccgtttctacatggagtcagatagctcggacagtggttcaatggcgagtggtcgtggaggagtggttttggagataattggatttacaggtgaattacaggtgctgttattttatgtgaccgatcagaccgggcaagggttgccggtcagaccggcggtgactcgatgcctcgggagagtatttgcggtgatggaccaggagtcgacttggggataa

SEQ ID NO: 6232 - DNA, 321 bp, Oryza sativa
  Clone ID: PAT_MRT4530_12943C.1
atgacgggccctttggcagaaacgggagggggacccgtgactggcccccagcaccggcacaggcgtagtgaatgcacggcgtactacgagccaaaccatcgttgctcacacttggcgcgtatcctcggggcgggcacatgcgaggcgcagcgccagcgcgctgctgcaaagggacgcggcccggcggccgcgccatgtgtcgcgcgggcgaagcaggggaacgtgcaagtgtcctgtgccgtgcgtgacacggggtcccctcgccgcgtgccccacggtggtcacctacacttgccacgtgccccacggtggagtaactaa

SEQ ID NO: 6233 - DNA, 2111 bp, Oryza sativa
  Clone ID: PAT_MRT4530_12944C.1
aaaatccaaatgcaaacaagacaattgaccattttgaaatgatgaaacaggtccatacgaattagagtacaaatagagccaggggaagcccagcttttatgaaatagtgggatagagtctacagataatgtgaaatagaatggtgtgtcccagaaacacacaacatgatagcatgtggcttcagaagtcttgcatacttcttatttgaggtttcccatgatgaacaactaagtgcaatcaaatgggaggcaatttaaaggctaactgatagtagtagccaagcgaagcagtagtagaattctaacagtagaacatgacattcttgacgctgtccttgagtgcaggaaggggcctgacggctccaccacctgcagcacgagtgctgcgcgatgtagacgaacctcctccacgaccactcgccattgaaccactgtccgagctatctggctccatgtagaaacgggctctgaacgccgccagatgagcatagtatgctggtggaacaatagatacggatcgtgtgcacctcgcataagtgtaacagaggttgttggtgagggtctgcaacgcatcagctgtgaagttgttttcatcccacaggacgtggtaatgagcgggacggcttgtgcccttgattccagcatggctgcacaagaagaagtcaaactccgtaggatggcaaatcttggagtcaacaacagtaccaggcaatatgttcccactcctgtcgactgaattctgatcattgtggttgtgtgcaaataatctcgtgtggtggcgcttctgaaccacaatgaaagtcacctgcggttggtaatttgcttcgagtgatgcacaagcctttcggattgcatcaagctcatgcaatagaacctggtaaaattgcccttcactaacaccatccctatagaatattatccgttgaggcttttgaccagttgatcttttgaaggatataagaagttccctgaccattccaccgcagatgggccctctatgaggatcatgcgtgatgttatacagatcatctattaactcttgtctgtgagattgagcagcccctaaaccagcatactttgtcacttcaggccaatcttgggaggccacaacagcagcaatggatgggctgctatcttcgccagggtgaggatgggtgacatcagcaccgaatataatagtaggcctgtcagttaccaacggaatgcgtctcgacactgcatcaaccagtacagtgttccttcccccaaccttcacatttatcttcagagcaagatttgctaggatttgtttgttcattttaaacacttgctttgtgcaacagcactgggaaaccaatccaaggtcaatttcgcatatacgcttcaaatcaccataaagagaaccattgttatcaggaagcagtccgataagtaaatcgagctccttgtgctgtggcccaagtatgttcattgcatcatggaacctggctttcagagctcgttccacttgatcaggacgtgcatacatagatggaagaacaggctccaaagcaaagtccattcctgaggcctggcacatgcgggccagttcacgacaaaatccactagcaacactctcttgcacatttcgagcaaaattgacacatatccagctcctgactctaccaccatttaccattttcttgttcatcatattccactgaccaactctaggcaagcaatccttctctctgccagtctcattatacttgagccgaggggcaggtaaaatccgtgcctcaaccgaggccagacgctcgctgatcttaatgccaaactcctttgcataaggatcttcatggtaggagttgtgattcaccatctgaattatgtcacgctccctatcgtgtgggcgctgacatgtctcctctaaaagagcccttatctgattctggttcagtctcttggagtacctctgtccttccactattttgcagacctccattggtaggtaatttggacgctgctgattgccaacttgcagacaaggaagataggtatgctggatcgcaaatccatatgtctcttgaaaatattgtacaacagatttcactgtgcctccttgatcaacaggaaaagtcagttcccgagttg

SEQ ID NO: 6234 - DNA, 2133 bp, Oryza sativa
  Clone ID: PAT_MRT4530_12945C.1
tgggggttttttttttttttttttttttttttttttttttaaaacaaaaaaaaatgcgtgttctgcttgctagcgagtacaaaacaacatacatctccagtgagtagtcacatctgaaagtagtacgacaccaaaaatatctccacatctaaatttacagtgtcatcatgatctgctagactacaattctacaaaacgctctcctctcaccaatattgattttccgaaagtccacaattcgagaggcccatcataacagataaactcatttgaaacaattagaggatacttttgaacctagtgctaatctagaataaatcagcattgaagttatacaatagataaaaaaagggttctgtatacagttcagtaattgtttacagggcatcagcatctccaaccatgtgaccatcgatagtcatatcatttgcatagtttccaccatgatggtttctccatccacggttgtgttgcaagggttgtgccctttcttcactttcgccatcagatgcctcagcaagccttgcaattgcatcaatcaaagattgttcatgctccttgagcactttctttgctttctccatttcaagaggatcagggttgcttgcgctgaaaacccgctccacctcctttattaatgactccgtatggagtatttctatgcaatcagagcttttcttcccaacaccattttgtgaaggtggaaactctttcctggatgtgttcttttgcggccctctgctcccccttccaggacctgacatggggccattacggctgcttgacttcttaccaccatgaacagtagcgccacggccttgctggattattccagggtcgccaccttcccatctaatatcttcaggtgccatctctttaaagtcaacccactcccaggtttcatctgctgtatttatgtcataaaccagtgcataacgatccagctgtggatcatagtcagttataacagcctcataaaagctattatcatcaggccaccgagtcatgaccttccgtccgattaatggatttactgatattggttcagtaggaagaccacctgataggttcttattcataattggtcccctaccactagggccagcagaagacatggtcttgattgcagagccacctggtatcttctggcctggcttagtctttttgccttttgtaccaggtggagctactttttttgttgctgatgacaatggttgcattggggcagtcagtgtctgtgaatgcacagcaggagatggtacaggtacagaagcagaagggatggattgtgacgtcttctgcctcttgcgagcggaggtggtagggctgggcacgcgatcatgtgaacgttgagcattattcaccatatctgcctgaagcccaccttttgtctctctccattcccttgaataaaaatgtcttattctttgaatgatatcatcaccgttcactctgtttaacaactccctgtgctctttgtcagacactctaagttcctttctaagttcagtgataagaccttccttttcccatgaaatagcatcagattgtgctttaaatgcacgaagaacagaacaatatgcatcttgctcaagctgatgaatttgtgtttccatatctgtctgtggcttagttctattatatggaacagcgctaacaatatctctcccattaccactaacacgtccactgcctcttacacctctgttctgatatgtcggtggaagatcatcatcagttccgctgctgtccacggggttgtaatccatggcgcgtcaccagcaccaggcacaccgacaccaagaagcccacgaatcacacccacaaatcaaccgccgccgctgcaacaaccaccaccaccactaacgccaccgtgacttgcccttcctcctccgagcccgaagagaaaccccccgacccagatccggcgtcccccgggccggagcaggccccccttctcccgcccccgcgccgacagagccgcggctccgggaggcgaatccgtgcggccgcgcggcggatcccggcgagatttggaggccggattcgggaggcggtgggagcggggaggggagggggccgagctgagctgggcgcgtgcgtgcggacaaggggcagaattattcctcgtgc

SEQ ID NO: 6235 - DNA, 296 bp, Oryza sativa
  unsure (1)..(296): unsure at all n locations
  Clone ID: PAT_MRT4530_12946C.1
gatcacgatgtgctcccaatctattgtagctcnaaccatctagtattacttttatgtagcaaattcgaagttctagggggtttgcagtctttggcctgattagagtggatggatgatgtggataatgtagtgcagactgctagactatgaaattgatactcgctgatttgatggtacagagtataggcatatgtgcaattgtggttaagttgtagaggtgcaaatgttcaatatgcttgtaccgtgcagacnccttaattttacagtttctaaaaagtagtaaaaaaaaaaaaaaa

SEQ ID NO: 6236 - DNA, 730 bp, Oryza sativa
  Clone ID: PAT_MRT4530_12947C.1
gtgaggaaatttaaatgatttggtggacacaggaacatgttggacaatctcttcctggctctcacttaattggtactgcacagacaagtcctgaagctgctctgtgacctcaagagcaagagaccgtggtgatgatgcctccggagaggctgcttctggtgaggagacattggcaggaggctcatgtggagcatccattgcttggagcagctcgggagctatggcagacggaccataatagtgctgtggtctcacactgctgttgtagggctgttgatggcccaaatgctcagcagcagcagtagcaggacgccattgctgcaccaccattgcgccgcgaggttgaggagcagcaccatggtagtagcctgctcctccacggccaccatgtccttgtgggtggtattgctgtgcctgtgggtagtagctgccacggccacggccacctcctcctcctcctcctctcccaccaccacgaggctcacagtcctcaccaaacccaggcagtcttggtctccttgatcccattcagtcgaccaactcaatcaacttgggcagacggagagattcagctcacatccagacgaacctcgctgggcggaagatgaagaagagtgggagggtgatgtactagtactagtagaaggagatgagggaaaacgccaagaagaagaagaagaagagaggagagagctttacgctcccactaccagtaatgcagtgctcccct

SEQ ID NO: 6237 - DNA, 1389 bp, Oryza sativa
  Clone ID: PAT_MRT4530_12948C.1
atgcccaataacgctcagtgccaagtcgtcgatgacaggctcagcgcgctcccggatgaaattttgattgacatcctccaacggctgcaactgccgactgcagcccggaccaccactcttgcaagaagatggacccatcttctccaatccatgaaccatcttgaaatcgatgttgccgatttcataccacgccggtctgctccttcactcaaaaggaacaccatgactcgagtcaaggtggccatgtcaaggacactgcacctgtgcttctacctcactgacccttacctgcactccgttgggcgcatgcttgaggatgcagttcagagtgccggtggcagagcaagcaagattgaggtcctttccttttccatcctgaccgaggtgcctgagctgctttgtaccgagaaacacctggcacgatatgggagacgcttcatgtccttctttcaagcttaccccaatgcattcaggcgactgacaagcctctctctgtgggctctcaggtttggggattcagacatccccaacctcctagcctcctgcctccagctgcagcacctcaccctgcaggattgcgataatggcaagaggtatgtgctcagaatcgatgcaccaaactcgcagctcagcacgctgacgatggccttctgcagttacatcaaggttgagctcatcaacgctcccaagctgaaatgcgtggactgtgatacatgggtgggtgccaatcctcctgtttgtttcggctgcgtcccaatgcttgaccggatacgtttctcttccacctgccacaagatgcagctgccattcaagctcagcgactggctgtcgaccgtgccaactctaactagtttgcatctggacttccaggatgagatggtttggatcctgccagaagagcccaagaaactcttccccatattccgcaatcttaggaatgtatatctttgcagcattagtcttgattgtggcctcgactggactctctttgtccttgaaggcgcacccttcctcgagcgatttcatgttaagatatctctccacatatgtgacgagaatggctttaaggacagggctgacagaagcaatgttgtgtgggaagcatcatctgaaagcatcaagcataagaccttgaggttgctggatataaacggctttgagaccactgagaatctgatcaagtacataaggcttgtcattcagagagctgtggggctacagcgaattcacttgcatgataaggaaccgtgcgaagattgcgatggtatttatctcaatacgccatctctgtccagaactatattccccaacaatgaggcagagaaggatctgttaagacagcaactcctgcagggattctcctcatctatagagataacaataggttag

SEQ ID NO: 6238 - DNA, 252 bp, Oryza sativa
  Clone ID: PAT_MRT4530_12949C.1
atgaagagttccatggtattggcttctgtcatcctcctgatcatggcagcaacagctcatggacttaggctggacatggggttgcatgcagctctgaacaatgaggggatgctgaactccaaatggcagtcaactgctaaccgtccgatcgacacgcgtcgcgcatccaacgacaggcgtggcccagatgctacctccatcaatcttcagaaagatgaactggaccatcttcagtctgaagagaactgttaa

SEQ ID NO: 6239 - DNA, 1461 bp, Oryza sativa
  Clone ID: PAT_MRT4530_1294C.1
ggccgccccttttttttttttttttttgttctgaacacaatgatgatacacattgaaagatataactattacatatgaaacatgaaacattgtgttttaatggtttaaaacaaatatttttattttattggaatataatcatatgatattttgttgtaaaagtttaattataacgaatacaacggtgtgatcggataaatagtttaggagaaaaatatattttccaaatattggagggacggacgaacggaaagaggatggatggatgagagaatcacatcagacggcttgggcttggttgcatggtggcgcgcgtaggaggatggtctccacggtgaggcctggcccgaagccgaagagcagcccccactcgaggccctcgccggccgtgctcagcccccgctccgccgacctccgccgcatctcctccatggccatgatgacgcaggagctcagcgtgttgccgtgctgcctcatcacctcgcggcacacggccaccttgtcgtcgcggaggccgagcgtgagaaccacccggtccaggatgtccctcccgccgggatgcaccagccagaacacctcctcgttccagtccttctccaccatcgccttcttcaccagcgactccatgctggccgccacgcgcgccgccacgtcgcggtgcaggttgtacaccagcccctcctcccgcagcttcgccaccaccatctcctccgtctccgggatgatgtcctgccacgccgacaccatctcgaacagcgtgcgctcactgttagcctccaccggatccgcgccgaccaccaccgcaccggcggcatccccgaacagcgcctgccctaccaggttgcccatgtgcgattcacaaggcccgcggaacaccatggagacgacctcggagcagaccaccagcacacggccgcctggattgttctcggcgaggtccttggcgaggcgcagcgcggtgccgccgccatggcagccgatgtggtacatcatgcagcgcttggtggtgagcgggagaccgagcagcttcaccacctcgaagtcggcgccgggcatgcatccgctgacggtggtgcacatcaccaggtgggtgatctcgcacgccggccggccccagtcggcgatggcgagccgggcggcggcagcgcccagctggggcacagtgacatcggtgagattctggcggacgttgatagagggggagttgtacgccgccacggaagggttgctcctcaggaactcgtccgacatgtgcacgtgacgcttgtcgatcattgtcttctcacagatatctgcaaacttggccttgaggtcaaggaggtgattggagttggaaatgtcaaagtagtagtcggggaaggaggattggggcagaacgtagggtggaacagccgtgccgatgcccaggatcgccgccaccagctgctgcccgccctgcttaatgtattcttggctacccat

SEQ ID NO: 6240 - DNA, 2283 bp, Oryza sativa
  Clone ID: PAT_MRT4530_12950C.1
ctcaatcttgcttgctctgccaccggcactctgaactgcatcctcaagcatgcgcccaacggagtgcaggtaagggtcagtgaggtagaagcacaggtgcagtgtccggcgtggtatgaaatcggcaacatcgatttcaagatggttcatggattggagaagatgggtccatcttcttgcaagagtggtggtccgggctgcagtcggcagttgcagccgttggaggatgtcaatcaaaatttcatccgggagcgcgctgagcctgtcatcgacgacttggcactgcttaacatgaaaactcttgagggagggtgcgccttcaaggacaaacagtgtccagtcgaggccactgtcattactaatgttgtaaagatatacatccttaagattgcgaaatatggggaatagtttcttcggctcttctggcatgatccaaaccttgatgtaactgcagaagatcatcctcaatgtcctgagctgtgagcatggtgatgcgtcaatcttgagcacagagttgcgaccgctatcgcaaagcccgtagaaggaggtgctgaatccattggggcaagcctgaaagaaggacatgaagcgtcgcccgtatcgtgacatctgtttctcggtgcagtgcacctcggacacctcattcagaatggcaaagtcaaggacctcaatcttgctggcactggcactctgaaccgcatcgtcgaccatgcgggcaatggagagcaggtatgagtctgtggggtagaagcgtagatgcatggtccttatggtccgatcagggtcaattgtaggagctagcaatgtccttagtgcttgggtgtaccacgacatggccatgcttcgagccacattgtgcctagtgaggatgcgtggtacaaattcattgatatctattttgagatgtgtcatggatgggaaaagatgggtccatcgccttgcgagggtggtggtccgggctgcagtccgcagcggcagccgttggaggatgtcgatcgaaatttcatccgggagcgcgctgagcctgtcgtcgtcgacttggcactgctcatcattggatactagttcatcaatgacctggtgcctatgaacatcttcccatctccccgcagaagcatacacattgcacagcagggcatagtgaacactattgtttggttccaactcaatcaacctcaggactatccgctcccccagttcccactcccctcggaaccggcacaacccaagcaaaccacccaatgcatgtgccttcaactcctctggcatactcgttaagagaccctcagcttcttccagaagcccaacacttgcatacagattggccatgcaccaataatgtgcaaatgttggcttgatgttgtacatggtgctcatctgctcaaaatatgccttcccgtcatccaagagagctagacgggtacacgcgcagaggacaccaatgaaagtgacttcgtcttgtccaatcatgtcatgaaacaatcgaatcccatcaccaggttctccatacacacaatggccgatgatcattgcgttccagcaaacaacattcctaaagctcagccgatcaaacaccttcctcgcagcatccgcattccgacactttccatacatatcgaccaatgcagtcgagaacagcaggttacgctcctcaaaacggcgcaggaaagcacaatgtacctccttcccagcccccaacctgcccagccttgcgcacgcagtggctgccccaaccattgcgacagctgtgcccctgaccccaatctccgccatccaccgcaccacctccagagcttgctcggggcgcttcaccttcacatacccgttgatcatgatgttccatgacaccacattcctcagaagcattccgtcgaacaggtgtcgtgcggcgtcaatgccgtcgacggcgccagcgtaggcagtcatcatggtgttgtaggaggcgacgtccctgaagggcatttcgtcgaacaggttgcgggcgcaggggaggagggtggcggcggcgtaaaaatggaggagggcgttggcggcgtggagcgggggcgagaagaggaggccgcggcggagcagctgcgcgtggagggcgagcgcggaaggaagatggagacgcggggaggaggaggaggaggctttggagaggagcgtggggaaggagaagcgggcagggaaggcggggtggtgggagcggaggagggcggctaaaagggagagaagggcggataaggggaggcgcggggcgagggcgccggagggcgttgttgctggacttgccggcgccat

SEQ ID NO: 6241 - DNA, 471 bp, Oryza sativa
  Clone ID: PAT_MRT4530_12951C.1
gtgtttctcggtacaaagcagctcaggcacctcggtcaggatggaaaaggaaaggacctcaatcttgcttgctctgccaccggcactctgaactgcatcctcaagcatgcgcccaacggagtgcaggtaagggtcagtgaggtagaagcacaggtgcagtgtcctgatgatgatgagttgaggctttcagctcttggagccaacaatgtcctcattgcttgggtgtaccttgacatggccaccttgactcgagtcatggtgttccttttgagtgaaggagcagaccggcgtggtatgaaatcggcaacatcgatttcaagatggttcatggattggagaagatgggtccatcttcttgcaagagtggtggtccgggctgcagtcggcagttgcagccgttggaggatgtcaatcaaaatttcatccgggagcgcgctgagcctgtcatcgacgacttggcactgctggtaa

SEQ ID NO: 6242 - DNA, 297 bp, Oryza sativa
  Clone ID: PAT_MRT4530_12952C.1
ctactccacctccggtcgagccctgtcgatgactccgtggtggtcggttttcgccgtcgtcttcctcagcatcgcagcgccaagctgaagcccggccaccggttttccttcgccgaagatcgccaaaatgtcgccgtcgtcttctcttgtccccaaagcagttgttgcttctatggtggatgctagttgttgagcggaagttgggaagaaggcaaaagacttgccagcgtcaattaagaaagagcagtcaaaggtgacgcccaccacatgtttgacgaaatgctctagtcccgacat

SEQ ID NO: 6243 - DNA, 2469 bp, Oryza sativa
  Clone ID: PAT_MRT4530_12953C.1
atggctgcggcgccgccgtccgtggcgtcgtcgtcgtcgtcgtccagccccgtcctgtcggccgcgcaccgccgccggctcaacgacgtcgagcgagacgcgttcgactacggcggcccgtgcgacgtcgacgtcgatcatgatgacgacgacggcggcggcggagtgcgccgcgggcacggcgccggcgtggcgggtgtcagggcgctgttctcgtcggccaggaggagcaagagggcgtccgtggtgacatttcgatcgtggattccttgccactagcttataaaggattgaaactttatatgagagcacccacttcttgggccaaggcttcttactacagagctttctcaaggacactgaagaaggccaaagttgtgaaattcacacatacagattcacgaattgttaacaatggtcttcccccatccatccaacgactccgttgtcgggcaaattatgaggcactaagattccacaaagaaattgaaggagctgagtactgctctagtagatagactgaggaatggatccaatcattatatcgcacttcacttagggtatgagatggacatgctctcattgactagttgcagcaacaacctatcacataaaggggcagatgagctgagagaacaggaccgcatgaacagtgcaacagctggttatataattgttaatgccaatggtggattgaaccagatgagactgggaataagcgacatggttgcagttgctaagctcatgaatgcaacactagtaatccctactctggatcacaaatcattttggactgatccaagtgatttcaaagatatatttgatgtggaacacttcaagaaaactttagagggtgacatttcgattgtggattccttgccactagcttataaaggattgaaactttatatgagagcacccacttcttgggccaaggcttcttactacagagctttctcaaggacactgaagaaggccaaagttgtgaaattcacacatacagattcacgaattgttaacaatggtcttcccccatccatccaacgactccgttgtcgggcaaattatgaggcactaagattccacaaagaaattgaagagctgagtactgctctagtagatagactgaggaatggatccaatcattatatcgcacttcacttaagatcagtaatgtacttccttttcttatcaattaacaggtatgagaaggacatgctctcatttactggttgcagccacaacctaacacataaagaggcagatgagctgagagaaatgagactcaacgtgcggcactggaaagagaaggaaatcaacagtagggagaggagactccaaggacgctgccctatgactcctcgtgaagtagctcttttcctcaaagctatgggctatccttccagcacaaagatctatattgtagcaggtgaaatatatggtggacatagcatggattcattaaaggctgaatatccaaacatatatacacattatagtctggcaacggtagatgagttagagcctttcaagctataccaaaacagattagctgccttggactataatgtagccgtccaaagtgatgtttttgtgtatacgtatgatggaaatatggctaaagcagtacagggtcacagaagatttgaaggattccaaaaaaccatcaacccagacaggcagaagcttgtgggactcattgacaagcttgatgaaggtacactaacatggaatgagttccaaagtgaagtgaagatacatcatgaaaacagacttgggggtccatatcagaggttatctggtcgaagtcctaggcaagaggagtacttctacgcaaatccccttccaggctgcttgtgcaaaagaatgcaaaggattaaatgacgctgatttgttatgaagaggatgtgatattattgtcttcaaaagttccaaccacttccctgatgtagcatggatatacaaacacaaaatcttctaacaaagaattacactggtaatggacagggacagcccacagataattttcctagattaacagtgtatgcagccatcattcatagaaaaggaagcaggaggggcaggtccatttattatcgtctgagatctgcatctccagttgattatttattcaagtatacaggaaacggaagagtaaaaaagattttaaataccagcaaagcatagatgtgccagaagtgatgggatagcttgaaagaataccttttttagtgcatgtatgtagttcacacttcacacactccatatgtacagtctgtcctctttttatattttgtattcatcccaaaattgcagctttattcagataggcatgtatgatgtatatagagagagcaggatgtacccaagaagaaacaagtgatgaatggtaaattcttttttagttaaaaaaaaaaaaaaaaaaggaaggcggcagtagaggagtgctagcagctgaaggaggggagc

SEQ ID NO: 6244 - DNA, 109 bp, Oryza sativa
  Clone ID: PAT_MRT4530_12954C.1
aagtcaagtcaagtcaagcctcaagcttcgtgctggagcaagaagatcggtcagcccagagtcttcgttctgcgaaggtcaagtgaagtttctcccggagctgacctaa

SEQ ID NO: 6245 - DNA, 1481 bp, Oryza sativa
  Clone ID: PAT_MRT4530_12955C.1
cccgcgcccccctcctccgcggccatgggcgcgaggctcctctctctcatcccaacctagagagagaaagcagcagccgcggccgccgctgttcgccctgctcctctgccatggctgctgccgcggcaaggtgggccccggtcgtcggcctattgggcctcctcctgctcccgttcgcgcctgctccggcgggagccgcaacgcccgcgaggtcgccgccgtcgtcggcctcctccgccgtgttcctcctcagcggcgacgtgtaccccaccgggcattactatgttactatgaacattggggacccagcgaagccgtacttcctggatgtcgacaccggcagcgacctcacctggctgcagtgtgacgctccctgccagagctgcaacaaggtgccacatccgttgtatcggccaacaaagaacaagctagtaccgtgtgcaaattcaatctgtactgcgttgcacagtggatctagccctaataagaagtgcaccacccaacaacaatgtgattatcaaattaagtacaccgacaaggcatcttctctcgctgtggtggggaaaaatggtgcagcaccagcaacaacagacggcttgcttgggcttggtaggggatcagttagcttgctctcacagctcaaggcagcaagggatcaccaagaatgaattactactcacccggctcagcaacactgtactttgatagacgttcactgagcacgaagcccatggaggttgtatttgacagtggtagcacatatacatacttttctgcccataccaagcaactatttctcctgcgatcaaaggtagtctcagcaagtcacttaaacaggtttcagatcctagtcttcctctgtgctggaaagggcagaaggcattcaaatctgtttctgatgttaagaaggacttcaagtcattgcaattcatctttggtaagaatgcggtcatggatatccctcctgaaaactacctcattatcactaaaaatgggaatgtgtgcttgggcatccttgatggatctgctgctaagctgagtttcagcataattggagacattacaatgcaggatcagatggtgatatatgataacgagaaagcacagcttggttggatccgtggatcatgtagtaggagccccaagtctattatgtcttcctttccatgatcatccctcacatttgatccatgagctggacatccgcttaatcataattggatgtatcactgatggagttggagaaagttattgctagcctcaagtcaccagtactgtgtaagtgaagaatgacaatctgttgccatccaaataaagtctgtactcttaaacacaaatggatggagaaataagatgaaatgagagaaggatgagcatgtaatagtaatagaggctgataacaaggcactaacctgtattctcctgttcatggtgaataatcatgtgccatttatttggaaccaaaatttaggatgccaccc

SEQ ID NO: 6246 - DNA, 352 bp, Oryza sativa
  Clone ID: PAT_MRT4530_12956C.1
ctccttaagcgccgaggccctgctacacatcatcatggcgcaggcgcgcaaggagctccccctcctgccgccgcctcaagcggcgtcctcgtcgcccaccgtgccagcagcccactccccattcctgctgtccaggcaaaactccagcgctgccccgcgccgtcgtcgtcgtcgtgggcacaagctcactcgttctcgcaggagtaacagcatgggcaatggcggcgccgcgaatgagatgatcagccctggggaggagctaatgagccccttgaacggcgggggaagctcctccgcgaacgcctctgccttattttctcagggcggggactctctcctagacgactgctag

SEQ ID NO: 6247 - DNA, 5203 bp, Oryza sativa
  Clone ID: PAT_MRT4530_12957C.1
atggcggtgaaggggaagggcaaggcggtggcctccgcgtccgcatccggcggcggggtcaagcggcggaagggccccggcgacgcggcggggccctcttcctcctcctcggcggccgcggaggccgccaagcgccgccgccggtctggggtcctccagttcttcgacgacgccgccttcgtcggggacgaggaggaggatgaggatgaggaggaggaggaggaggaggagatgttcgcgtccgacggcgacgacgacggtttcttcaccgagggaaaggcagaaaatgttaacttaaaaagaactgaaaggtcacaccctcttccgtttcttgggatagttaaggaagaggagctgagtggtgatgaacttgaagaatttatcaaggatcgttattcaagtcgagtgaaacacaccccttttgatggctccaccaatgtacaggatgacgagtttaccgaggatggtctattgaaagagccagtaatttggaggatcaaatgcatggttgggcgtgagcgccaaattgctttctgcctcatgcaaaagtatgttgatctgcaaaagtttggtaccaaagttccaattatctcagcatttgcacttgatcatgtgagaggatttgtttttgttgaagctgagaaggcctgtgatgttacagaggcatgcaaaggattttgcagtgtttacataagcagaattaattctgttcctgtagctgaagttcctagcttgctatcaagccgcgcaaaaccatttgcaatatctccaggtacatgggtgcgcatgaagactggaatttataaaggagatctagcacagggtggtgctattccactaaaagaagctgcaattcctgctccacgtctaatcagttcacaagaattagagttcttcggatctcatattgaaaggaaacatgatcgccagacaaatgatttttatgaagtgcttgatggtctcatgttcaaagatggtttcctgtataaaagggttgcacttagttctttgatttactgggggatacaaccaacagaaactgaacttctcaagttctcttccactccaactacttccgactggaccgccaacaaaggacagtccagctggggagcgccaactccttctggtggagatcaccaggcaggaaaaaacaatggaaccaatccgtggggtgctccttctgacagaatgactggtaagggatccggtggaggagggtcttggaaaaataagactgaggatacctggaattcgtctggagaaacaaggcattcaggtacgaccccagtaaaatcttcttggggtggatcagaagatggccaaaagaaagaaggatcatgtcctgaaggatctgcgggagggggacaagtcggtggaggcagctcctgggacaagccggatggaggatggaacagcagcaagtgcgagggcacccaaggaggtggcggcggtagctcctgggacaaggcggatggcgggaacagtaacaagggcacccaaggaggtggtggcggcagctcctgggacaaggcagatggcggatggaacagcagcagcaagggtgggagctccggcaatggtgggtggtaagctcgatccaggatcagctgcaatccattagtgcatgtatataatggttgccatgcagcttgaacttgctgtatatttctactctttctagacttagaacgctattattagtaataacgtcgccatgctactctaaactacgaacttaccttaattccagcagaacattatctattgctgacggttattaaggtagctttgtatcaccatcaaattcggacccagatccttttcccatgttttcatatgaacaaaatgagcaacgggacaatgaaaggccttacaggagcactagagaacaacttttctcaattggggagatgctgcgtattcgaaagggtcctatgaagggctatctctgtcgagtagttcgaatatttcgcaatgatgtaactgttaagctagattcactgctgaagattgtcacagtgcaagctgagtttctttcagtcccagctaaaagaggggataactcttctggtgctccatctggtccttttggttcagaagccgataaaccctcatgggacaatggattaccatcttttggaagtgattcctggcaacccttttcaagtgctgcattaccagttcagaatgcagatggggaatctgaagttgatccatggtgtaagaaaacttcatcttctgccaatgattctgatccatggggtacgaaaacaaaatctgcatctgttgatgtatggaacaacagtaccacacaagtagagaactccagtgacaatgcatgggataaacaacctggaggtagtggacctaatattggtggaagctcttgggacagaccagcaactgataaggaaagtgaaaaaagtgacaactggggtgaggcatgcaaggagacagagaaaactggtagtgatacagatccctggggaagcaaggtcaaagagatagatctgaaagaaacggatagctggggaaaggcttcaatgcaaccagagaagaagttggaggatgatagtcaaggatggggccaacctgttggcaagtcaaaccaagaccaagaaaaaggtgcagacaaatgtggggcttgggatactgttattgctgggtcatcttcgtctgttcctggcagaggggatgatgactcctggattaaaactgatactttgcctgttgctcaagatgatgcctggggcaactcaaaagattgtagtgatggggcagctgggtggaatgaaactagaacatctaaacaaagccacagcactggaggatgggatgctgctgctgccaacctgaatgaatcatctgatgtggatgcacataaggactcatggggcaaagcaaaagatacaacagctaatgctgaagaaaaaaataatgaaagtggaaactggaacaaagctggaccactagacaaagtttgtggcagtgattggggtagtccaaagttttccagtggtgatggtccatccagctggaacaagggagacaaaattggaggagattctcaaaacggcagctggagcagacctggtggaaactttgaaggtggtcgtgggtttgggcgaggacggggcagaggcaggggccgagaatctggggatttcggtggcagaaatgaccaaggaagctggaagaactcagggactagtgacagttctggaaggccctcttggaggtctgatagtcaagttgagaaggaagtgggagattctggtggatatcgggggagaggaagaggaagaggccagtatggaggacagggaagaggagacaatggttggagaaatggaggtcaaagcaattctgagtttggaaggagtgatgctgatgcaccaaactggggaaataaaggtgtatccaataaaggttcttgggatagtggtgacaattggaatgccccaaagtcatctgatgaaaatcaaacttccgcttggaacagttcagaagataaaaggccatctggaggccaagagcaacaaagtggtgcttgggctagcaagatgacttctactgctggcgctgaggataaaagtgatgcctggggcaccaaggcggaaggcaattctggtagcactgggggaaagtgggagaatgcttcatctggggaagagcagcaaagcgacccttggggaagcaagatctgttctaatgaaggcaaagaacaagaaactgacccttggacaagcaaggtgacatccactgcagatgctgatgataacaataatgtctggaacactagcgcaagtgatactgcctctgggagtgagagcaagtggggcaatgctggggcagaggaaaaggcagatgcctggaaaagtaaagtggggagtgaaaatagtggaggttggaatcagaaatcttcttggggtaaaccaagcttctcaggtggagagcaggaaccagcttggagcaatccaaagaatggtgatgataacagtggatatggtaggggtggatttggacgaggaaatcgaggcagagggagaggaagaaattttggtgatagtggatcctcatggagcggaggaagttacagaaatgatgagtcacgtggagagagatctgaagatcgctggaacacacgagattctgatggtggcagaggaagaggaagaggacactttggcagaggtgatcgcaatcaaggtaataactatggttcgggtgacaacaatgacagaacctggggttctggcaggggaaacagggaccaggatggttgcaaaaattggaaccgaaatgatgacagaagaccgttcggtcaagatcgaggtggtgactggtcccaatcttccgactggaacgccaacaaaggacagtccagctggggagcgccaaaaccttctggtggagatgaccaggcaggaaaaaacaatggaaacaatccgtggggtgctcctgctgacagcatgactggtggtggatccggtggaggagggtcttggaaaaataagactgaggatacctggaattcgtctggaggaacaagggattcaggtacgaccccaggaaaatcttcttggggtggatcagaagatggccaaaagaaagaaggatcatgggggaaaagcgaggggagcgggagacaagtcggtggaggcagctcctgggacaagccggatggaggatggaacagcagcaagtgcgagggcacccaaggaggtggcggcggtagctcctgggacaaggcggatggcgggaacagtaacaagggcacccaaggaggtggtggcggcagctcctgggacaaggcagatggcggatggaacagcagcagcaagggtgggagctccggcaatggtgggtggtaagctcgatccaggatcagctgcaatccattagtgcatgtatataatggttgccatgcagcttgaacttgctgtatatttctactctttctagacttagaacgctattattagtaataacgtcgccatgctactctaaactacgaacttaccttaattccagcagaacattatctattgctgacggttattaaggtagctttgtatcaccatctctacgattcccaggtgtttttatgctccttttgttttgacgatgtgatattttgtgttagtttgatggatgcgcctctgggcataatgatgaagctctcaaacaccgtttctcc

SEQ ID NO: 6248 - DNA, 1710 bp, Oryza sativa
  Clone ID: PAT_MRT4530_12958C.1
atgttccagcggtcgctggatgggctcgtcgccttcctgacctgcctcttcccctacctccccgaggtggaggcacttcgctacctcgacgccgccggggcggacgccctcgtcgccgcccgactcatcgtcaaccggcgcggaatggagcagtcgttcgtggtcgactccggcgccaccgtgatcaccgccgagatagccctccggggcgccgcccgccccgcccgccacccctgaatgctcatcacgcccaacaaatctcgagtcaaggcgctactagacaacaccatgatgaaccacgccacagtgaaagatgatgaaattctccatctgaagcaatcctgggagctcgccgaatctcggcttgatcaccacaacacaaaaaccaaactggcaaaatcatgggagcgactcgcaaaatctctgctcctacgtgcaaagcctcaaccagttctccctcatgtccgggcggccaagaagcgaatgctcttcgcaacgatccgcggcttctacctgcaggcgatggcgaggctgccggccgacgagctgcgcgctcggtatcaccgcagcatgctcaaggccggccactgctacggcccgctggaccccgtctccaacatcatcgtcaacaccatctggtacgatcaggcggccttctcgcagagcaagccgtgtacactgcagatgatcagcaccaaatgcctgatgcgaatcgtggcccgatctttctatggcctcctgtccttcctgtgcactcgttacccggactgctcacctgaccaagcgatggggtggctgcagatggccaacgctgacttgcggattgttgatcctgcccttggttatatgtccaataagattacgagaacagacaacatcagcatgagcttctgttgtaacttgccactgcagcacggtgacaggctctgctctgacgatgtcaccttgatttccttgttgtttcgcaagcgtcacttcgagttgcgacatcaacagcagccagagcctaaaaggttatgcaatgatgcctacattgcgctttgtcaccggcgtttcaagttttggctacatcatgacctagtctgcaagaacgtggaagttgcattggccacattcaaccttgacaagttgaaggtgcacaaatataggcttcattttatctgtggtgtcaatgagtgcgtatctggcctggagtacggcccggtcagaagcaatagcccatggaggatttacaaatataatcactctcatatcaactttctggcgatttgcgatgacccccaatctgccaatgatcctgcaacgctcttctttgctgaatgtagcaactatagcgttcatgaggagtcttggtgcatccctgtggtttcgccgcatcgagatactgaattagtccgttgcatttactgtgagagcaaggggactaggattgtgcatcctggtgagaagagcttccatggacgtgacacggaatttgagaaggtgatgcgtggagaacgactctttcctggattacagagaggatcctacagcaacattcggctcgctgaaagaaccgatgcagattgggtggataatctggaggaagattgcatctacatcactgcctgcgcagcggataatgatagaagagtgaacccgctcaattacccgcctatgtatcgagagcgtgtgctaccgtgctgcgaagcagcaagtgatcgttcctag

SEQ ID NO: 6249 - DNA, 120 bp, Oryza sativa
  Clone ID: PAT_MRT4530_12959C.1
gaattttgctgtcaaaggaacgcatcactagtgattgttgaacaattatgcgcgcaagaccaattttaccgtcctcggcggtagttgctgacagagagcttgtgctccgtgttccccatt

SEQ ID NO: 6250 - DNA, 475 bp, Oryza sativa
  Clone ID: PAT_MRT4530_1295C.1
cctttcagaggctttcgaatcgtaggtgagcgatagaggctagacgccatggactcggacgctggggcgaaggcgttggtggagcactactcccggacgatctgcacgatccgttctgtgctggggtcggctgaccaggactggtccttgctcaccttggagggacagctgtttctcggcaccagcgtcatctgcggccagctctgctcactctcctttgcgctgagtcgccacgacatcgacagccgtccactgccactcggtggcgacgcagggcggtatgctggtgttcatgtgcggatccctacggaccgatccatacgagcacccaactcaagttctcaccaatgatgcacatgcttagggctggaggcagcttatatgtgcctgacgacatgttctgtctgaactatggctaaagaaagctggatagttgtgcgtcaacgtactggaggcagtgttcttatgtaggaaa

SEQ ID NO: 6251 - DNA, 416 bp, Oryza sativa
  Clone ID: PAT_MRT4530_12960C.1
cccccagagagccttgacaagcatcctgtatccaagcctccaaatcaaacccacccgcaagcctttcaaacttccaacgaatttcaagacaggtttaccggggaataggcctggagcctgcccccagtgcaaactgaaatcgtccaagttcgtttcgttgctgccctgaatcaaacctttcccggagccagccaagatctaatacgagttcggaagctccagatagcatgcccatgttctacaggagattaacatggataatttgggatagtcgatgcccttcccagtttggagtcaaactgatgtaaaaaaaaagagatgttttgagattgattgattgttcggacggacccagctttttttttgttctggttttctccaattgatatagtctctgcgtctaatgtcaaaaaaaa

SEQ ID NO: 6252 - DNA, 1023 bp, Oryza sativa
  Clone ID: PAT_MRT4530_12961C.1
atgacacaacaaggaaaatcccaagcggggctttcaagggcgagcggcggcggtgcggcgctgaggagtgcggactatggccaacggcgacggggtgaggctcggggccgcagcgcagggcggcagggtggggctcggtcgtgtggagcggcggcacgaggtagcagcgatcggcaaggcgccgcggcgccgcgaggcagcggcgtggagcagaggcgcagcggctggccaggcaggcaggcgcggggcaggcagcaagaagagcaagtgagctgtgagcaaccgaggagtgcaatcaacagtttgacaatttcagatttgacagtttcacaaagagatttgaagagtttggaaccggggctctgcaagcgcaagtactcatgcaagcggaaatgctgcagtagagatggaggaggaggaggaggaggaggaggaggagctgacagctggaatcttgaggagataggcttatgggtgaggagtgcggaggggaacggcggtggcggtggtggtgaggacaacggccactgcgtggacgacgagggtggcgccgtgggcgcggcgtgccctggggagggggggacggcgggcacggctccagagcataggcgtagcgggtggtgcgcgatgcccgagggagcagcgtggcacacgcagtcaagggggaggaggcggtggcgcagcggcgcgaggatggagggggagcacacggccggccttcacgccatggcggtggtggccgccgccaccagctataagagggcgcggtgggggtggctccgcccgatgcggatgtggtcggcactacaggggaggtgggtagtgacgctgaggaggacgttgtcggggagatccctgtccatagcggcggatgccgctgtcttcgctccccgccacacacgcgtctctgccgctcgtcgccgtctttgcttgcccgccgccattgccgttcctctttccccgacacggtgctcccacccagccggctctccaccattggatgccagcgctgccgctccctaa

SEQ ID NO: 6253 - DNA, 423 bp, Oryza sativa
  Clone ID: PAT_MRT4530_12962C.1
atggtgcgggaggttgcggagagctgtgtcgacggggtggtgatggagatggtggcggcctactgcggccgcttctacgccgccaagccggagctcgccgcccgccgcatcgaggccatcggcttccaggtcggccaccagctcacggagagttggtcaaacatcccaaaatccattccactagcttctgctgagcagcaagcaaccaactaccagactaccagtacgtccttcaacagcaggaaaccaaccatgtgcaagaaatgggaagaagaagaagatgaacagcagacaggtcgggtagctctgaccagctgctgcagtttcgtgtatatggggctggtggccggcgccaccgggaccaacaccatcgagcaatggcggttggctcggactaggtgctgcggcatccagatccgatga

SEQ ID NO: 6254 - DNA, 282 bp, Oryza sativa
  Clone ID: PAT_MRT4530_12963C.1
tttaatgaacaagtcgtctttgaaatacccaaggactgcatcagcaatgacccgctggtaactgagaggaacacaaaacttgtcaagttttatgaagagattgcgcaaaaccgctatcagagatatcatcttattgaggctggagctggcaaaaaaaagctaacgaagtcctgggagaacctgcagaccaagctgaagacagcaaggacatatcagcaagatgtgagacaagttggtggaaaagccgtccctatccccgcccatttcactgatgaggtgtag

SEQ ID NO: 6255 - DNA, 223 bp, Oryza sativa
  Clone ID: PAT_MRT4530_12964C.1
ccgtttccgggcgccgccgccgccgccgccggtcctcctcttctcactccaccgccgacgccgtgccaccgctcctacacagacacagtacaggccccaaatcgtcatcctcgaggatatctgcccgtccgctcgccactccgactgagttcgccccgccgcccgccgatccccccccccaggctattgcgaatagcgctattggctttgggggggaagaaga

SEQ ID NO: 6256 - DNA, 451 bp, Oryza sativa
  Clone ID: PAT_MRT4530_12965C.1
acgcgcggggacctcgtccctcccgccgcccccgcgccgcgcggcggcgtcaggtgtgggcttccggcgctattggtggagggaagggaggggtgcgtcgaggatgatgctgaactcgccggcggcgccggcgtgggcgagcatcacctcctccatgcgcgccatcgcctcgcgggccgccgccgcgcgcgccgcggcggccgcgctggaggccgaggaggaggaggtcgggcgtcgcccggtgctgccgccgcgcggggcggccgcggccgcggcgtccattggcgtcggcgacggcgagggtggaggacacggccgcgtgcgccgctttgaccttgggtttgactttgtctcgttgggggaggggtctaaacgtaacgtggaaacgctcgtgctactgacgacggtcatggacgggctggcccacatgtcattgggccagcagggctga

SEQ ID NO: 6257 - DNA, 1829 bp, Oryza sativa
  Clone ID: PAT_MRT4530_12966C.1
gcccgcccctccccgcccgttccgcacccgacgcacgggttgcggcgcaagcacgccgcctgatcgcccggggtggggggggggggtgggagtccatggagtcgtcgctgccgcggaagcgcaagggcgcgcgctccgcgtgctccctcgtcggatcctcccacgagcccaccaccgtcgcccgcaagcgcgcctgccgcgagcccaagcctcgcccggagaagaagaagaaggatccctcctccgatgacgcctccggccggggcggaggcgggggcgtggtccagacggcgccccccgcgagcggccgggccgcgccggagagccccagcagggggctgaagcggaagctggggtgcatcgagtccgccacccggatggggcggaagaagcggctcgagagcgagtacgagctcggcgccgagatcggccagggcaagttcggctccgtccggatctgccgcgccaaggttggcggcgaggagttcgcctgcaaggcgctccccaagaacggggaggagaccgtccaccgggaggtggagatcatgcagcacctctcgggccaccccggcatcgtcacgctcaaggccgtcttcgaggacgccgacaagttctacctcgtcatggagctctgcggcggcggccgcctgctcgacgagatggcgagggagggcaagttctccgagcagcgcgccgccattgtgatcaaagatctaatgtccgtggtcaagtactgccacgagatgggcgtcgttcacagggacattaagccggagaatatactgctcaccaaggcaggaaagataaagctcgcagattttggacttgccgcacgagttgccgacggtcaaaaattgtctggcattgctggtagcccagcttatgtggcgcctgaggttttgtctggatgctactctgagaaagtagacgtatggggagctggtgtgctactccatgtactgctgcatggttcccttccatttcaagggggttcactagatgctgtctttgaggctataaagacagttgaacttgatttccacagtggaccatgggaatcaatatcatctcttgcacgggatcttattagtcgaatgttgaaccgagatgtaccatccagaattactgctgacgaagttcttagtcacccatgggtcgtgttctacacagagtgccctttgaaggctgtaactgctaatttgagtattactaacaatatcgtagcacccagaattacatgggacagaattaggttacattgcgagtcaatatcttcagattcatcaagtcagagatcagcagatcaggatgaatgtggtatagttgatgcactgacagcagcaataacgaatgttaggatatcagagccaaaaaggagtcggctgtgtaacccagccattcccatacagcaggaatgctcttcaaacttgaagagcaacctctgtacggcattctgacccgacctgatgtacagctcctgattggaatggtgcatatttttctcgcagaggttggtctgatgccagttaaaaggctccatcaggtggtgtctctgagctgaggataataacctgggtttctgtcaaatcaaataagcgtttgacatgggtatgatgtagtttttatctggtgatgctgataaaccggccattagaaggccggttctgtaaattttgtaaatatcatgatccccttagctcctgggttgctaatctatgcgtacgtagcaaattgtttcaattaatgttgataaaaaaaaaaataacaaatacatatgcaaaaaaaaaaaaaaaaaaaaaaaaaaaaatagtgccgagttctctctctcc

SEQ ID NO: 6258 - DNA, 384 bp, Oryza sativa
  Clone ID: PAT_MRT4530_12967C.1
aaaaaaagggggggaaaacccagggattaaccacggccccccgaacaaaaggcttaaaaacgggccccaaaagaccccccggcctttactgattaaacaaccccccaggggggaaggccccaagaaaaaagtatccaagtcccaaaacaaaagctggttttattttacagcagaaacccgactttggccccaacgaggggggaaaaaaaaaaacgggaaaacagccccaaacaaaaggcaacacatttgctcccagaaaaaaaaagacaaaaaaaggggtccccccccccaacggaaaagaattggaggcaaaggacctgaaacaaaaaaaccccttttccccccggggaaaggcaaaacccccccggggtttctaaaagggcc

SEQ ID NO: 6259 - DNA, 124 bp, Oryza sativa
  Clone ID: PAT_MRT4530_12968C.1
ggaaatcaccaacatgggagagggcgtcatcagccagcagaacaacgccatcgctaggaatattccccaggaaatagatatggcacaacagaatcatttgttgacaaataggagagctcaatag

SEQ ID NO: 6260 - DNA, 154 bp, Oryza sativa
  Clone ID: PAT_MRT4530_12969C.1
tcgtgcatctaaagaagttgcaaatgagaagactgagtctgtggttattcgtgcaccaaggtctccaactcattatttaaagatgccaattgttgataatattcctgaaattaattatcttttgtatttttaaatcagttacttatttgaaaat

SEQ ID NO: 6261 - DNA, 170 bp, Oryza sativa
  Clone ID: PAT_MRT4530_1296C.1
cgcgcgcgcgcgagcgcgggtcctctagagtgtgcgccctctttttttttttttttgggggtttaaaagaagtattagtcttttacccatgtccaaacaatccctaaacatggccagaggctttgctgatgatcagcgggtgactcgtgaaaacgaccaggattcccaga

SEQ ID NO: 6262 - DNA, 1959 bp, Oryza sativa
  Clone ID: PAT_MRT4530_12970C.1
atgaggaagggggagaataggggaaagagagaggaggctgacgtggccacgctgacatatggggttcacggacccgatggctcggcccaggaacggcatgacccgactggtgtggggcccgtgctagaccaacccgactgttgggccgtgcctgggcctctgcctcagcatggtccaatgatcaggtggcttggtgtcaataatatttatgcgatgaagaatttggtggaactatattatgagagggaaatccagctgtttgtcctcgtcagcttcgcactccaagtgttcctctttttcactggcagccttcggcggcgcagcaccaacatattcctcagtgtttctatttggacagcttatttaggagcagattgggtagcagtttatgctcttggcaacctctcaggagtacaggagagcatcatatcaaggagaagtcagctgccactgtcttttttttgggcaccgtttttcctcatccatctcggtggtcaggacacaatcactgcttttgccatggaggacaatgacttgtggctgaggcatttcttgaatttggtcgtgcaagtagtcctcgccgtgtacgttttctggaagtcagctagaaggcagagtgcggagcttatagtttcgggtgtgttcgtgttcatcgttggagttatcaagtatggagaaaggacatggtcactcaagtgtgggagctcaaaaagccttgagagctcacctgggcatcactacaagcaacggtttccggaactaagagactctgattgcgactatcgaaatatggtttccaatgctctatgttcaatgttcaatgtcctcaatgtctttgcagcgcgcaacttgttcggttatagcttcccaagtgttggtccagatgatactcaagtcgacgccaaaaaaatgttcaagttggtggagcttgagctcgccatgatgtacgatgacctctacacaaaggctcttgtgctgagaacaaggacaggcattatactccgatgcatctctcacgcatgctccttcgttgcttttgcactcttccttgcgagtgataaagatcggtacattggagttgatattgcaattactgatattgggtggcccgagagaaggccactgtggtctagttccattggacagtacagcttactcagctgggactctggatcagaccaaccaacaagatcatgcaaccagaaagtgatggctctggtgagaagatcggcgaggttagtcggcgttggaaagaaaaaattgttttggatgagcaagctgctggacactaagttcctagaggtagatgagaagacgatggagtttgtggtggaggggatcaatcgcatccgcgacgaattctccgatgtcgcgtcccgggcatggccaaagcttggcccattcctcgaaaccataagagttcatttcaccgcggactttggtgctgccattgtcgtgattcactcattcacagaggagtacctgatgaatgctgctgctgcagcagaagaagaagaagaagaagcaggtcagggaggagaagcaaatgatatgatggaggtgtgccggaagctgtccaactacatgatgtacctcttggtgaaccacccttccatgctgccgctcaacgtcagctccgaggctacgctggctgaggctgcgcagctgatgaaggtggtgagagggcgagcactggaggagatggtggatccatgcgacgaaacgttgagggagatggtggacatgtggacgaggctcctcatctacaccgccggcaagtcccgggggccgatgcacgcggcggagctggcctgtggaggggagctcatcaccttcgtctggctgctcatggtcaaggccggcctcggggattccgaggcgaaaaggatcctcattgcaaattctgcttgcgccgacactaatacgaaggaagcctatgccttttatttcgcttcgtga

SEQ ID NO: 6263 - DNA, 581 bp, Oryza sativa
  Clone ID: PAT_MRT4530_12971C.1
actagtggatccccgggctgcaggtttgcagaaaacggcatgtgtatttttttcgattctcacagccctatcatttcaaaatacatgaaatgagggaaaccaaatcatttcacttgtgcttaatttgatgagttctaattctcattcctttctctcgcttgtcatccaaacctgtaacggcgctgcagcgacaagctatgaatataaatagcaatggcgatgaaatcctaggcggctgccatgataagcttttacagcgatggaggctaaatccttacaccatccgtccatcatattaagggcttttgccaggatgtgacatatcatagtacaacgaatctggatagactctctacccagattgttgtattaggatgtgccacatcctgccaaataaccttatatttgacgacggagggagtaagagacagccactattacagaaaacctcataggtgccggttgggaatcggccataggtgccggttgacacctgtacccgaaattataggtgccggttttagaacctgaacctataaggcataaggggaacaaaactaaaagaaaaaaaagtcgccggc

SEQ ID NO: 6264 - DNA, 1887 bp, Oryza sativa
  Clone ID: PAT_MRT4530_12972C.1
atgaagaatttggtggaactatattatgagagggaaatccagctgtttgtcctcgtcagcttcgcactccaagtgttcctctttttcactggcagccttcggcggcgcagcaccaacatattcctcagtgtttctatttggacagcttatttaggagcagattgggtagcagtttatgctcttggcaacctctcaggagtacaggagagcatcatatcaaggagaagtcagctgccactgtcttttttttgggcaccgtttttcctcatccatctcggtggtcaggacacaatcactgcttttgccatggaggacaatgacttgtggctgaggcatttcttgaatttggtcgtgcaagtagtcctcgccgtgtacgttttctggaagtcagctagaaggcagagtgcggagcttatagtttcgggtgtgttcgtgttcatcgttggagttatcaagtatggagaaaggacatggtcactcaagtgtgggagctcaaaaagccttgagagctcacctgggcatcactacaagcaacggtttccggaactaagagactctgattgcgactatcgaaatatggtttccaatgctctatgttcaatgttcaatgtcctcaatgtctttgcagcgcgcaacttgttcggttatagcttcccaagtgttggtccagatgatactcaagtcgacgccaaaaaaatgttcaagttggtggagcttgagctcgccatgatgtacgatgacctctacacaaaggctcttgtgctgagaacaaggacaggcattatactccgatgcatctctcacgcatgctccttcgttgcttttgcactcttccttgcgagtgataaagatcggtacattggagttgatattgcaattacgtattcactgtttatcggaggctttttcctagatttttgtgcgatgtttattgtcataacatctccatggacttgggtctggttgaaggctgcacagaagagagactggctagccaacttgtcctggttcctcttttccagtgatattgggtggcccgagagaaggccactgtggtctagttccattggacagtacagcttactcagctgggactctggatcagaccaaccaacaagatcatgcaaccagaaagtgatggctctggtgagaagatcggcgaggttagtcggcgttggaaagaaaaaattgttttggatgagcaagctgctggacactaagttcctagaggtagatgagaagacgatggagtttgtggtggaggggatcaatcgcatccgcgacgaattctccgatgtcgcgtcccgggcatggccaaagcttggcccattcctcgaaaccataagagttcatttcaccgcggactttggtgctgccattgtcgtgattcactcattcacagaggagtacctgatgaatgctgctgctgcagcagaagaagaagaagaagaagcaggtcagggaggagaagcaaatgatatgatggaggtgtgccggaagctgtccaactacatgatgtacctcttggtgaaccacccttccatgctgccgctcaacgtcagctccgaggctacgctggctgaggctgcgcagctgatgaaggtggtgagagggcgagcactggaggagatggtggatccatgcgacgaaacgttgagggagatggtggacatgtggacgaggctcctcatctacaccgccggcaagtcccgggggccgatgcacgcggcggagctggcctgtggaggggagctcatcaccttcgtctggctgctcatggtcaaggccggcctcggggattccgaggcgaaaaggatcctcattgcaaattctgcttgcgccgacactaatacgaaggaagcctatgccttttatttcgcttcgtga

SEQ ID NO: 6265 - DNA, 125 bp, Oryza sativa
  Clone ID: PAT_MRT4530_12973C.1
tatatgtctgtgcgatagagcgctgtgcaaggagggcgcatactaagagcttgtgatgtaatgatgacaaacgcacctggtgtactagggatagaaagggtttaacgctacatggagttttggct

SEQ ID NO: 6266 - DNA, 135 bp, Oryza sativa
  Clone ID: PAT_MRT4530_12974C.1
cgcggccgtcgcactaattaagctctaatttctcttttcttttttcttcgattatccggcgtattagttaagttacaatggcctgagagtgaacgtccaataacgaagaaggagccaataacgaagaaggtaaca

SEQ ID NO: 6267 - DNA, 314 bp, Oryza sativa
  Clone ID: PAT_MRT4530_12975C.1
atggcggccgcgcggcgggtggcgggcggcggcggtggcaacctgtggggcccgcctcagccgccgccgtcgaccggagggggcatcccccagctccccgccgcggccgccgccccagtggagggccttctcgacgcccccttctcttcctcctccggtggcgggggggtttggtcggtgtactcgtgcggggttctagggctgtggcttggtagtgtgtctgcgctgtggtgcattcggtttggtggtcttcgggtcccgcccgtatcccgatggcagtcgttggcgccctttggtttgccgcgtttccgcgg

SEQ ID NO: 6268 - DNA, 3498 bp, Oryza sativa
  Clone ID: PAT_MRT4530_12976C.1
gcaatggcaatgacgatgctcttcagtctgctgttttgcacagctaaggctactgatgattcaggagcagaaactgaagcagaagcactcctccgatggaagtccactttgatcgacgccaccaactcgttgtcgtcatggtcgattgccaactccacctgctcttggttcggtgtcacctgtgacgccgccggccatgtcactgagctcgaccttcttggtgccgacatcaatggtacgcttgacgctctctactctgctgcattcgaaaacctcaccaccatcgacctcagccacaataatcttgatggtgccattccagcaaatatttgtatgttgcgcaccctcaccattctggatttgagcagcaactatcttgctggtgccatcccggcaaatatttccatgttgcacaccctcacctttctggatttgagcagcaacaatcttactggtgcaattccctaccaactcagcaagctccctaggctcgcccacttaggtcttggagataaccacttgacaaatccagaatatgccatgttcttcacacccatgccttttttggaattcctatctctatcgtacaattatctcaacggtacttttccagaattcatcctcaatagcaatagtttgaggatggagcacctcgatttatcgtataatgccttctcatggtccataccagattcactaccaaatttgagggttctagaactgtcgaacaatggattccatgggaccataccacattcactctcaagactacaaaagctccaagacctatatctgtacagaaacaacctcaccggaggaatcccagaggagcttgggaacctaaccaatcttgaggccctgtacctgtccagaaaccggttagttggaagtttgcctccctcttttgccaggatgcaacaattatcattgtttgatgtttccaacaacatgttaactggaagcatcccaccactaatcagcaactggacaaatctacactacttggacctgtcaaacaataacttttcgggttatttcccagtcgtactgaggaatctcagcagactagaatttttgaatcttggatataataggatttctggtgagattccttcgtggataggggaaagtttttctcatctgatgattctacagctaaggtcaaacatgttccatggaagtattccttggcagctatcacaactccccaaactacaattgcttgatctagctgaaaataattttacaggctccataccaggtagtttcgccaacttatcatgtttgcactgtattgatttatcaaacaattctctctctggtgagatcccttcagaattgacaaatcttagaggtattcagtccttaaatatttctagaaattttctacaaggaaatatcccaaatggaattggcaatctaacacatttagagtctcttgacctctcttggaataaactctcaggccatattcctcatagcatatcaaacttaatgagtctcgaatggcttaatctctcgaacaaccttctatcgggagagatacctacagactctgctgcattcgaaaacctcaccaccatcgacctcagccacaataatcttgatggtgccattccagcaaatatttctatgttgcacaccctcaccgttctagatttgagcgtcaataatcttactggtacgatcccctaccaactcagcaagctccctagactcgcccacttaaatcttggagataaccacttgaccaatccggaatatgccatgttcttcattgctccaaatttgaggcatctagatctgtcgtacaatggattccatgggtccataccacattcactctcaaggctgcaaaagctccgagaactatatctgcacagaaacaacctcacccgagcaatcccagaggagcttgggaacctaaccaatcttgaggagctggtcctgtcaagcaaccggttagttggaagtttgccaccatcttttgccaggatgcaacaattatcattttttgcgatagacaataactacatcaatggtagtatcccgttggagatgttttcaaactgcactcagctcatgatttttgatgtttccaacaacatgttaactggaagcatcccatcactgatcagcaactggacacacctacagtacttgttcctcttcaacaacacatttaccggtgcaatcccaagggagataggaaacttagcacaattactttcagtggacatgtcacaaaatctctttaccggaaagataccattaaatatctgcaatgcatctttgctataccttgtaatcagtcacaactatctggaaggtgagctccctgaatgcttgtggaatttgaaagatctcggatacatggatttgtcaagcaacgctttttctggagaagttacaacctcaagtaactatgaatcctccctaaaatcactgtacctgtcaaataataacttatcgggtcgttttccaacggtattgaagaacctcaaaaacctaactgtgttggatcttgtgcataataagatttctggtgtgattccttcatggattggggaaagcaatcctttgctgaggattctccgattacgatcaaacttgttccatggaagtattccttgtcaactgtcaaaactctcccaactccaactgcttgatctggctgaaaataattttacaggtcctgtaccaagtagtttcgccaacttatcctccatgcagcctgaaacaagagacaaattctcctccggtgaaacatattacattaacattatttggaagggaatggagtacacttttcaggaaagagatgattgtgttattggtattgatctttcaagcaattctctctctggtgagatcccttcagagttgacaaatcttagaggccttcagttcttaaatatgtcaagaaatgttctatatggtggcatcccaaatgacattggccatctacatgttgtagagtctcttgacctctcttgcaatagactcttgggtcctattcctcctagcatatcaaacttgacgggcctcagcaagcttaatctctcgaacaaccttctatcaggagagatacctataggtaatcaactccaaacactggatgacccatcgatttatgccaacaacctgaggctttgtggatttcctttgaaaattccatgctcaaaccattcaaattctacgagtacactagaaggggcaaaagaacatcaccaagaactggaaactctatggctgtactgctcagtaactgcaggagctgtctttggtgtttggctgtggtttggagcactgtttttctgtaatgcatggaggcttgctttcttcagtctcatcgatgccatgcagcagaaacttatgcaaccgagatcgaacgtcaggtggctgccggggtccatctccaccacgccgtcgccggccgtcctgcacttgcgctcacgcaggttggcggcgtaggcggcgtccagcggcggcgggtcg

SEQ ID NO: 6269 - DNA, 401 bp, Oryza sativa
  Clone ID: PAT_MRT4530_12977C.1
attctgagaaatatttgttaccgtattccgtatccaagctattcatttttagagatggcaatggggccccgtgacctgaaacccgttgggtttttactctactagggtgtatatacgttccaaacatcatacccatgggtacgttaacgggcaaaaccttcacccatcgggtacatgggtgtgggtacgttctcctgtcacccgaacccattaacccgtgggttgaaaatacccgtaggcctagcccaatatgcagatggcccaaggcccacaaccatcaaaaccctagcggccaagccacggccgcaccacacggcgcacgccacacgccggcacgacaccgcgtaggcgcgcatggccgcagcaccagccgccgaccggtctcagtcgcgccggtggag

SEQ ID NO: 6270 - DNA, 306 bp, Oryza sativa
  Clone ID: PAT_MRT4530_12978C.1
tcatggtcgattgccaactccacctgctcttggttcggtgtcacctgtgacgccgccggccatgtcactgagctcgaccttcttggtgccgacatcaatggtacgcttgacgctctctactctcgatttatcgggtaatgctttctcagggcccataccagattcactaccagagattgctccaaatttgaggcatctagatctgtcgtacaatggattccatgggtccataccacattcactctcaaggcaatcttgaggagctggtcctgtcaagcaaccggttagttggaagtttgccaccat

SEQ ID NO: 6271 - DNA, 355 bp, Oryza sativa
  Clone ID: PAT_MRT4530_12979C.1
ggatccatataaccaaggaaacttggatatgggtatctatccaaagtataagcagtacttaccattggaacatattttatatgacacacagagaagaaaatgattagaggcatttcaattttaattaagaaagataactattgattgtaccacaaaaaaggaggtagatacgataatctaaaccatgtgatatgaccatgggacccagaagtctttacggacttttttcatagcagctgcgatcttaacggtactgaaggcgattgttgtcatatgtaccccatgagcttgattcaggaagatgtgaatgacctttctcggaacctcccacatggatattgaagttatttcatat

SEQ ID NO: 6272 - DNA, 1202 bp, Oryza sativa
  Clone ID: PAT_MRT4530_1297C.1
gcacgaggcctttgccgaggagggaaagcgggagtccacgccgccgagctggaggccgggccatctcatcaaaccaagcgagaagcttagctccgccaactagctcgcgctcgcgtgtagcggataagcggagtatcgatcgatggatcggacgtcagccgtgccggggagagtgagcgacccggggtccgcgtggttcggcggcggcgagaggagctcgtcggccgggccggggcgcaacgtgcggctcatcgccaccgccgtcgccgcgttcgtgtccgtgctcgggctggccctgttcctccacctctacgtctgccacgtacgccgccggaaccgcaggcgcgcggcggaagcggccgcgctggcgaccgcgaacgcgggggcgccgcccaagcaggtcgggctggacccgtcggccatcgcggcgctgccgaccgcggcgtacgggaaggtggcgggcggcgacgcggcgggcggcaccaccgagtgcgccatctgcctcggcgccatgcaggaggcggacgcggtgcgcgtgctgccggcctgccgccacgtgttccacgtcgcctgcatcgacaagtggctcgcgtccagctcgtcgtgcccggtctgccgcgccggggtggagccgccgccgccgcctccgtcaacggcggcggcgaggtgcgtgcacgagaagcaggacgcggagaaggaggaggcggccgccggtagctcggcgccggtgcgggtgctcggcgcgtcgctaatgaagatgctgagcagggagagaccgtcgccgaggaggcagccgggagtccacgccgtggaaatggaagacttggaaagccagctgccgcggccgcaacagcagtagcatatgcggcgaataatcagcggccatttttaagccattttttgtttcatttttcgcttcgtttatacatcaagcgttccatgttggttcagtatgaactacataagtgtgtaagtgtttttctttattaggagaacgaaagttctccattaggtgtttggtgcttgtagctgtcaaaggaaaggagcagacccgtctcttgtatttgtacaaagaagggaaagtggataaagctctgatggaatttctctaggcaaagtgggagttgcggttgagacccataaaaaaaaaaaaaaaaaaaaaaaaaaaaaaaaaagggcgccgctcgcgatctagaactagt

SEQ ID NO: 6273 - DNA, 2208 bp, Oryza sativa
  Clone ID: PAT_MRT4530_12980C.1
atgggtgctaaggctactgatgattcaggagcagaaactgaagcagaagcactcctccgatggaagtccactttgatcgacgccaccaactcgttgtcgtcatggtcgattgccaactccacctgctcttggttcggtgtcacctgtgacgccgccggccatgtcactgagctcgaccttcttggtgccgacatcaatggtacgcttgacgctctctactctgctgcattcgaaaacctcaccaccatcgacctcagccacaataatcttgatggtgccattccagcaaatatttctatgttgcacaccctcaccgttctagatttgagcgtcaataatcttactggtacgatcccctaccaactcagcaagctccctagactcgcccacttaaatcttggagataaccacttgaccaatccggaatatgccatgttcttcacacccatgccctgtttggaattcctatctctatttcacaatcatctcaatggtacttttccagaattcatcctcaatagcactagtttgaggatggagcacctcgatttatcgggtaatgctttctcagggcccataccagattcactaccagagattgctccaaatttgaggcatctagatctgtcgtacaatggattccatgggtccataccacattcactctcaaggctgcaaaagctccgagaactatatctgcacagaaacaacctcacccgagcaatcccagaggagcttgggaacctaaccaatcttgaggagctggtcctgtcaagcaaccggttagttggaagtttgccaccatcttttgccaggatgcaacaattatcattttttgcgatagacaataactacatcaatggtagtatcccgttggagatgttttcaaactgcactcagctcatgatttttgatgtttccaacaacatgttaactggaagcatcccatcactgatcagcaactggacacacctacagtacttgttcctcttcaacaacacatttaccggtgcaatcccaagggagataggaaacttagcacaattactttcagtggacatgtcacaaaatctctttaccggaaagataccattaaatatctgcaatgcatctttgctataccttgtaatcagtcacaactatctggaaggtgagctccctgaatgcttgtggaatttgaaagatctcggatacatggatttgtcaagcaacgctttttctggagaagttacaacctcaagtaactatgaatcctccctaaaatcactgtacctgtcaaataataacttatcgggtcgttttccaacggtattgaagaacctcaaaaacctaactgtgttggatcttgtgcataataagatttctggtgtgattccttcatggattggggaaagcaatcctttgctgaggattctccgattacgatcaaacttgttccatggaagtattccttgtcaactgtcaaaactctcccaactccaactgcttgatctggctgaaaataattttacaggtcctgtaccaagtagtttcgccaacttatcctccatgcagcctgaaacaagagacaaattctcctccggtgaaacatattacattaacattatttggaagggaatggagtacacttttcaggaaagagatgattgtgttattggtattgatctttcaagcaattctctctctggtgagatcccttcagagttgacaaatcttagaggccttcagttcttaaatatgtcaagaaatgttctatatggtggcatcccaaatgacattggccatctacatgttgtagagtctcttgacctctcttgcaatagactcttgggtcctattcctcctagcatatcaaacttgacgggcctcagcaagcttaatctctcgaacaaccttctatcaggagagatacctataggtaatcaactccaaacactggatgacccatcgatttatgccaacaacctgaggctttgtggatttcctttgaaaattccatgctcaaaccattcaaattctacgagtacactagaaggggcaaaagaacatcaccaagaactggaaactctatggctgtactgctcagtaactgcaggagctgtctttggtgtttggctgtggtttggagcactgtttttctgtaatgcatggaggcttgctttcttcagtctcatcgatgccatgcagcagaaacttatgcaaacataa

SEQ ID NO: 6274 - DNA, 1054 bp, Oryza sativa
  Clone ID: PAT_MRT4530_12981C.1
gagagaagcgggggtcaggaaaattattcagaacaaaagcaaccgagggctgttttttttttaggtgataatatgaccttcttctaggataataagagcttctatatatacaagggggctagaaaatcgaagcctgcagttatgtgcccaacaatctaagaaaaatgatggcataaaatgtctatatgctgattgtacaatgacaccgtatagttatttcttccaagccctatatgctcacatcttcctcagattatcaagccgggcctgtaggtcgtcatctatcccaccgtccccacctccagcggcttcagcttgagcggcaacctttcctgctccaaccggtgcagcaacagcggttgaaggagccccgacaagctctgagttgacgtcgatgccaatttcgtcaaggacctggtttaccagttcttctgtttcttcctcctcctcatcgccctccaaagcatcgtcaatggcatcattcattgtgctactgactatctccatcttctcgttttgtatctcaaactcccgcattatcttctgcagagctggtagattcatctgcctgttcatctgtctcatggcttttgtgacacccttcatggcctcacccatagcttgtgtcgatttcaatgtctgaattcgaagagatacaccctgtagctgggacttgagggcatagaattttgtgatctgatgtcttgtgcggataaggtcctttgccataatttttacggctcccatctgtccttgcttggccaccttcttgatctcggcgatgagcttcttctcctgagcctgcaggccctgcctctccctctcgatctccctgatggatttatccagcatccgcttgttctcccgcagcaactcggctggggtcttccgcttgccgaagatgaagctcatggcggctcgatcgattggattcgggtttcgatctgctccgcgattacccctttccccctcgctgcgatcgatgcaataacccttcttcttcttcttcttcttgggtggattcggttgggttggggttaggggattcgcgaaa

SEQ ID NO: 6275 - DNA, 523 bp, Oryza sativa
  unsure (1)..(523): unsure at all n locations
  Clone ID: PAT_MRT4530_12982C.1
aagaaaacaaaacggtggttaataatagaaaattttccgggaaaatcgaaggctaaaaattaatagggtttttaagatttttacaattaacaaaagggggcaaatttccaagcccactttttttaaagaaagctgtaggaggaaagggacccttttttaacaccggaaaaaatataggttttaaaaggaacccttttgaccaaattattagggaaataaattaggaggatcgtttccgcccaatctaaataaaacgggacgttggatccgtaaatggcgtttggcttccagttgaccggaataacttttttggcaataaggtttttgccggaccgnggcggcgcccctaaaggaaaaaggtgccttgagggggggggggggggcccttcttcaaaaggggccccaagaaaggtttatgggccttcaaccttgcaattcggccttctggagggccatttggatgaactcaccggtgttggggaacaactttaccaacaccgggaaggaattggggttggaaccc

SEQ ID NO: 6276 - DNA, 399 bp, Oryza sativa
  Clone ID: PAT_MRT4530_12983C.1
atgaacgagcttttgggcattggcagtgccacggcaaccaccgccgcactcccatcaccgtaccctcatccactgatccgttctaaatgccgcatcatgatgattgcacgccccaaacccaaatcgcacgggctgcacggctgcaacgcaaccaccacaaaaagccccccctgctccggtgggcatccgcatatcagcatctgcttctgcgacgtgcggggggtggtgtgcgcgagtggtgcgccgcacgttcgttcgttcgtgccgccgcctgccaacctgcagcccagcaacgcagaaacggacgtggcatattttcctccgcgaccgcgagcacatggacatggccacggcgacgaggcatccacgcatcacgtacgcacctgtgcacgctgtcac

SEQ ID NO: 6277 - DNA, 1394 bp, Oryza sativa
  Clone ID: PAT_MRT4530_12984C.1
actagtggatccccgggctgcagggattgatcccatgaagaagcgcattgcaaaatctggtcagggtgttccacttggcggcatggttcaggaagtatggaaggagctacaaaggcgagtttcaacgctggcaattgttcccgggaacttgtgaagagagacctgtactggcaaatcaattttctgcgttcatttcccgcaaagatggtagaaactattcctcagtgctgcatcctgggaaaccagatttgccaaagaattggatcctgggacgggctgctgcctgggcaacccgcttcgccccacgctcgttaccctggggcctggtcgctaccctctgggcggcctgtccccgctgtcatcgtagtgtctcgtccgctgtcccccatcctgccacaccagtttcgccagagcggcgttccagttccggtattcgctcccgcggctgctatctcaggcgacacggctcctcgtgccacgctcgtttccccagggcctggccctgttgctggggagtccctgcccccggggtctccctcctgtgtcgtcagatttctccaattattccacataattatcaacagagcagctatccagtttctgtattcactttcacagtaactaactcaggcaatacggctgctgatgtaactttgcttttcacatgggctaactctgttggtgggaaatctgaacgtccggaattcccggccaattcccctatgatagaaaaggatggtgtgcatggcattctgttacatcacagaacagctaatggacaaccaccagttacttttgccatagctgcacaagagaaagaagatattcatatctcggaatgcccttactttataatatctggaagttctgatgcattttcagcaaaagacatgtggaattatgtgaaagagaatggatcttttgataaccttgatctcaccaaaacatcgatgtgctcaaaacctggattatcaataggggcagctattgcagcttctgttaagctgcctccccagacaacccagaatgtatcatttgcacttgcctgggcttggcctgaagtgaaattctccagtggaaaaacctaccataggcgttatacgaaatttcatggcacggataatgatgcagcagcaagccttgctcatgatgccattctagaacataattcttgggaaaggcaaattgaggagtggcagaatcctattttgcaagatgagaggtttcctgactggtacccggtcacacttttcaatgagttatactaccttaatgctggaggaactatatggactgatggattgccaccaattcaaagcttgacagggattggggaaaagaagttttctctggacatgcaaaatggggacgctgatgatgccaatgggataatc

SEQ ID NO: 6278 - DNA, 513 bp, Oryza sativa
  Clone ID: PAT_MRT4530_12985C.1
gtttcaacgctggcaattgttcccgggaactggtgaagagagacctgtactggcaaatcaattttctgcgttcatttcccgcaaagatggtagaaactattcctcagtgctgcatcctgggaaaccagatttgccaaaaggaagtaacatttcaggaattggatcctgggactggaatatgagtggacaaaactctacgtaccacgctctttaccctaggtcctggacgatatacaatggagaacctgacccagatgtcaacatagtgtgtcgtcagatttctccaattattccacataattatcaacagagcagctatccagtttctgtattcactttcacagtaatactactttccatgagataccttcaatacactattttagtaactaactcaggcaatacggctgctgatgtaactttgctttttacatgggctaactctgttggtgggaaatctgaactaactggatatcactccaatttccctatgatagaaaaggatggtgtgca

SEQ ID NO: 6279 - DNA, 231 bp, Oryza sativa
  Clone ID: PAT_MRT4530_12986C.1
atgacctccacccctttgcttcacccgttgccgcttcggtcgaaatcttcgctccgcgccaccgcccctctgctccgccgccgctgctccagccaaaatcgtggagatgacgagaaggttgtctgggcagaggtcgagctcgcctgctgttgtttcgctctgccaccacccctctgctctgcccaccaccgctacagccaaaatcgtggagatggcgagaaggttgtctag

SEQ ID NO: 6280 - DNA, 1294 bp, Oryza sativa
  Clone ID: PAT_MRT4530_12987C.1
ctttattccttttatgctatctaagaaatgataaattgcgtttttttgtatgctgtcttctcttagctggacatgacacatgaaagatttatagtgaaggatggaagatggtttctagagttctgaaagggaaaatgttatgcctccttggattgaagcagttctttttatatcttcagttaaatattcggttatcttctttttttgacatttattttgcaatttaaggaatatacttatgattattgacaaatccaaatttagcttagggtacactgagtattgtgttacgcgacaaatgaggaaattggtgaaaaatttgcttgctaagggtgcactggctattctgaatatcttaaaaatgatgtttttaagagatcgatgtacctttaagttatgtcatcaatcgaattatctttgggacatgtttgatgagggacctaagcagatgtaacttcatgagctcaccagcaccgggtggatgggtttccaatagtaacatccctaaccaccttatttatgaatagagatcaacttatttattatatccttattgagttctccgcaattgtagcatttggatatcaaggtgcttatcaaaatctaggctatgttggtgatcgatcgtgagtggtatttagtaggcaatggtgagttcaggcttcagtagtaccagagtgattattgataactaccgagatgtccacgtcagagtggtacgagctccagattaagaagaacaagctttgtgacatgtttgatgaggcgccttcccaatggtgcatgatttagtgaaagcaagggataaccactttgttagagtcaatttcgactcgtgatttgtcctctatagtcgtcgtttggaactaccccatctataccagagatgcctgtccaccgttatgacagggacctaagcaagaataacttcatgagctcaccagcaccgggtgatgggtttccaatagtaacatccctaaccaccttatttatgaatagagatcaacttactggaacaaaccatattgagttctccgcaaatggaccatttaaatatcaagttgcttatcaaaatctaggcctccttggtgatgatcgtgagtggtattttgcaattgctgatgttgcatcgtgtgcacttccttaccaactttgtcttccagttaagatctgagaatgcatctctgcaaaagtgccctgcctgagatgactcagaaatataagcagtctacgatagaaaatggcaatctttgagatgacgtgaacactatgaagaagaaggtattttttggta

SEQ ID NO: 6281 - DNA, 416 bp, Oryza sativa
  Clone ID: PAT_MRT4530_12988C.1
ttggtttttttttgcctgtaggaactagcatacactgatccaaacggaatcattctacagaacagaacaccaacatatcaaaaagggaaacaagaaaaaagctatccatcctgtgctgtccggctgtttggccttacacatgtcttctactacacctctgattaaacaaccaccattcacccccaacaacctgagtaccaacgctaaactaagaccgatacagcattttctttgagacgagggcacaatctactttacttattctcgcctaagctaccgattactcaggtttatttgtaaagttcctcaacaatctcagccttctttgggcagcggactagaagaacttttcgtagtcatcctgtgttggctgcccccagaaatccatgaaaccaatatcagtgagagacccatat

SEQ ID NO: 6282 - DNA, 745 bp, Oryza sativa
  Clone ID: PAT_MRT4530_12989C.1
gtaatcaacagcatgaacaagagcataagttttgagtacaagatcgatacagattttcttacctccataataagagccaaaattttacctggtactgtcctaggaccagtactaataattaagcaagagaacagatagtcacatgagctttttaaggtttagtaggatatctgtaaaacattcctgccactgccaatatttaacatgccgaggattcgctgatcatatgcttccgagttgtgcgacggtgccagagtcatcattcatcaccctcttgtgacggcgttcccctccgacgcagttccttcatcttgcggaattcatcatagtgagccttccgttgctcttcgaaatctgtgccttgtttgatggccacctcttcttcttcttcttcttcttcttcttcttcttcttcttcttcttcttcttcttgttcttcttcttcttcttcttcttcttcttcttcttcttcttcttcttcttcttcttcttcttcttcattactacaggattccaaatgttctcttgctgataattttccacttgaaacagcttccatcaaagcagtcttaatcgcatcagcatgagtggacttatccactgattcttcaatagttctttttggagaaacagtcccatcatcttcatcaatcattgagtgatatggcgtcttaggctcggtgattttttctcttactggcttggtcgactcaatgtcattcaaattttcttcattccatttcac

SEQ ID NO: 6283 - DNA, 3407 bp, Oryza sativa
  Clone ID: PAT_MRT4530_1298C.1
gcgcccccaacgcggggggccacgcgtcgactagtacgggagggggggggggggcaaagaagaggaatttaattataagaggaagagggagaagaagagcttaggtacaggctccagtacaagagatcgatcgagagacagaggatcggagaggaggaagaaggagaatccaagtactgggaggcaattaatttgagttgagatcgacttgagagctagcagaggctcatctcatctaggccagcagaggctcttcgctcgcttatttcatccatggcttccaaaggcacagaaggaggccatggtggcgtggagagaaaggagcagcagcagcagaggggttaccagctgccccgtgactcccggggatcactcgaggtgttcaacccctcatccagcttcctccttccgcactgcttgctcgccgcccccaagtccgcctcccccttccttgctattcccgacagggaagtaggaataatcgtggtggcacaacaagcggatgcagcagagtgggctcgtaacaaataaccgcacggatatgttctgaagaccctgatgatgatcttcaataaaagagagggacatatattgttgcttgctttgcgtgcgtaggccaagattaagattatgtcatgtaaatatgtaatgtaccgtacagaccttgttgtgtttgaacctagtatgcgatccatcatcttaataagatgcaatgcagcgcaatgtgtgccagtgaacagtaatgagcttgacttgagtttatagtagtctagtatagtgagtagaggaaaaaaagagtaaattgtattgacggtacgtaaacttgtcaagtgggtgcaatttagtatacgaacttgtaaaacactcatttggatgtatgaatttgtttgatgtgtgtgaaccaagaacagcacgccattctagaaactcttaaccattgcccctatcaaggatgaggacggcaggctcctcaagttcatcgggatgcaagtggaagttagtaaatacactgaagggaaaaaggatactgttgttcgtccaaatggactttcagaatcactcatcaaatacgatgctcgacagaaggatcacgcccgtagctcagtgtctgagctcttgttggctctcaaaaatccacgctcattgtcagaatcaagcaataacaccttaaaaagaaaatcacaagaatccctaagcatgtcaatgaccgaagttcctagtaagagaagctctgaaagtggatctcgccgaaattctcgtagcggaacaaggagctcgcttcagaagatcaatgaagtacctgatcaagggaatagaactagaaaatctggtctgcgtgcatttatgggttttcttggtatgggccatggaagtgtagagaagaacatgctgaaacctagagatgaagatccactgatcgatagtgatgatgaaagacctgagagctttgaagatgagtttaggaggaaagaaatgaggaggggtatagacttggctactacacttgaacgtattgagaagaattttgtcatcacagatccaaggttgcctgataatcccattatatttgcatccgatagctttctgcaattgacagaatacaaccgtgaagaaatattagggagaaactgcaggtttcttcaaggccctgaaactgatcgtgcaacagttaggaagataagagatgccatagataaccaggcagaggtcacagttcagctcataaattatacaaaaagtggtaaaaagttttggaacctctttcacttgcaaccaatgcgtgatcaaaagggtgatgttcagtactttattggggttcaattggatggaactgagcatgttcaggatgatgctgcaaaagagggagtcgtgctggttaagaaaaccgcagataatatcgatgaggctccaacggtacccccggctcccattctgagaccggaagatctatgggctaaccactcaaaagtagtcctgccaaatccacatatgaaggatactgcatcatggagagccatccaaaaggttctcgagagtggtgaaagtattggtttaaaacattttaggccagtaaaaccattaggatctggtgacactggaagtgtacacttggtagagttgttgaatacaggagaatactttgccatgaaagctatggataaaagcatcatgcttaaccgcaataaggttcacagagctactgctgaacgccaaatccttgatctattagatcacccattccttccaacattatatgcatcatttcagacaaaaacgcatatatgcctcattactgactactgcccgggtggtgagctctttgtgcttctagataatcaacctctgaaggttctacatgaagatgcagtcaggttctatgctgccgaagtggttgttgcactagaatacctacattgccaaggtataatataccgagacttaaaaccagagaatatcttacttcatagagatgggcacatctcccttacagacttcgatttgtcttgtctaacatcttgcagaccgcaggtctttcttcccgaagatgctgatgagaaaaaagggagaaaaaacgggagttaccccatattttttgctgaacctatgcgagcatccaattcatttgttggcacggaggagtacattgcgcctgagattattacaggagctggccatacaagcgctgttgattggtgggctctagggattcttctatatgaaatgttgtatggttatacaccttttagaggaaaaacgaggcaacggacatttgctaatatcttgcacaaggatatcagatttcctgctagtatatcggtcagcctagcggcgaggcagctaatgtataggttgctacatagggatcctgccaacaggctagggtcctacgagggagccaatgagataaaaggacatccctttttccgtggtataaattggcctcttatacgcgccacggcgcctccaaagttggagatcccactattttccaaggatgacatggagaagaagggactagtaacaaataaccgcacggatatgttctgaagaccctgatgatgatcttcaataaaagagagggacatatattgttgcttgctttgcgtgcgtaggccaagattaagattatgtcatgtaaatatgtaatgtatcgtacagaccttgttgtgtttgaacctagtatgcgatccatcatcttaataagatgcaatgcagcgcaatgtgtgccagtgaacagtaatgagcttgacttgagtttatagtagtctagtatagtgagtagaggaaaaaaagagtaaattgtattgacggtacgtaaacttgtcaagtgggtgcaatttagtatacgaacttgtaaaacactcatttggatgtatgaatttgtttgatgtgtgtgaaccaagacc

SEQ ID NO: 6284 - DNA, 318 bp, Oryza sativa
  Clone ID: PAT_MRT4530_12990C.1
atggagagagaaacaataacaaaagtacaattttgccccttgcataccaagtctggctcgcatacacctccgacgcggcaaccgcacccgccgccggtgaggtggctatctagagggggaagggggtttcaaggagggcccatgcgcctgggccatgccggtgtcgatgctccgccacacaccgtgcttgggggtgagcactacatggagcacctcctgatttatgtcgagcagggcgccgcagagcgcaagctattgttgtcggtctcacagctgcgccacaccacgctgccatatcctccaccgtccatgtcgtga

SEQ ID NO: 6285 - DNA, 607 bp, Oryza sativa
  Clone ID: PAT_MRT4530_12991C.1
tttttctgtaatcaacagcatgaacaagagcataagtttttgagtacaagatcgatacagattttcttacctccataataagagccaaaattttacctggtactgtcctaggaccagtactaataattaagcaagagaacagatagtcacatgagctttttaaggtttagtaggatatctgtaaaacattcctgccactgccaatatttaacatgccgaggattcgctgatcatatgcttccgagttgtgcgacggtgccagagtcatcattcatcaccctcttgtgacggcgttcccctccgacgcagttccttcatcttgcggaattcatcatagtgagccttccgttgctcttcgaaatctgtgccttgtttgatggccacttcttcttcttcttcttcttcttcttcttcttcttcattactacaggattccaaatgttctcttgctgataattttccacttgaaacagcttccatcaaagcagtcttaatcgcatcagcatgagtggacttatccactgattcttcaatagttctttttggagaaacagtcccatcatcttcatcaatcattgagggaatgcgtttaagctcgggaattttt

SEQ ID NO: 6286 - DNA, 529 bp, Oryza sativa
  unsure (1)..(529): unsure at all n locations
  Clone ID: PAT_MRT4530_12992C.1
ccacgcgtccggtcagagcacgtgcatttgctaagaaattatctgatgcccctttagctatcgttgataagagaagacagggtcacaacatgtcagaggtcatgcacttaattggtgatgtgaagggtaaggtcgccatcatggttgatgatatgatagacacagcaggaacaattactagtgcagctgctttgttaaaacaggagggagcagaggctgtctatgcttgtagcacacatgctgtcttcaggtttggcagttggtttattgtaacatccatgatccatgtaatagtattgattcattggcttgttgcgaaggaaccatgttatggcatgattaggcagattggctttatgtttgatcaatataaaaatgacagggtagagcaataattttactagattccacttgagcacaccaatcacttattgctagtaagtgggagtctggaaaagaggttggctntaatctagttgagtgcggatctggntcttgttgactctatttcattagtagncatgaatct

SEQ ID NO: 6287 - DNA, 482 bp, Oryza sativa
  Clone ID: PAT_MRT4530_12993C.1
gtggagcggaaaaggaaaaaaaaaacttatctcccgtcgccgcctcccggagccgctcgccgcctcctcgcgagcgcccgccggaccgccgggtgccgccgccagctccgagcgctcacccgccggagccgcgccccctaccccgccacctcctcacgcgcgcccgacgctcgccctaccccgctgctgccgcctcctcagcagccgccggtgagccgggttgccgtctgctggggccttctccaccgccgcgccgcctcctcgcgcgcagcctctggagatctggggtcgccgtcggccagctcctcctcgcgtgcgcccgcccgggatctgtggtgggttacggcactacgtagtatagactccaggttaaggcacagggaggcaacaatccaatctaggagagatgggatgggatcccagctcaagggagccctgggcgcagctacgattgggaggacctaagccctacagccaagctc

SEQ ID NO: 6288 - DNA, 550 bp, Oryza sativa
  Clone ID: PAT_MRT4530_12994C.1
cacgagggactggtgccatacatgtgatcatccaagttccccgggcggcgcgtatgcccctcgtggtatgcatctgcaacagattggcgtgttgatgggagatgatattactgagcgcttcgtccatattttcaccgtgatgattctagcttgtaattgtactagatttgttcttcagttttctatacttgagtatttaatgttcgagtcaaacaggaacttgctgttaaacactctctagtccccaatcagattgttgctactggtggagtgtctcagaagtcatcacaacaactcaaaatttcatatttcccaattgattctttttcgaagcttgtagctatggtgctcaagtactcatctgctgaaacaggaccaaataaatgcagccttcttcccaagatttggttagtggcagttaggatcattcagagagattctgaagagaagaaagcatcattcaatccccggccatactttcggctttttataagtttgctatatgatcttatttcttctgacctccatagtgatggtgctaatttccagg

SEQ ID NO: 6289 - DNA, 333 bp, Oryza sativa
  Clone ID: PAT_MRT4530_12995C.1
acggaataccgctgtagcacttcaccttcgggtgaccgcaaaaggatatcgaactcagggaacatgtgtaatctacctaaggctaagacaatccaaggacaaaaactaaagcgtggttccggctatagctctatgatgtatccgaacgtggaggattactaggacgggattcagggttgtcaccacctgccgcctacttctgacaaatccgtgggatacacaacaaacaaagctgaacccgggacggctccgttcaacccgtttttcatcgtggacactaattttgaggccctcagcccattggcatgatagttgggcccatttggagttgtt

SEQ ID NO: 6290 - DNA, 708 bp, Oryza sativa
  Clone ID: PAT_MRT4530_12996C.1
atggcgagtggcggcgccgagggggcgacggagcgaagcagcgtggtggccggcggtggacggagcgacggtgggcggctggcgatgggcggcgggaggaagcggagccgagcggtggccgggcgaaatggagcggctgcgggcggtgggcggagcgacaagggcagctgtgcgccgctcccccacaccggtccccgcgcgccgtcactcctctctcaccctaccgctggccaccgacccaagcgcaccgccattcctctccctcccccctgccggccggcgtgtgccaccgctcctctcgcgtcggaggtgcgcccgacgtccttggcgaggtcgtcgccgctccgccgcaaggacgagggagagccgagagaagaagaggagaggagagggagaggggaggggagccggcgagctcagattggggggcagcgggaacggcggcgtcggcgtcgctccgcccaccgcccaccgccgctccatttcgccccactgccgctctgctttctcccgccgctcaccgcccgccgtcgctccgttcaccgctggccgccgcgctgctttgctccgtcgcagcgtcgcccatcgtcgctccgctttctcccgccggccatcgcgccgcttcgctccgtcgctgctccactccgtcgccgctccacccgttgccccctcagcgccgccgctcgcccttctctcctggcaatgtag

SEQ ID NO: 6291 - DNA, 204 bp, Oryza sativa
  Clone ID: PAT_MRT4530_12997C.1
gttcgacccacggcgtacgcgtacgcgtacggatacgtattgtatatttcaattaacagaatatgttagaggggaaacttaatggggggagtttaacactgacaacatggattcaaagtatttgttgcagtcgtagcatggactgtatttatgtagcacaaagagaaagatactgtgtgatcgaaccgaggagataatatcatg

SEQ ID NO: 6292 - DNA, 2429 bp, Oryza sativa
  Clone ID: PAT_MRT4530_12998C.1
atggatcagaaggcgaaggaggcggcgccggcggcgagggggcacccggcgctgcggggcccggcgaggcgggagcggtacacgcacgggctcggggcggcgcagatgggggcgctcagggccatgtgcggcgcgctcatcccggcgctgccggcggaggaggacgacggcgcccgcggcggcggcgacatggacgtcgagcggttctacctcgccaccgccgccgagtccaccgtccccgacgaggttgctgagctgaccatgacacggtgcatctgggaggcaggggtgctggtgaggatcatcctgtggatccggcccccgggggtcggcacgctggcgctgtgcggcccgcggtgcgtctccggtgagttcccctacgtgcgccggttcgccgacatgccggtggagcggcgggaggcggccctggagcgctcaagatcatttttgcgctcatcaaggtcctctgccacttcgtcttctacaccgcggttccaattgttaatatacaacatagtggacgagaacttggagaacccaagttggaaggcaatcgggtacagcgtcccggcggccgaggaagagccacagaaagaagaacctacagaagcaacgccgacgccggcgccggcgacggcgccgccgtgccggcctctggacaatggcgtcgtggagaccaagcagctggacgacaacgccttgctcatgtcgctcgcggagaagggcctcgcgctgaagacgggcgcgtcgtcgccgagcgcgcaccaccacacggtgctgtgcgacgccgtcgtcgttcgtccccgctgccgcgggcgggggggccctgccgtccgcgcgtcgggcgggtaccaggtcctcggcgtccagcagcgggactggtgccccgcccgggactacagcccgctggagggccgaagcatggagcgcctctacgagaatggcggcgtgttcagcacggcgaacgtgacgaccaccatgttcgccggcgcgacggtcggcggcggctcggcggtgaactggtcggcctgcatccgcacgccggcgaacgtgttgcaggagtggtcgaacgaccatgggctccctctgttcggggggcaaggctacgtgcaggccatggacgccgtgtgcgctcggctcggcgtcaccggccggtgccgggaggaggggttccagaacaaggcggtgcgccgcggctgcgaggcgcttgggctgcgcgtcgaggccgtgtcgcgcaactcgtcggaggggcacttctgcggcagctgcaacctcgggtgccccaccggcgagaagcgcggcaccgacacgacgtggctcgtcgacgccgtcggccgcggcgccgtcatcctgaccgggtgcaaggccgaacggttcatcctcgagacgaacaccggcggcggcggcggccggcgcaagaagtgcgtcggcgtcgtggcgaagtgcttgggcaaaggcatcaccaagaagctccggatcgaggcgaaggtgtccgtctcggcgtgcggcgcgctcatgacgccgccgctgctgcgcaacagcgggctcaagaaccgccacatcggccggaaccttcacctccacccggtgtccatggcgtggggctacttcccggacagcacggcggagctcccgggcaagtcctacgagggcggcatcatcaccagcatgcaccgcgtcaccgaccgcaccatcatcgagacgccggcgctcggcccgggcgcgttcgccgccgtggtgccgtgggagtccggccgcgacatgaaggagcggatgcggcggtacgcgcgcacggcgcacgcggtggtgctcgtccgcgaccgcgccgcgggcaccgtcggcggcgagggccgcgtccgcttcaccccgagccgcggcgacgccggcgagctccgcgccggcctgcggcgcgcgctgcgcatcctggtggccgccggcgccgccgaggtgggcacgaaccgcagcgacgggctgcgcctccggtgcaagggcgcgcgtgacgaggacgtggaggcgttcctggacgaggtgagcgtggagaaggggccgatgcacccggggtcggacaagtgggcgctccttgcctcggcgcaccagatggggagctgccggatggggaggagcgccaagcacggcggcgtcgacggcggcggcgagagctgggaggcggaggggctgtacgtctgcgacggcagcttgctcccgacggccgtcggcgtcaacccgatgatcaccatcgagtccgtggcgtattgcgtcgccaagggcatcgccgagtcgctcgcgtcgcgcgcagcgcgctcagtggaaaaccgtgatgtgtccacgaaccctcctctagcttgtgaatcgtaatacgattattaacttctttaattaatactgtgcttttttttaagataatgaaaataaatctcagcgtttagcgc

SEQ ID NO: 6293 - DNA, 2301 bp, Oryza sativa
  Clone ID: PAT_MRT4530_12999C.1
atggatcagaaggcgaaggaggcggcgccggcggcgagggggcacccggcgctgcggggcccggcgaggcgggagcggtacacgcacgggctcggggcggcgcagatgggggcgctcagggccatgtgcggcgcgctcatcccggcgctgccggcggaggaggaggacggcgcccgcggcggcggcgacatggacgtcgagcggttctacctcgccaccgccgccgagtccaccgtccccgacgaggttgctgagctgaccatgacacggtgcatctgggaggcaggggtgctggtgaggatcatcctgtggatcctggccacgagggtcggcacgctggcgctgtgcggccggcggtgcgtctccggtgagttcccctacgtgcgccggttcgccgacatgccggtggagcggcgggaggcggcgctgaagcgctcaagatcatctttgccctcatcaaggtcctctgccacttcgtcttctacaccgcggttccaagtgttaatatatcatatagtggacgagaacttggagaacccaagttggaaggcaatcgggtacagcgtcccggcggccgaggaagagccacagaaagaagaacctacagaagcaacgccgacgccggcgccggcgacggcgccgccgtgccggcctctggacaatggcgtcgtggagaccaagcagctggacgacaacgccttgctcatgtcgctcgcggagaagggcctcgcgctgaagacgggcgcgtcgtcgccgagcgcgcaccaccacacggtgctgtgcgacgccgtcgtcgtcgggtccggctgcggcggcggcgtggccgccgccgtgctcgcgtcggccgggtacaaggtcgtcgtcgtcgagaagggggactacttcgccgccagggactacagctcgctggagggcccgaccatggagcgcctctacgagaatggcggcgtgttcagcacggcgaacgtgacgaccaccatgttcgccggcgcgacggtcggcggcggctcggcggtgaactggtcggcctgcatccgcacgccggcgaacgtgttgcaggagtggtcgaacgaccatgggctccctctgttcggggggcaaggctacgtgcaggccatggacgccgtgtgcgctcggctcggcgtcaccggccggtgccgggaggaggggttccagaacaaggcggtgcgccgcggctgcgaggcgcttgggctgcgcgtcgaggccgtgtcgcgcaactcgtcggaggggcacttctgcggcagctgcaacctcgggtgccccaccggcgagaagcgcggcaccgacacgacgtggctcgtcgacgccgtcggccgcggcgccgtcatcctgaccgggtgcaaggccgaacggttcatcctcgagacgaacaccggcggcggcggcggccggcgcaagaagtgcgtcggcgtcgtggcgaagtgcttgggcaaaggcatcaccaagaagctccggatcgaggcgaagcgggctcaagaaccgccacatcggccggaaccttcacctccacccgggtccatggcgtggggctacttcccggacagcacggcggagctcccgggcaagtcctacgagggcggcatcatcaccagcatgcaccgcgtcaccgaccgcaccatcatcgagacgccggcgctcggcccgggcgcgttcgccgccgtggtgccgtgggagtccggccgcgacatgaaggagcggatgcggcggtacgcgcgcacggcgcacgcggtggtgctcgtccgcgaccgcgccgcgggcaccgtcggcggcgagggccgcgtccgcttcaccccgagccgcggcgacgccggcgagctccgcgccggcctgcggcgcgcgctgcgcatcctggtggccgccggcgccgccgaggtgggcacgaaccgcagcgacgggctgcgcctccggtgcaagggcgcgcgtgacgaggacgtggaggcgttcctggacgaggtgagcgtggagaaggggccgatgcacccggggtcggacaagtgggcgctccttgcctcggcgcaccagatggggagctgccggatggggaggagcgccaagcacggcggcgtcgacggcggcggcgagagctgggaggcggaggggctgtacgtctgcgacggcagcttgctcccgacggccgtcggcgtcaacccgatgatcaccatcgagtccgtggcgtattgcgtcgccaagggcatcgccgagtcgctcgcgtcgcgcgcagcgcgctcagtggaaaaccgtgatgtgtccacgaaccctcctctagcttgtgaatcgtaa

SEQ ID NO: 6294 - DNA, 3283 bp, Oryza sativa
  Clone ID: PAT_MRT4530_1299C.1
ggcacgagtagctagccagtccagtccaagagatcgatcgagagacagaggatcggagaggaggaagaaggagaatccaagtactgggaggcaattaatttgagttgagatcgacttgagagctagcagaggctcatctcatctaggccagcagaggctcttcgctcgcttatttcatccatggcttccaaaggcacaggaggaggccatggtggcgtggagagaaaggagcagcagcagcagaggggttaccagctgccccgtgactcccggggatcactcgaggtgttcaacccctcatccgcttcctccttccgcactgctgctgccgccgccaagtccgcctcccccttccttgctattcccgacagggaagaggataatgtggtggcacagcagcgggcagcagagtggggcctcgtcctccagaccgattaccacacaggcctcccccagggcgtctccacacgaccctcctcttgctccgcacgcaccagctccgaggacaccccacagcaacagcagagcgccgccgccatcccacgggtgtcggaggagctacgggcagcactatcagcgttccaacagacgtttgtggtgtctgatgccacccgccccaaccaccccatcatgtacgccagcgctggcttcttcaacatgaccggctacacctccaaggaggttgtcggcaggaactgccgcttccttcaaggctctggcaccgacccccatgagattgacaagatcaggcaagccctcgcaaatggctccaactattgtggccgcatcctcaactacaagaaggacggcacgccattctggaacctcttaaccattgcccctatcaaggatgaggacggcaggctcctcaagttcatcgggatgcaagtggaagttagtaaatacactgaagggaaaaaggaaactgttgttcgtccaaatggactttcagaatcactcatcaaatacgatgctcgacagaaggatcacgcccgtagctcagtgtctgagctcttgttggctctcaaaaatccacgttcattgtcagaatcaagcaataacaccttaaaaagaaaatcacaagaatccctaagcatgtcaatgagcgaagttcctagtaagagaagctctgaaagtggatctcgccgaaattctcgtagcggaacaaggagctcgcttcagaagatcaatgaagtacctgatcaagtgaatagaactagaaaatctggtctgcgtgcatttatgggttttcttggtatgggccatggaagtgtagagaagaacatgctgaaacctagagatgaagatccactgatcgatagtgatgatgaaagacctgagagctttgaagatgagtttaggaggaaagaaatgaggaggggtatagacttggctactacacttgaacgtattgagaagaattttgtcatcacagatccaaggttgcctgataatcccattatatttgcatccgatagctttctgcaattgacagaatacaaccgtgaagaaatattagggagaaactgcaggtttcttcaaggccctgaaactgatcgtgcaatagttaggaagataagagatgccatagataaccaggcagaggtcacagttcagctcataaattatacaaaaagtggtaaaaagttttggaacctctttcacctgcaaccaatgcgtgatcaaaagggtgatgttcagtactttattggggttcaattggatggaactgagcatgttcaggatgatgctgcagaagagggagtcgtgctggttaagaaaaccgcagataatatcgatgaggctgcaaaggaactgcctgatgctaatttgagaccggaagatctatgggctaaccactcaaaagtagtcctgccaaatccacatatgaaggatactgcatcatggagagccatccaaaaggttctcgagagtggtgaaagtattggtttaaaacattttaggccaataaaaccattaggatctggtgacactggaagtgtacacttggtagagttgttgaatacaggagaatactttgccatgaaagctatggataaaagcatcatgcttaaccgcaataaggttcacagagctactgctgaacgccaaatccttgatctattagatcacccattccttccaacattatatgcatcatttcagacaaaaacgcatatatgcctcattactgactactgcccgggtggtgagctctttgtgcttctagataatcaacctctgaaggttctacatgaagatgcagtcaggttctatgttgctgaagtggttattgcactagaatacctacattgccaaggtataatataccgagacttaaaaccagagaatatcttacttcatagagatgggcacatctcccttacagacttcgatttgtcttgtctaacatcttgcagaccgcaggtctttcttcccgaagatgctgatgagaaaaaagggagaaaaaacaggagttaccccatattttttgctgaacctatgcgagcatccaattcatttgttggcacggaggagtacattgcgcccgagattattacaggagctggccatacaagcgctgttgattggtgggctctagggattcttctatatgaaatgttgtatggttatacaccttttagaggaaaaacgaggcaacggacatttgctaatatcttgcacaaggatattagatttcctgctagtatattggtcagcctagcggcgaggcagctaatgtataggttgctacatagggaccctgccaacaggctagggtcctacgagggagccaatgagataaaaggacatccctttttccgtggtataaattggcctcttatacgcgccacggcgcctccaaagttggagatcccactattttccaaggatgacatggagaagaagggactagtaacagataaccgcacggatatattctgaagaccctgatgatgatcttcaataaaagagagggacatatattgttgcttgctttgcgtgtgtaggccaagattaagattatgtcatgtaaatatgtaatgtatcgtacagaccttgttgtgtttgaatctagtatgcgatctgtcatcttaataagatgcaatgcagcgcaatgtgtgccagtgaacagtaatgagcttgacttgagtttatagtagtctagtattgtgagtagaggaaaaaaaaaagagtaaattgcattgacggtacgtaaacttgtcaagtgggtgcattttagtacacaaacttgtaaaacactcaaaaaaaaaaaaaaaaa

SEQ ID NO: 6295 - DNA, 537 bp, Oryza sativa
  Clone ID: PAT_MRT4530_129C.1
atggggaaagtggcgagagtttcggcggggaagacgaagcgacgtttggcttttggtgttatttgggtatcgggaatactaatgggcctgggcctaaaacagtacttcagcccaattttgttatcggcgtgccctttaccgtctttgattttggtgttcgggagatcaaggcagaaggagtcgaggtactcaggttatcgttttggattacgagagaaggctatttcgtcgactgtaaaggtctcaggggctactgtggagattatggatacctcatacctacacggcatgacggccaccaccgccggagcacccaacccgctggcccaccgtcgtcgccgcggctggatcgggagatcccttgctccggatccgccgccgccgctctccctacctccaagtttcgccgccgccgagtcccccgtctctggatccgccgccgccgccctccctacctccaagcttcgccgccactcgagcccgccgcgtcgacatcaccgcagctgctgcaaccgctctcgtcgagcatcacgatga

SEQ ID NO: 6296 - DNA, 378 bp, Oryza sativa
  Clone ID: PAT_MRT4530_12C.1
atgaagccgttcggccgcgagatcgctactacgagagagagagagagagatggcggcgcggcggctgtggagcggccggtggcagtggagaggccggcggcgtggtggaggggccgggggggaagcggccgccggcggttgaggggccggtggcggcgatgcggtggacggcgcggcggcgacggagtggtggagcggcggcagaggcgcgcggccggtggtggcgatgcggtggacggcgcggcggcggcggagcggtggagcggcggcagaggcgtgcggtcggtggagctcggcggtggagcggccgacgtgagctcgaaggtcagcagaggtgtgcggaggacgatggttggcggcggtggaggacgacagtag

SEQ ID NO: 6297 - DNA, 609 bp, Oryza sativa
  Clone ID: PAT_MRT4530_13000C.1
atgcccacaaagccaatcgggcccgacccatgcccacaaagccaatcgggcaaatccccgtacctgtgcccatgctcgtcgggcacgggcatgcccgacgggtgcccactgggcatgcctgccatccgccaccgcgccgccgcccgcgcgcagccgcgtcaccggtcgccgcccccaccgccgtgtcgccgcctgctacccgcgtgcagccccgtcgccggccaccacccacaccgccgtgtcgcgggccgccgccccacgctcgtgtgccacctaccgcgaaactgcagtcgcccacgctcgtgcgccaccagccacacgctagccgccgccgctgcgctcaagcaccgccgcgtctccactcgccagccactgtcccgccgcctaccgcgtcgccactcgccagccactgtcccgccgcctaccgcgtgccactcgccagccactgtcccgccgcctgccgcgtcgccactcaccagccaccgtcctaccgccagccgcgtcgccagccaccgcgtcgcccacccccgccacgccgccagccaccgcgtcgctagccaccgccgagtcgcgccgccagccacctttcccgtgggccgccgctggtag

SEQ ID NO: 6298 - DNA, 1247 bp, Oryza sativa
  Clone ID: PAT_MRT4530_13001C.1
atggacgccgtgtgcgctcggctcggcgtcaccggccggtgccgggaggaggggttccagaacaaggcggtgcgccgcggctgcgaagcgcttgggctgcgcgtcgaggccgtgtcgcgcaactcgtcggaggggcacttctgcggcagctgcaacctcgggtgccccaccggcgagaagcgcggcaccgacacgacgtggctcgtcgacgccgtcggccgcggcgccgtcatcctgaccgggtgcaaggccgaacggttcatcctcgagacgaacaccggcggcggcggcggccggcgcaagaagtgcgtcggcgtcgtggcgaagtgcttgggcaaaggcatcaccaagaagctccggatcgaggcgaaggtgtccgtctcggcgtgcggcgcgctcatgacgccgccgctgctgcgcaacagcgggctcaagaaccgccacatcggccggaacctgcacccccacccgcatgcaccgcgtcaccaccgcaccatcatcgagacgccggcgctcggcccgggcgcgttcgccgccgtggtgccgtgggagtccggccgcgacatgaaggagcggatgcggcggtacgcgcgcacggcgcacgcggtggtgctcgtccgcgaccgcgccgcgggcaccgtcggcggcgagggccgcgtccgcttcaccccgagccgcggcgacgccggcgagctccgcgccggcctgcggcgcgcgctgcgcatcctggtggccgccggcgccgccgaggtgggcacgaaccgcagcgacgggctgcgcctccggtgcaagggcgcgcgtgacgaggacgtggaggcgttcctggacgaggtgagcgtggagaaggggccgatgcacccggggtcggacaagtgggcgctccttgcctcggcgcaccagatggggagctgccggatggggaggagcgccaagcacggcggcgtcgacggcggcggcgagagctgggaggcggaggggctgtacgtctgcgacggcagcttgctcccgacggccgtcggcgtcaacccgatgatcaccatcgagtccgtggcgtattgcgtcgccaagggcatcgccgagtcgctcgcgtcgcgcgcagcgcgctcagtggaaaaccgtgatgtgtccacgaaccctcctctagcttgtgaatcgagcatcgaggactttgacgatctgcggaagacagtgatagcatggcagagtgctttacgacacactagaagtgttcagaatgtggtggcgac

SEQ ID NO: 6299 - DNA, 454 bp, Oryza sativa
  Clone ID: PAT_MRT4530_13002C.1
tttttttttttttttgaatggatcgaagaacccacgtcatgtatgtactgcctaaatgagctatctcatctatcgaaatacagagttcattaaggcatttcacatatctcatctatcgaaatagagagttcattaaggcatttcacatggctgactatttagccagactctcatctctgtcaattctcagagtacccgctatcttcacgattggtttgattccttatgagtaagcttcctgttcactgaaagtacctgagctgtaaatagcaaatgtgaaattcactgaaagcaccttaatattatcaacaatatacatgttgttacaagcatttctcttagcaattcagtgtaccaactgtagttcacatccttgttcattttgttatatcaaacaaattaagtaggtgcgataaggatgctggtaacaagtagaagatttattgatgcaacc

SEQ ID NO: 6300 - DNA, 414 bp, Oryza sativa
  Clone ID: PAT_MRT4530_13003C.1
atgaggaaggaagccaagcccagcagcattcagatttcagaatttggatggtatcaggcgatttctcctgcgtatgaggtgatacttacgaagtatcaggtgaaacctgtcaggtgtcaggcgattcctatcacgtatcaggagatacttgcgaagtatcaagtgagacctgtcaggtatcaggcgattcctaccacgtatcaggagatacttgcgaagtatcaggtgagacctgtcaggtatcaggcgattcctaccacgtatcaggagatacttgcgaagtatcaggtgaaacctgttaggtatcaggcgattcctaccacgtatcaggtgatacttgcgaagtatcagaaaatcaaagacaatgccaactgctattggttatcacttatcggaatagcagcccctgaataa

SEQ ID NO: 6301 - DNA, 606 bp, Oryza sativa
  Clone ID: PAT_MRT4530_13004C.1
atgtcgtactacgtagatcctcatatcagcgtaccccaataccctctatatccggtctacgggaaaatagctgataaagttggtctagccggatattacgtcgttgtgcctgatttgttccatggacaaccctacacatttgaccagaaccgtacagaatggctcagtgctcattctccggtaaaagcagctgaagatgctaaaccaatctttgctgctctaagcaaggaagggaaatctattgttggagttggaggttactgttggggcgggaagttcgcagtggaggtagcaaaaactaacgaggttgaagcaattgtcatctcccatcctgcagcggtgactgctgatgacatgaaagaggtcaaatggcccattgagatccttggagctcagaatgacacagttacaccaccaagattagtttaccagtttgttcatgccttgcgtcaaagaactgatcagattgattattttgccaaggtctttcaaggagtgaaccatggcttcgcttgcaggtataacgccagcaaccctttcgaggtcaaaaaagctgagcaagcacttgcgttaatgcttgactggtttcacaaacacttgaaatga

SEQ ID NO: 6302 - DNA, 930 bp, Oryza sativa
  Clone ID: PAT_MRT4530_13005C.1
atgacgggtgggccctacccgtcagtgagggtgctattggccgagaccaatgaggacaccgatgtcgtaaattcaacaccatggtctcagccaaagcggtttattcgaaagcctccaagatttttgtcgccggtggttgttggcccaagtatcatgccatctgacgtgtcgctgagcgttcagctcagggacttcttattgaccaatggtggtcgtatggacagcgtgaaattgctagagattgacagctccgttgcgtatggatacgatgtactcaaatcgttctccaatgggaatctgacagaggggctattcatagacccgttcagctcgattctgttcaaggaagacatgaggaacaggccagatacttttggaaaaaggattttcataccgacttctgtctcgtatctcctgaacaacgactttatcaaacaaaatggtgagacacatgatttctccgccgatgctttggccggaaacttgcgcgactatatccagaacgttccgatgacgaagactcagatggcgggtggacattatggattcgaacaactacctttgattggaacactggagagcgaccaccatcgtgcgttgtccaaacgcatcgtcaagggtctgagcgatgcgctgcaggaggtagcgcctaagagtttctgcaggttcggcgacttcaggaggaacatgatgaagtgcccaaaaatgcaaatatgctccaacgactgtgcattttacatcgtgcggttcatggaggcttacgacggcaaccgggagtctatcgagactctttccatcccgaccaactcgtcgcttgtccggtcaagcatcctccaccagctgatgttcagcgagtacaaccaagccgcgcctcttcatcctgacatcgagatgttccgccgatccgatgttgtcgatcctgtcgcctaa

SEQ ID NO: 6303 - DNA, 474 bp, Oryza sativa
  Clone ID: PAT_MRT4530_13006C.1
attaggtccacagtcttggagcaccagtatcttcgatctttcactggaggtttgctttttcacgtgtaattaaaatgttgcactgcatcttacaaaattatcactctaggaagcttactttttgtatgtcagaatttgtttgatcgttttctccaagaagcttactatttgtatgttctcagcccatttttgcatttactgtctggttagacaattacccgttgcagagcaggtgtccataatggagaggttattatatttttccttttgcacaattctgtttccaaagtatttaaattgtgcctgtacaatttgttcacaggcaagttcacacttttttaatttagttcagatcttagtttccatctgaatatatggtgcaccatagccgtggaaaacggtatatacagctctatagcaagaatttgttggattcatgctattgatacttggctcggtcaaattattttacat

SEQ ID NO: 6304 - DNA, 247 bp, Oryza sativa
  Clone ID: PAT_MRT4530_13007C.1
aacataaaaacgtgaaaccatcaattcccacgggggtcaacaaatacaaaagctaacccatacaaacataactaggcagaaaatagccatacacttacatccacacaaacaagacgcaaaaacaattgatgtaccattacaccaaaaccctacacagaaatacgaaaatgacacctaacatacgctctgagaagcacgacaattaatattgttacacccagaaacctgttaaataattaacagagag

SEQ ID NO: 6305 - DNA, 496 bp, Oryza sativa
  unsure (1)..(496): unsure at all n locations
  Clone ID: PAT_MRT4530_13008C.1
ggcacacaggcataatactgtaaccaaaggctgcagtaactgtgacaaggaaaagttagagcagttggctagtcagctgacattggagaccacgtcggttgatccaacaagttgctgcggaaatcatgagatctgttcacgtcaaattctccaggacgaatgccctggaactaataaaatttcgcatgacaagattgctgcaagaaaggcaccatttaaactttcatggggatgcaatggggataataatggtcagcacaagcatgattttgtatccttcgaaaaaggggatataacaacagctgaacgcagcaataagcaggtagctatttgaggtttgagctatatgatccattttttaaaaaaattgtcttaactagttggaaatgattgttggataattccattgctgccgtatttttttaatggcaaaaaattaccgtgcctcagattttgctaaagtgggaatccnctccacacactgttcttttcgtga

SEQ ID NO: 6306 - DNA, 351 bp, Oryza sativa
  Clone ID: PAT_MRT4530_13009C.1
atggaagatgaaaaaaaggcgtctaaattcacccgtacacgaatggacgaagcaaaaaagcatgcagaaaacgaaggcgatcaaactgattgcatcacgcaagattattcaacaccaaaccaggacaaacctgcaggagcaagaagaagacgatggaggaagcaggggggcgtacctgttggtgaagatgaggccgatgcagaagctggcgaggcagaggaggagggtccatttcttggagatggtgccacggagcaccagctcgtcccctccgccgagcaccgctgctccccccctgctcttgttgaagctcatcttcacctgatctcttcttcctcctcgctcgcctag

SEQ ID NO: 6307 - DNA, 607 bp, Oryza sativa
  unsure (1)..(607): unsure at all n locations
  Clone ID: PAT_MRT4530_1300C.1
aaacccatcctccgccgccaacgcgccgagagcaaaaaaagagaagcaccgggatgctgtacatcgtggggctcggcctcggcgacgagcgcgacatcaccgtgcgggggctcgacgccatccgccgctgcgccaaggtctacatggaggcctacacctccctcctttccctcggcctcgacccctccgcgctctccaacctcgagaagatgtatgggaaggagatcacggtggcggaccgcgagatggtggaggagcgcgccgaccagatgctccgcgaggccgcngnacgcggacgtcgccttcctcgtcgtcggcgaccccttcggcgcaactacacacactgatctggtggttcgcgccaagaacatgggggtggaagtgaaggtgatccacaatgcgtccgtcatgaatgcagttggagtttgcggattgcaactttaccgctacggggagaccatctctatacctttcttcacggagacatggaggccggacagtttctatganaagattcagaacaatcgacggtttggactgcacccactttgcttactagatattccgggtaaaggaacccaccgcttgagtctttatggaggggaaa

SEQ ID NO: 6308 - DNA, 435 bp, Oryza sativa
  Clone ID: PAT_MRT4530_13010C.1
cgcagtttcaaccaatcagcctgcaccattatccaatgggcttctactctatgttgactcgcaacctgatgagcttcttatctcatcccctgatgggcctgctcaattcaacagggcttgacatgaactggtttgagacacttaacagaattaaaaacatcccggtcaagcaaacatccgaagataacttggagactgctgttacgttaatgaagagcacttataacttttatcgggagagcccttgtggaacatttccttcaggtatcaatctctacacggttacaccatcacaagctcctattgaagggctaccgccaaccgctgctgtagttgagacgctcgacttaagtattccaagaaaactccttctgtgggtatacactctggctgattggtcggcactcaaatatatccttccgtagcaaaggattg

SEQ ID NO: 6309 - DNA, 1175 bp, Oryza sativa
  Clone ID: PAT_MRT4530_13011C.1
tttgttttttttttttttttttttttttttttttttttttttttttatttttttttttttttttttttttttttttttattattaggggttcataaacttagaacagaaccgccacaaagtttcacatacttgtggcattttatttttttttgatacacctatactatttcattagtacatcactctgaggcctcgttctccgactcatttgagaagcctaggtaggtctgttgttgatatctaggagtgaaggcaccgagctcttctcccctattattcttaaggcttcgtgcttgctccctcgatatgcggtaagcattagcgatcacatccactggcatggcacggaagtagttgagttcgtttcccgcgtgggcaaggtggctcaccagtggagtttgcatgggtcttgaatgaaatgtattggcatccttcagtgctctgctttcttcaagacagcgtagtattgcggaatgatcagcaattgacctggacgtagaacgccattgaataccgtctttccaaggttactaacgacctgaactcgagcatgcccttgaacgatatacaccagcggacgcgtgggcggacgcgtgggcggacgcgtgggcggacgcgtggggaagagctcggtgccttcactcctagatatcaacaacagacctacccaggcttctcaaatgagtcggagaacgaggccttagagtgatgtactaatgaaatagtataggtgtatcaaaaaaataatgccacaagtatgtgaaactttgtggcggttctgttctaagtttatgaagcactaataaaaaaaaaaaaacaaaagaagagtaaaacacataaaaaaaaaaaaaaaaaaaaccaaaaaaaaaaaacggcaaaaaaaaaaaaaaaaaaaaactacataaaaaaaaaaaaaaaaaacaaggggggggccgttttaaaggaccaaagtttacgtccgcgagcttccaaagtaatattttttgtataggagccccaaaatgaatttactgggccgcgttttaacaactttggaacgggaaaacccttggggtacccaaattaaatccctttgaagcaaatccccttttcacaagtgggggtaaaaccaaaaaggcccccaccgatcccctttccaaacaattgcccaccctaatggggaatgggacccccc

SEQ ID NO: 6310 - DNA, 1302 bp, Oryza sativa
  Clone ID: PAT_MRT4530_13012C.1
atgacgctcatgaaactcgtcatgcctacactgttgctattgctgctaaattctagccaaaccaactgctcccagctctacgacaacaccactgacatgctctcgttgctcgactttaaggaggccgttactaacgatccgaaaggaagcttgagttcctggaatagaaccaccccgttgtgcaggtggaaaggcgtcaaatgcagcccaactcggccagggcgagttgtggcgttggatctctccggccaaagcttagcgggcgtaatcacaagctctcttggaaacctaacattccttgagaaattggacctgtccacaaatcagttctctggcttgttacctcctctgaaccatctgcatatgctgcaagtccttaatctgagcacgaactcattgcaagatgtgattccggaaacacttgtcaattgctccagcctaagaatattggaactgtctaagaatttcatggctggtgaaattcccctcaaactagatctcctctccaatcttttggtcttacggctttcctggaacaatttcactggaattattccaccaaccctcagcaacatcactcacctagagagattagctctagcttctaatcacttcactggaacaattcctgaccaactagggaatttgtcacatttgtcgaggttgctcctaggtggcaatgacctgtcaggtgaaattccacatgtcctctttaatatgtcttctctaaagatgctagctttggaattgaataagtttggtactacactgccaccgaatattggagatgccctccccaatctccaatggcttatgttaaatcataacatgtttgaaagttacatcccagcttccgtaggaaatatctcagggttggaaagactagacctagaaaacaacaattttaatggagaaattcctagttctttcggtaagcttcgtaatctgtatcatctaaatctcgaggaaaaccagcttgaagctagtaacagccatcaaagctgggaattttttcacgcattaacaaattgtagtcttctacaagttctctcactagctgcgaatcagctacaaggatctattccaagttcaattggtaacttatcaaccgatcttcaacagttatatctaggtggtaatgagttatcaggaatagttcccccaagcatagggagacttaaaggcttaactacacttgcactagataccaacagtttaagtggtacaattgaaggatgggttggaaggctagcaaaactagagtggctattgctcgaagataacagtttcactacatattaa

SEQ ID NO: 6311 - DNA, 1266 bp, Oryza sativa
  Clone ID: PAT_MRT4530_13013C.1
atggctgctcaccgcgtggggcgatgcatgctcctgcaaccaccgcgcctcgccacctgcgtcctcttcctcctgctaccgctgctgctgccgtgctcggcgtcgtcgtcggtgatcacccacctcccgggcttccacggccgcttgccgttccaccttgagaccgggtatgttggtgtggacgaggagacgggcactgagctcttctactacttcgttgaatcggagaggagcccaagtacaggccctgtgatcctctggttgacaggcgggcctggctgctccggattcagcggtgtcgtctttgaagtaggacctatgaaatacgtgttggagccttataatggtagtttgccacgattggtttataatcagtattcatggacacagatggcaagcatcctcttcttggacactcctgttggttctggtttctcatacgctcatgatcctaaaggttataatgtcggggacatatcatcgtctttgcaagtcgtaacatttctgaagaagttacaggggtatatagttggcaaccccattacaggctcgaagattgatgataatttcaaaattccatattctcatggtgttgggatcatatctgatcaattatacgaggctgcagtagcaaactgcaatggagattatgtgaccacaacaaatgaattatgtgctaaggccctaaatgctattgataatctcatgtctgaagttgattatggaaatatcttggatgataaatgtgttcgtgctacaccaaaacccataaatgaagtttcaagaagtaggagtctgcaagaagattacattcggctaagtgagccgactgttcgacctactatcaattgtttttcataccgttactatctatcattcttgtggatgaacaacaatttgactagagaagctcttaagatcaagaagggaacagtcggcgaatggataagatgcaagacagggctaccctatgttcaagatgtcgcaagcagcatcaagtatcattttgacctcaccacaggaggttaccgggcacttgtgttcagtggtgaccatgatctcatattgccatttctgagcacccaggcatggataagatccttgaacttctccatagttgatgagtggagagcatggcatgtggatggccaggctgcaggatttacaattttgtacgccaacaacttgacctttgccacagtaaagtgtccagcccttcacaattcacatactggctttctgaagaatcctaaacaaggtttatga

SEQ ID NO: 6312 - DNA, 737 bp, Oryza sativa
  Clone ID: PAT_MRT4530_13014C.1
actagggagcttctcacaatggctgctcaccgcgtggggcgatgcatgctcctgcaaccaccgcgcctcgccacctgcgtcctcttcctcctgctaccgctgctgctgccgtgctcggcgtcgtcgtcggtgatcacccacctcccgggcttccacggccgcttgccgttccaccttgagaccgggtatgttggtgtggacgaggagacgggcactgagctcttctactacttcgttgaatcggagaggagcccaagtacaggccctgtgatcctctggttgacaggcgggcctggctgctccggattcagcggtgtcgtctttgaagtaggacctatgaaatacgtgttggagccttataatggtagtttgccacgattggtttataatcagtattcatggacacagatggcaagcatcctcttcttggacactcctgttggttctggtttctcatacgctcatgatcctaaaggttataatgtcggggacatatcatcgtctttgcaagtcgtaacatttctgaagaagtggttcaatgatcacccacgctatctctcaaatcatttctatgttggaggaagctcatacgctggaaaggggattccaattatcatgaagttcatttcagaaggaattgaacaaaggcagcagccattggttaatcttaagttacaggggtatatagttggcaaccccattacaggctcgaagattgatgataatttcaaattcca

SEQ ID NO: 6313 - DNA, 228 bp, Oryza sativa
  Clone ID: PAT_MRT4530_13015C.1
atgaatatcgagctagaggcagttagaaacaccaacacaatccacaaggtcatcccgtatgcgagcttctgggcacctcctgatggcatcccgatgttcaccttcaccgacacgggccaaaccatagctatcaagcaccttatccattctgcctggcccgacttccgccagttcttgatgacgcaagggctgttgggaggctgcggagtgaccggctgtccaatctga

SEQ ID NO: 6314 - DNA, 609 bp, Oryza sativa
  Clone ID: PAT_MRT4530_13016C.1
atgtcggagcggcgggccggagcagtgccggtggcagggaggagcggcggcggccggagtggggcgggcaaggagcggcagcggccgaagtggggcggccgccgcatcgccaggtatgtcggggcggcctcggggccgggagctcccacggggccctcgctgacggtggccgcggtctgggagatggcggcggcggcggatggctcctcagttggctcggcggaagggctctcctcctccggctcctcactcgcgctgggtgcaaacgccggccacgtggcgctagagccgcccatccgtgccgactgcctcccgtgtcgggcaaggagggaggtggtgtacggcggccgagcgatgagggtcgccgcgcagcggccgccaaggaggagcggcgtgcggcggacgggcgaggataggacggacgcgagttctgggcagagcgtcgtcgtcgtcatcgtcttcggaaacaccgcagtggttgtcgtcgcgctccacccgctgctcgccgccgctccatctgtgacctaccgcctctcagctccatcgccgcccctctgcgccgcctgctgccgttcgccattctcaggggagagagagtgggggatatag

SEQ ID NO: 6315 - DNA, 305 bp, Oryza sativa
  Clone ID: PAT_MRT4530_13017C.1
gagggccatgaccaaaaacagcaccgggggggcttatttataagttggggagggttatcactcaagcttccccacacacaatacattatgggccagatgcactcgcatcacatacctgggattgagaggaatcctaccactttcgacgcggtaggactactacgcatgctcccaagccaccctggggtcacagcgataatgagaaacaatcaattgcaagtgagattgctcactgggaacacctctagtgtgaccgtaggcatccatccaaagtgaattatagggaacaaaatgatcatgggaca

SEQ ID NO: 6316 - DNA, 1125 bp, Oryza sativa
  Clone ID: PAT_MRT4530_13018C.1
cgggggtgggggtttaacagttaaaatttcaaatgtgtatttgtggccggaggtagcaagagattttaaaaaaataaacagagatggccatgcacgcgcgtggtgtattaatttcatagcctcacgaagaacacggcgagctccgggcagtcgccgccgtgcgggctgatcatgtagagcgactccgagttcctggagccgatgatgtgctcgaagctcccacgcatgtacgccatctcgccgtctttcccgtccatgtccgagatcccggggagcacgccgccgcccatggacaccgcccacagagtctccagcacggcgatgtcgtcgtcggtcgggtctcgccgcaccgcgtaccccaccttcttgccgttgcaggacatggtccacatggactcctcgagcacccacccgtcctgctgctcgcgctcgcgcctcgagctggcgccggcgccggcgccgtcgccgccgtccgccgcgcgcttctcgctctccagcacgatgcgcgcgccggcggtggtgccgaggtcgcggagcagcgcgtgcgtcgggagcgccagctccaccaccagcgtcggctggcaccgcgggttgtcctgcagggacagcgcgatgcgggcgtcgcggtagccgaacagcgtccccgtcatgcgccggcgcgacgccccggcggcgccggtggaggccgacgccacgagcttcgacatcagggaggcggaaggggacagccgcgacggcgccgcgatccggcacgccgccccggccggctgcagccgcccgcaccccggcgtcagcaccgggagcgaccggcacatggtgtggaacatcctcaccggccgcgacggcctccccggcctccgccgcacgggcggcgccgcctccagcgctcgtcccgccgcccgcaggaactgcttcttgctgccggcgtcgtcgtcttcggcgtccgacgacgacgacagggacgccggcctcatccttcgtgaaccgccgtcgtccaccaccacggcgtgatcggccatatcttccggccgggccggggaagcgagcgagctaccggagttgccgccggcgctgctcgctccctcggcgtcgcgatcgatggatggatcgtcgcggacgcgtggg

SEQ ID NO: 6317 - DNA, 321 bp, Oryza sativa
  Clone ID: PAT_MRT4530_13019C.1
atggctgattacgaggtggccgcacacatgcttggcgagtgtgagcgtagggttgtcgaggccgagatctgtctccaagccaagatcgatgcacttcagatggagtatgatcttctagccaaagaagtgccaaagaaggagaaagaggaggtgcgccttgagaaaatcatcgttgaggctggtgcccgctttaaggccatccttgttggtattaacatgctacaaagaaggaacgaggaattccttgtcgattcacaacgctacatggatgaagttgaacccaaccttaagtctgcaatcacagtggttgaagtgctctag

SEQ ID NO: 6318 - DNA, 336 bp, Oryza sativa
  Clone ID: PAT_MRT4530_1301C.1
atgtcggtgagcgttgtcttgttctcgtcgttcccgtcggcgcccgttcaagtggtcacgatctcagctcgaatgttcgttggggtcttcttcgacactgccgtcgacgtgcacctcttctcctcgagctgggagttgaggaggatcttgagccggaggagctccctgggctctgttcctatgcaacgcttcgagtttgaactcgtcgttcttggatctgagggcgtggaggtttggtggcgtcaaggaagactttgcagcctaagagctcatgtcctcttgagtcttgacttatggatcagacaccaggtggtcttggttggtgaagcacgctga

SEQ ID NO: 6319 - DNA, 303 bp, Oryza sativa
  Clone ID: PAT_MRT4530_13020C.1
atgggaggcacgctcggctgcgtgccgatgggaggggcatacctatccccactccgcctgacagagggcgggcgtgggtgtgctgccacctgttccatccgcctgcggccggcgctcggccgcgcctccctctccgcccgctcgaccgccacatggcagccggatgagggcctcggggcaacgcgccctacgggcccgaggggtgcggcagggcaccccgaggccgcttggccgcctcacgaccgctcgctctcccccaaggggggtaataggtcgcgcggccacgtggagcagtatgagtag

SEQ ID NO: 6320 - DNA, 519 bp, Oryza sativa
  Clone ID: PAT_MRT4530_13021C.1
atgggtggatccatccaccacgctggccctctcatatcccagtggctccgttcacggtgcctgggtactgaatcagcaccgtggaatgaagcggggacgacggcatccggcgacactgccggtgtggaagctgaatggcacctcgccgcaaaccacgtctgcatctggagatatgatggggacatcatgtggacgcaacgtccgtggatccggcacggcacggctgtgggcgtggcggcgacggacgactacggccgtgatgggcaactgcgggcaggaggcaaggcggcggtggatccggccgccactctgcccccacgcacacggcgcgacctccgcgcggctctccccgcgccgaggctagcggaggaggcgcgtgatggtggcggtggctcttccgcacgccgaggcccagtggaggcggcgcctagcagcggcagctatcccctgcatagatcccgggggtcggcggccctcccccgtgcggatccggtggcagccgccctccccctacggtga

SEQ ID NO: 6321 - DNA, 849 bp, Oryza sativa
  Clone ID: PAT_MRT4530_13022C.1
atgggtgatgtggccgagcgcaaggagggaaaagagagtgcgggatcgggcttagacgaaccattacacgattgcgacgcgaggcgaagtggcacggggcccaatggtcttcggggatgctcccgcggcggcggaaagggcggcacggcgcgggagcaagaggggcggctggcggccacgcaacagcaagggggaggtcgagaggggctcgagaaaggtggtgggaacggcgtcgatggggatggagttgtggtcatggcagtcgcgacggcggggcggcacagcaccgagatggcacggttggggaagcagagagttggcgcaaggaactccgggagggtgacgacgagttggggacgagggttcaccaacggccacgaatttggcggcggtgatccggtggtgagtgggagtcggtggcgcacgggggcgtgggtcatgatcacggcaccggggcggcacggacagggtcgcgatgaggcggcgacgaccgttgttcggtcgacggaggacaaggagacggagtgcgtttgtcgagcggcggcacccggcggcaaacttgacgctgaggtggcaatggcgcggtggcggtggggagcgaaaatgggagagatagagaaggatggctcgagctttataggcacgaggagaggcggtttgggagagggaaccgacatcgagggcggtcaaggagcggtggctggttccggcgctagcggccaaaggggtggcagcccgggacatggaagccgaggtgacgccagcaaccccatggtgacggcggtgggcagtgtggagtggagcggggacaggacggtcgtcggcgcaggcgatgaccagagggagtga

SEQ ID NO: 6322 - DNA, 1326 bp, Oryza sativa
  Clone ID: PAT_MRT4530_13023C.1
atggtcttcggggatgctcccgcggcggcggaaagggcggcacggcgcgggagcaagaggggcggctggcggccacgcaacagcaagggggaggtcgagaggggctcgaggaaggtggtggtgagcgggttcgaagggagggggaccaacagcggcgacaaaaatagagccacggcgggccacgatgacagggaacggcgtcgatggggatggagttgtggtcatggcagtcgcgacggcggggcggcacagcaccgagatggcacggttggggaagcagagagttggcgcaaggaactccgggagggtgacgacgagttggttagagagagaaaggccgatgacgacgcatggcacacgcagcatcgagggtggggaaggggacgagggttcaccaacggccacgaatttggcggcggtgatccggtggtgagtgggagtcggtggcgcacgggggcgtgggtcatgatcacggcaccggggcggcacggacagggtcgcgatgaggcggcgacgaccgttgttcggtcgacggaggacaaggagacggagtgcgtttgtcgagcggcggcacccggcggcaaacttgacgctgaggtggcaatggcgcggtggcggtggggagcgaaaatgggagagatagagaaggatggctcgagctttataggcacgaggagaggcggtttgggagagggaaccgacatcgagggcggtcaaggagcggtggctggttccggcgctagcggccaaaggggtggcagcaccatgccatccatgacggtgcaatcggccggcatgaagaggcttctccgcgacatcgagagcaggaggacgccgccggatcacctcgcgccgatcactgggcgtgtcgccaagaagttttcacggccatcctcaccattcctggccggcgccgccggcgtcgacgagccgatcatcaagaagggcacgccggtgagcgtgcgcacccgggtcggcaagatcggcgcggggctcaaccgccacctcgtgctccggctcggcgccgtcgtcgtgtccgacgccgacgaggacgacggcttcctcgacgtcgtctacaacgtcgggttcccgccccacgatcccttccgccccgtgcgcgtatccagggaccaagttaaggtgatcacgcccaccgccgccgtcaccaacgctgccgcgccgccgccgccgccgcatcccaccaagtcgaagagcaacgacggcggcccgagaccgaccgtcgccggcaagtcgctgcggctgctgacgaagctggagagggagagagctggagcaatatattactccctagttttgaggccatga

SEQ ID NO: 6323 - DNA, 2765 bp, Oryza sativa
  Clone ID: PAT_MRT4530_13024C.1
cgttcggcttcggcccgtggtgtggagtcgagagaagaggctctcttcgagcttctccttccctcccttcttctgctctggaccccccggttaataggcgcacccctatccctctgggtttcttgcactcacgacacggctcagggtgtcctggcaaggtttttctctctgaatagcacttactctctgtgtgaaggagagatggaaggagatctgctcggaggcctctgtttgtgcttgagtaagaagatgtggcaggaggggatgtgttgtgcgatggtggatgggggaagtcctcatgagtcagacttgtgtgctgaaagtgaacatcccactgtgatgggtgccagaagggcaaggtcaagaagatcctccagaagatcgaaggtgtgtaccagactagcattgacgctgagcaggggaaggtgacggtgtctggcctggtggatccggccaccattatcaagaagctcaacaaggccggcaagccggcggagctatggggttccaaggtcggggtggcggcggtgaacaaccagtttcagaagctccaccttgacggcggcggcggcggcaagggccagcccaaggatggcggcggcaaggggcatcccaaggacgccggcggcaagggccagaagggcggcggcggtggcggcggcaacggtggaggcggcagcaaagacgtgaagatgatgatgccgccgcagatgccgcagccgacgccgcagcagcttcagcagctgcagcagcagctgcagatgaaggggctgaagctgccgcagttcatggacgccgccaagatggcgccgttcgcggcggccgcgccgatcaaggaccccaagtccgtcaagttcaaccttccccccgaggatgacttcggcgacgatggcagcgagtttgatgacgagttcgatgagtttgacgatgaggacgatttcgacgacgacggcctcgacgaggactacttcgacgatcccaagatgatgaagcagatggccatgccgccaccaaacgccggcggcggcggcgacaagaagggtggcggcaagaagggcggcggtggcaacgagatccccgtgcagatcaaggggaacgctaacaacgccgccggcggcggcggcaagaaagacgccggtggcaagcagaaccaaggtggcggaggcggtaacggcaagaacggcggcggcggtgggcagccgaacaacgccaagggtggcggcgccccgaacggcggcggcaaccatcctgctcaggggaagaagggcggcggcggcggcggtggcggccagggcggcggtgtcggtgggccgatgggcggcatgccggcgcagcagcaggccatgatgatgaggccgaacatgatggggggcggtgccggtttccccggaatgggccagatgggcggcgggcccatgaccatgccgatggcccaccacccccacatggggagcgcccagggcggcggcgccggcgccgtgcagggcatgccaacggcggcgttctaccagggcggcggcggcggcggtggcggcggcatgccgtccggcccagagatgctgcaggccgcggcggcggccggcaaccccatggcccagcagcagtacatggccatgatgcagcagcagcagcagcagatgatgatgaacggccacggccaccacggccatggccaccaccacggtcaccatggccacggcggcggcgctgctccggcggggtacccggcgatggggtacgggtacggccggccgccgatgccgtacccgatgcactacccgatgcagccccacccgcatgccgatccctacaactacttcagcgacgagaacccaaacagctgctcggagaactcaacttccttgaaggcgaagaagaaagattataatactccatcccaaggtgaggaaggtgataacaatgataattgtgggagcaatgcaatggaggagaggggatggatgatcatgatgatggctgtggtggtggtggtggtccatgtgttatgtgaggaggaagagggaagtcatagaggagaggagctgctgcagttttggccatggttgcaaccttttcctgcaccctgcacttacattattgatggggggggcaaattttttcgccaactaatgaccacaggcccttacaccagaattgcacatttcaatcctatgaccacagtaagcaccactgcttctgcctgccctgatcatagaactgcttggtccctctccctcacaacgattgattccacccccaactaccgcggtaaaagttgcgttgtgtttgtccaagtaggcaaaagcagctttctccaaagcgatccatggagtaggaggaaggatcttatagtggggcaagcgatggagccggatggaagggaatgctactcgctctctatgcatgtagggcaggcggggagatcaggaggactaagtagtcgaaacccttacgaagatgctcaggctgtcatgccctagacaccatgggaaatgagtcccatttagatcgctcttctttttttcttctttttcttttttcttttttacttagctcgttttcacctttcttttaaaggagaactcaacttccttgaaggcgaaggtaggtatagtaattatctatagtttttcataagagatgatgatgatgatggtgctttataattccagaaggaaggtggtggtggtggtttccttcttgctccataaggtgttgtggtgatgcatggtagatgaacaatgtgcaaagcaaaatgtgttgcc

SEQ ID NO: 6324 - DNA, 360 bp, Oryza sativa
  unsure (1)..(360): unsure at all n locations
  Clone ID: PAT_MRT4530_13025C.1
aaggggaaccatttgcacaatatatgttttttgtttgtctacaccaagggtacttttccaaaccctatttttcatgattaaaacagatcaagaaaaaaaagggttagaggcccggttgaacataggtagagcagcattcttttgcttttcacagagaaaaggacctttcatttcactgggaaactagcacaccaacggggttgcggtttgcagggccgcctccaccaaaagggacctggaaaggcggggttaaaacggccgaatgcccaaagattttaggccggngaatgggtcctagggctccagttttagggagaccattcgggactgccggtttcgtttgggcgcccttacgaaccc

SEQ ID NO: 6325 - DNA, 1260 bp, Oryza sativa
  Clone ID: PAT_MRT4530_13026C.1
tcaagtactcagatctctcacgcctgctaaggaccacgatttggcctcctctttgattttggccagaaggctacccatcgaaagctccttttgctgaaaggttctgcggttcctttcattccagatttcccaggctaccaggagcgttagtgtgcgcagagctttctttggagcgtcttttgtgtttgcggtagcctcccaccactccgataccgttgaagcttggtgccacaggctagggtttaattgttcgcatgctgtccactctgctatcgccccccagattctccgggtgtatctacactccgcgaggaggtggatggctgtctcttggcgatggcgacataagggacagatggatccattcggccaacccctggtggccagtctgttggatgtccagactctgttttggatgatcaaccatgcgaaggttttgcacttatgcggcgcccacggcttccaaatcaggttattgaagtttgtagctgtggtgcctaggagttgtgctttgtaagccgatgtcgtcgtgtattcgccgtggctggtgagcttccaagttattttgtcctcttcgtgctcaatcaggtgcagattctgcactacgctccagacttcgatgagctggtcaattagctctatcgaccagccagtgttctccggtaggtcaagatcttgcatccattgatctgagagcgaagcctgttggagcgtgctggtctttttcttggaggccgcgtagactagaggggctacgtccttcagtcttctcccttgcagccaacccgagtcccagaagctaacttttgtgccgtctccaaccgttatagatgttgcggctgcaaaaagtagcttgtcgatgtcgtcacatggcgttcctgaaccaacccacgcctttaccggtgatctccactcgtgccatagccaccgcagccttaaggctcttgcgaatttctccaagtttaggatgcctagacctcctcccgcccttgcgagccttctcctccgtggccccaaagcttctaggggctccttggatgttttcaggcccgtcaggaggaatacttgctgcgaggtaagcaccgatttaactagggttgaacgccccggacggtcgaggccctggtgattgcaacgagacaccagcacggcatcgccgccgccgccgccgccgccgtttgctctgatacagattctcgtgggagcacctggtcgccgcccctgcctgccaaagttggcctgggtggttccccgcggcat

SEQ ID NO: 6326 - DNA, 2178 bp, Oryza sativa
  Clone ID: PAT_MRT4530_13027C.1
gcaaaactctaataatcctgtctatgtttctctctctccatagcatttactctttgtgtgagtgtgtgaaggagagatattatattggaggccattaacttatcttcagcaagaagatctgtgaggaggcctcctcttgtgcttgtgttggtggggggcgccgcacttgaggtggtcagggatgagtaaggaggaagtcctcaagattcagacttgtgtgctgaaagtgaacatccactgtgatgggtgccagaagaaggtcaagaagatcctccacaagattgaaggtgtgtaccagactagcattgacgctgagcaggggaaggtgacggtgtccggcctggtggatccggccaccattatcaagaagctcaacaaggccggcaagccggcggagctatggggttccaaggtcggggtggcggcggtgaacaaccagtttcagaagctccaccttgacggcggcggcggcaagggccagcccaaggatggcggcggcaagggccagcccaaggacgccggcggcaagggccagaaggggggcggcggcggcggcggtggtggcaacggtggaggcggcagcaaagacgtgaagatgatgatgccgccgcagatgccgcagccgacgccgcagcagattcagcagctgcagcagcagctgcagatgaaggggctgaagttgccgcagttcatggacgccgccaagatggcgccgttcgcggcggccgcgccgatcaaggaccccaagtccgtcaagttcaaccttcctcctcccgaggatgacttcggcgacgatggcagcgagtttgatgacgagttcgacgagttcgatgacgaggacgatttcgacgacgacggcctcgacgacgactacttcgacgatcccaagatgatgaagcagatggccatgccgccaccaaacgccggtggtggcggcgacaagaagggtggcaacaacggcggcggcgccggcaatggcggcaagaagggcggcggtggcaacgagatccccgtgcagatcaaggggaacgccaacaacgccgctggcggcggcaagaaagactccggtgccaagcagaaccaaggtggcggcggcaagaacggcggcgggcagccgaacaacgccaaggggggaggaggcgccccgaacggcggcggcaaccaccctgctcaggggaagaagggcggcggcggccagggcggcggtgtcggtgggccgatgggcggcatgccggcgcagcagcaggccatgatgatgaggccgaacatgatgggcggcagtgccggtttccccggaatgggccagatgggcggcgggcccatgaccatgcccatgggccaccacccccacatgggcgccggcgccgtgcagggcatgccaccggcagcgttctaccagggcggcggcggcatgccgtccgggcccgagatgctgcaggccgcggcggcggccgggaaccccatggcccagcagcagtacatggccatgatgcagcagcagcagcagcagcagcagcagatgatgatgaacggccacggccaccatggtcaccacggtcaccatggccacggcggcggcgctgctccggcggggtacccggcgatggggtacgggtacggccggccgccgatgccgtacccgatgcactacccaatgcagccgcacccgcatgccgatccctacaactacttcagcgacgagaacccgaacagctgctcggtgatgtgaggtctccagtgtccggattgctttcttcctcctcctgttgctgctgctcattttgttgttcaagaaagtgaaccaaccaggagtctgaggaagaagctcatcaggtcacaggtgatcgccatcatgatggttgagagatgctctcaggatcagtcaaccagtatacaccatgggaaatgagtcccatctagatcgctcttctttttttcttctttttcttttttcttttttacttagctcgttttcacctttcttttaaaggagaactcaacttccttgaaggcgaaggtaggtatagtaattatctatagtttttcataagagatgatgatgatgatggtgctttataattcgagaaggaaggtggtggtggtggtttccttcttgctccaaaaaaaaaaaaaaaaaatcatggtccatgaacaatgtgcaaagcaaaatgtgttgcc

SEQ ID NO: 6327 - DNA, 394 bp, Oryza sativa
  Clone ID: PAT_MRT4530_13028C.1
ggcccgaaaatggggccttataaaaaaaaaattatttccacagggggatttgacttcaaaattgcatttttatcccacacttcccggttaaaaaaaaaaaaaatttttgaaaaaaaaaaatgggccactataatggggaaaaaaaaaaactaccctttaccttttaaaaaaaaaaaaaacattaaaccttctttttctttgggactaaactccaacctcaaaggccttcaaaagtccaacctcaaaacccttaccttggtttgaaaaggtttttgggggcactaaaaaatggggtccctgggacgggaaaactctatggggcaaaaacattctccggggatgcgttttttatgcctacacgggggccaaccaaaaagttttccggttttggccc

SEQ ID NO: 6328 - DNA, 1156 bp, Oryza sativa
  unsure (1)..(1156): unsure at all n locations
  Clone ID: PAT_MRT4530_13029C.1
cggacgcgtgggcttggaacgtgaacagcgcgctgactttatgaagcttggcagccatgtacatgtggatgtgcatgccgttgtcttggatctccctgcaaaggtttgtatatcgcgctcagtaagccggacgggccatgaaggaaacctgcaaggtgggagggctgccatggttgtgaaccgcatgctgaagaacaaggaaacaccattgctgactgaaggtttcagtcgaatcatgttctgtaaggataacaacgaaattaaaaaggctgttgacatgtatagtgcattagggccttcagatagtcttgattctggagttttcggtcagaatagcaaagggcctgtacaagttggcataatgaaatttctaaagaaaccaggaagctctgctgaaaaatccggtggacataaggttacaccgaatgaaagcataccgcaaatgcaaaatcatatttcagaacagcagaaccttgaagttggtggtacctgcacagtggaatctgtaaaggagttgagcaatggcaagaaaattgaagaccaaagtagagagagtgttctgtctgatatcagttcgcgcactctggcatttccatcaatttctactgctgactttcagtttgatcttgatagagcatcagacattatagtagatgcagtggctgacatcttgcagaaatatgataatataagactagttcttgtagacctaagccataaatcaagaatactgtcattggtcaaggaaaaggctgctaagaagaacattaactccagcaggtttttcacttttgtgggagatataactcagctgcaatcaaaaggaggccttcgatgcaatgtgattgccaatgctgccaactggaggttaaaacctggaggtggaggggttaatgcagcaatatacaatgccgctggggaagatttacaacgtgcaaccaaagaatgcgcggacacattgagacctgggagctctgttgctgtcccacttccatcaacttctcctctgcatcaaagggaaaggtgngacccatatcatacatgtgcttgggccaaacatgaacccaatgcgaccggattgtctgaagaatgactatacaaaaggttctaagattctccatgaggcatatacatcacttttttgagaactttgtag

SEQ ID NO: 6329 - DNA, 1065 bp, Oryza sativa
  Clone ID: PAT_MRT4530_1302C.1
gcaacttggtgttcgagtgtcacgtcgttgaattggtagttaaaatttgctaataacttgctgaatttggattgattggaaatgttttagtaaaccgctcgagtaaatgagcggcgcgttggccatttcgaaatctgaacacggcggcggcggcggttgtgctcctcgctttccatctccgtaaccgcaccacggctatttcagccgcgccgcgccgcggcgtctcttccgctctgttcgccggcgcgccgccatgagcacctgcagcacggccacgggcgccgcccgcgacgggcggcgccggcatggtagctgcgaagacgccttccgtggcggcggcggcgggctggagatgcggtggagggagctggagcgggagtgggacgcgtacaagacaagccggtgttcgggcgcgtcccggcgccgccaccaccgtcgcagtcgctcgggctcgggcaccggcacgccgtcctccgccgtcatcgtcgccgccgaacccgcggacgcgccgggcagccatctcctcctcggggtccgtctcggcggctcgccgaggcggctcgtctcgtccctccagcgagacggcagcagcagcagcacggccagcgccggcgtgacgcccgaacgaggccgctacgacggagacgaccaccacgacgcggcgtccagcgtcagctccgtggacgctggcgccatggccgccatggccgccgccgcctcgtccaactcctcctgctcctccgcagccacgtccctgttctctctacgggacgacgagctcgccgtggtcggcgaggcggccaaaacagggggaacagcaacgccggcgacgggcagcattgggcggttcgtcgccgccattgccgcggcgggtgtggtgctgctcgtggcggccatcatggccgcggctgtcctggagttcgccatggacgacggccaagccgaattcctagtgcccacatgaatacgtacattgatggcgatgttcgtttgtttaaatccttttgtttccgtttgtgttcgattcagcttcatattttgttgatttttgttcatgtttatggg

SEQ ID NO: 6330 - DNA, 705 bp, Oryza sativa
  Clone ID: PAT_MRT4530_13030C.1
atggcgacgactagcgacatcctagagtgcgactattggagggtcagcccatcggccacttgggcagtccatggtggcttgtacaactctggcttaagttctacaccgtcaaaatcactggagtgcacgtcactgaatcaagatttctggcttatttcgcagaagggctgcaccagaaactggttcccttatgaagaattcgaaggctatgaacttccatcggacttcaatctgaacaacattaactctgatgaagcaagccgagagatatttataacggctatcaccccttgcattcttcagaccggcatttctatgggacaccactctcatatctcgtatgaattctatcacccattagtggtggcccatcaacttggtttcggccaagtccctatcaaagtttacttcatcaaaaagatacaaactcggggaacgatcacaagtgcacttaagtgcgattgtctcccaaacctcaatggtccaaatcttggtcccttcattgactgggacagccgtactatcggcagtagaccatggatcaaatggtggggtgaatggaagcgtcaccttttcaacctccagtctacaacttcctcgctttacttgatcctaaattcgttcctgatgatgctgaggtgcccctcccacatcttgcttacttcaagaggctatgagggagccgataccaagtctgaagactaa

SEQ ID NO: 6331 - DNA, 275 bp, Oryza sativa
  Clone ID: PAT_MRT4530_13031C.1
tcagatccgattaagagggaaccgtaggtccttttggtggcgggcaataccgcgacggcgacggaggccctgcccctcagccgccgtgcgccaacgcgcgtccgctgccattggcggcgtctccttgtctgtcgtccgcgacctctgatacttggcagttggcagcctctgcacaaaccaaagacctagcaccgcatcgaccgccgctaagcaggatctgatgccgccaagcctagacatgaagccaccactgaaccgcccaccaatgcctccaa

SEQ ID NO: 6332 - DNA, 643 bp, Oryza sativa
  Clone ID: PAT_MRT4530_13032C.1
cgaaatcatactcgtacacaaattcatccgcgatcagtggctccgttcgattccccgagttggagacgctcattcagaacccgctggactatgcgaaagctgttgcgatcatcggcaatgggcctatggagaacattcgggagatctcagaaagcaaggacaacatgctgggacagacgcttagaggagttctggacggtccctcggtcatggtcgtcactgtcgaagctacgaacacccgaggcgagcctctttcggagaatgaacttgccacagtcaagcgcgcttgcgagatggttctcaaactggacaaggcgaagaagctgctcaccgactatgtgcgatcaaggatgaacctattcgcccccaatctcacgaccctcatcggatccttgacggcagcgcaacttctcaactatgccggtggtgtcactggtctggcaaagactccggcttgcaacctcgccccgctaggtagtaagaaaaacactacagcaatcggtctggcaagcaacaccggcgttcgccaccaaggtttcctttacagcaacgaaatcatccgtgcggtgccgtcggatctcaaaaagcaagcgatgcgtattctcagtgcaaaggtcgtgcttgcagcgcggatcgatcaagc

SEQ ID NO: 6333 - DNA, 828 bp, Oryza sativa
  Clone ID: PAT_MRT4530_13033C.1
atgccgacgggaatgccgtcgttattgaggaacataatgcaaagccttgtgagcattgacttccatggttcacataccagagatagattctgtaccatttgtttgagagcattttcatctgaaaggtgtctagaccactcaatgcatcatcctgttgctgagcaaccgaacgtttatgtccttcacgttattcgacgtgatggatggcttctgataccatatcaacaactaccttcagacatgataattgggattaggaagatccagtgcaatctcaggccaactctcgtgagggagacacacaaggatataaatattgaggttagtgtgcaaatgaggaagacagagaaaagtgaaacaagactttttccctacaatgctgaggggattagtggtcatgaatctttgtgctggaactggatgccagcttctggcaaatctggagatgacacaattttccttattgatgataatctggagcatgcaaaaaatttgaagtacatcttgtgtctgtttgagcaacttgctggacttaagataaacaatattttcacctgcaatgtggttgatttacctctgaaatatttggatattcccattgaccaaaaaagaatactaaacaaggactggaaggtggctgagaacaaaatggagcataaattgggttgctggccaggggtgaaagatagaatggattacttcagaaaaagatttctatggcaagaagatcaagaagcaggaagcaacaaagaggctggtggtgcgagcagacgacgatcggtggcctgcggcggcggatcggcggatgaccacggcagcgtggcttga

SEQ ID NO: 6334 - DNA, 153 bp, Oryza sativa
  Clone ID: PAT_MRT4530_13034C.1
ggctgcaggaattcggcacgaggcttaggtttatctgaatgacatagccggtcccaagcccggaaaaaggaggcggggatactcttgtatagatgttggttgaaatgacgctctcctactatatagtagatcattgggatttttccgtacttt

SEQ ID NO: 6335 - DNA, 450 bp, Oryza sativa
  Clone ID: PAT_MRT4530_13035C.1
cccagaacaatatccacacatcgaaaatcaaaatccaaggaacacgtcaataacaacaacaattcctacatccatttaactatatattcatccgatccaaatccgcatattctcggtacacatatgaacaagagaacttgagagaaaagaacacactcgaaccacagcggccttgaggatgatgcggcggctatgaggcccttgggtcaccgggatggcggtggtggaggagcgccgctgccgctgccgcctttgtcgggccgcgggagactgccgcctccccttccaccggatctggcagaggggagggtgcggcagccaccaccacctccgggcagccgctggcctcgggagcacgccgccaccgccggacagctgcgggagaccgccacctcccctcccgctagatcgggcggaggggagggcgcggcagccgctgcttccgccggg

SEQ ID NO: 6336 - DNA, 252 bp, Oryza sativa
  Clone ID: PAT_MRT4530_13036C.1
atgtctttcgtgattagtttcacacctctcaccataataaatgatgctgtaattggtaataatttgtgtagctcctggtttggaatgttacattcctggtttggagatagaactgtgcagtcgggaatggttgttcagaatggttggacctatgcaacgggtatgttgtatagtgttggattaatattgtttaattaataccttactgttttattaaattctgaaatatttattaaatgccgtttatgcaaa

SEQ ID NO: 6337 - DNA, 132 bp, Oryza sativa
  Clone ID: PAT_MRT4530_13037C.1
atggcgcggcggatagattggtggaagttgacattaccgcgggtggagatctggctggggacggaatctatcggagataaagatgggatcgaagcggaatcgaagatgaggattgttgcggaaacagagtaa

SEQ ID NO: 6338 - DNA, 225 bp, Oryza sativa
  Clone ID: PAT_MRT4530_13038C.1
atggctgcagtcagacatgcctcgcgtggtaaattctgtcaatttcaaaaagttgagcggtggctttcttctttgcatgggggtgagatggagtcgcagaagccgctggaaaaccacttatgtcatctgatgccggggaggtcgagttcatattatcgcagatctgaggctgtggctatcaatgctaggatcaccaacatcggtgggcgccacacgccttcctag

SEQ ID NO: 6339 - DNA, 246 bp, Oryza sativa
  Clone ID: PAT_MRT4530_13039C.1
cacactgccgccgccgcctcgcttcgccggagccgtcgccgccgccgtgcgcccagggcagcgcgcccctgcgttaggccgtcgcgcctcctcctctcctcctatagggcccgcgcgttcccgcgtcctccctcgtcgcacggcgcgtgggcggcacgcgcggcaggtggtggttggttcgggagggcggcgtcgtcgccggtcaccgggtggtgcggcgccagggcgcagattggggcggtcaac

SEQ ID NO: 6340 - DNA, 510 bp, Oryza sativa
  Clone ID: PAT_MRT4530_1303C.1
gagagctcaagctcgagcaaatcaatggaggagaggttcttggccgagccgctcaaggcgaccacggtgacatgcatcccaaggctgcgcggcggcggcggtggcggcgcgaggcggcatcgccgcgctgcttcctccggcggcggcgcggcgccgccggtgtcgtcgtccgtgctggaccgtgtccgggacgtcgtgctgaggctggcgatgctgtcggccgcgtcgacgacgacgaagcagggcgccctgccgccgcagcagcagacggcgacgccgatcaggacgtcgccgggcaggtcggcagcggcgacgtcgagacgctccgcggcggtgcggatgagcccggcggcgccggcgtacgccgactcataccggagcgaggcggtcgacgagtgcatcgagttcttgaagaggtcggctgccggcgtcggcgtcggtggcgcgccggcgtcgcccgccgtgggagtaatgaactcgccgtcacctttgcatgcatgtgccatgtga

SEQ ID NO: 6341 - DNA, 177 bp, Oryza sativa
  Clone ID: PAT_MRT4530_13040C.1
actcgtaaaagatcgacggctattagagctaggccaccctggcggatctcgatgcggagcttgagtagatctgtgagggctatactttataatctacctttctaattctatttattaataatatcattactatatataatgtaattatacactcatctctatgtaaatactctttta

SEQ ID NO: 6342 - DNA, 1750 bp, Oryza sativa
  Clone ID: PAT_MRT4530_13041C.1
cacgttggccccgccctccaggttggcggccccacgcttctcttctccgggcatcacaggatcgaggcgataccggaggagcccccgccatcggccatcctccttcgcgtcgcgcctccggatcccgagcttccagaaagccgaccggttcgtcggccggtcgccggagatggaagccaatcacgcctcgcgggggcgccgcaccctggaggagatccggcagaagagagccgccgagaggatgcagcagcagcacaacccggccgccgcggcgtcccttgtcgacccttacgggaacccaggagccggagctgagcttcttggtcgagttagagaacttgaaaatgggaacatagcattggagagggaaaaccaaatgctgttatccaagattgctgagaaggaagtcgagaaggattccctcgttaaccgcttgaacgaccttgagcggaatatagtaccctccttgaaaaaggctgtgaatgacatttctttggagaaagatgccgcagctgttgctaaggaggatgctctcgcacaactaaggagcatgaagaaacgactgaaggaggcagaagaggagcaatacagggcagaagaggactctgcatcattgagagcacagttaaataccctgcagcagcaagtaatgagcaactcttatactggatttccagttggtgtatcaaatgagcacattcttgctatggaaaaggaggtagaaaatttgcaggctcagctgaagcaagaatcattgctaaggcagcaggagcaacagaaactttctgaagagtccctattaaggcaacaagagcaacaaaagctaactggagaacagtctcgtgctgcttccttggttgcggaaaagaaagagttggaagaaaaaattgctgccttgacgaagaaagcatcagatgaagcttctgaatttgctgcacgcaaggcattttcaatggaagatagggaaaaacttgaaagccaattgcatgatatggctttgatggttgagaggctagagggcagccgccaaaagttgttaatggagattgattctcaatcatcagaaatagaaaagctgtttgaggagaactcagccttgtctacttcataccaagaagctgtagctgttacaatgcaatgggaaaaccaggtaaaagattgtctcaagcaaaatgaagagctaggctctcacttagagaagttaagacttgagcaagctacttaattgaaaacaagtaataccactatcccccagatggccagaacgagaccagcatttcattcccgccagagtttgtaactgagaatctctccctaaaggatcagctcatcaaagaacagagcagatccgaggggttgtcggcagaaataatgaaactttcagctgaactcagaaaagcggtgcaagcgcagaataacctcgcacgcctatatagacctgtgttaagaggcatagagagcaacttaatgaaaatgaaacaagaaacatatgcaacgatccagtaattttggatgaccgattattttccccccttacctgcctacacacaaaaggcagagcttacagcaagtaacgatcatttgtagagttacaatcaactatagtcaacattgttgtacgtgtacattcggttcactgttgtattatattggaaatgggggcagtaacaaatgaacgagtacacccgccaccggactttggaatcagatttgcttgtgttgaaattaaaactattaagggggctgtttt

SEQ ID NO: 6343 - DNA, 1437 bp, Oryza sativa
  Clone ID: PAT_MRT4530_13042C.1
gaggattgtaagtttgcaaccagcagagctttgccccggggcgtcggcacgcactgccacctcgccctcgaggcctcgacggcgccacagtgccacacccattctctgttgatccctagctgtagttgtagctggcagatggacaaggcggcggttgttccacttccaatcaccggaggagtcaacgacgatcgtactgctgcgctgcagcagtgggcttccaccgtcggcttcggaggcgaggtggggcgcctcgtcgaagcccaccgacgcctcgactcggtgctcgcggagacgcaggggaaggagatccggaacaaggagctccagcggcgcctcagggaggcctcgcatgatgctgcccgcgcccgtgacctcctcggcgagctcgagtactaccgcatccgcgaggaggtggagcgcgacgaccacgataagctattgcatgacaatgcaaatggaaatttgcttctctccatgcctcaaagggatgttgagttctttaacaatgatgcagcaaaagatgacaaagacaccacagaaagttctcttagcaacacagattcatctgcatctgctcttcaggttactacgtacattgctagtagcagtagtccagtaccctatctggagactcttaacaagtgcatctcgaatgagataagtaaatacactgaaaaatgctacaggatagccaaacaggtgagtgaagctcttgagcttgaaagtctggattacctttacgcgcacaaataccagagaacaagaacagatcatcgggagacatcaccatgccaaagtgaacccaaagttcatgggagggaccaacagcgtgacttgataataagcaagttaacaagtgaggaatgtgctaggaagaaactctctatccttgccatcatcggtgatggaggtattgggaaaactactctggctaagctagtcttcaacaactcaacagtgtcaaagcattttgacgttctgttatgggtttatgtatctgttcactttgatcaaaataagattatgcaggaaatgttggactccttttgcggggatgagcatgatgaaatcaagaaatcgaaggagcttcaactccaagacaaacttgactacttattgaagtcaaaacgagtgctacttgttatggatgacatgtgggaggatagcacaaaggaaaaatgggatgagctgttaaatccattgcttaaaaacgatgttatggggaacagtgttcttgtcacaactcgtaaaccatctgtggcaacaatgatagaagcagcagatcacatcaacctggatggtttgaaaaaagatgacttttggtgtttgttcaaggaatgtgtatttggacatgagaactataaaggagaaccaagactggaaaaaattgggcagcagatagttgacaagttaaagggcaaccccctcgccgca

SEQ ID NO: 6344 - DNA, 5003 bp, Oryza sativa
  Clone ID: PAT_MRT4530_13043C.1
ccattctctgttgatccctagctgtagttgtagctggcagatggacaaggcggcggttgttccacttccaatcaccggaggagtcaacgacgatcgtactgctgcgctgcagcagtgggcttccaccgtcggcttcggaggcgaggtggggcgcctcgtcgaagcccaccgacgcctcgactcggtgctcgcggagacgcaggggaaggagatccggaacaaggagctccagcggcgcctcagggaggcctcgcatgatgctgcccgcgcccgtgacctcctcggcgagctcgagtactaccgcatccgcgaggaggtggagcgcgacgaccacgataagaatgacttacattttgaaacggaggaagtattggttagtcctcaagctcttgcactaaaccgtaagccacctgccatacttgaggcacaatttactcaactattgcatgacaatgcaaatggaaatttgcttctctccatgcctcaaagggatgttgagttctttaacaatgatgcagcaaaagatgacaaagacaccacagaaagttctcttagcaacacagattcatctgcatctgctcttcaggttactacgtacattgctagtagcagtagtccagtaccctatctggagactcttaacaagtgcatctcgaatgagataagtaaatacactgaaaaatgctacaggatagccaaacaggtgagtgaagctcttgagcttgaaagtctggattacctttacgcgcacaaataccagagaacaagaacagatcatcgggagacatcaccatgccaaagtgaacccaaagttcatgggagggaccaacagcgtgacttgataataagcaagttaacaagtgaggaatgtgctaggaagaaactctctatccttgccatcatcggtgatggaggtattgggaaaactactctggctaagctagtcttcaacaactcaacagtgtcaaagcattttgacgttctgttatgggtttatgtatctgttcactttgatcaaaataagattatgcaggaaatgttggactccttttgcggggatgagcatgatgaaatcaagaaatcgaaggagcttcaactccaagacaaacttgactacttattgaagtcaaaacgagtgctacttgttatggatgacatgtgggaggatagcacaaaggaaaaatgggatgagctgttaaatccattgcttaaaaacgatgttatggggaacagtgttcttgtcacaactcgtaaaccatctgtggcaacaatgatagaagcagcagatcacatcaacctggatggtttgaaaaaagatgacttttggtgtttgttcaaggaatgtgtatttggacatgagaactataaaggagaaccaagactggaaaaaattgggcagcagatagttgacaagttaaagggcaatcctttagccagcaaagactctcaccttcaaagttgtttctcgtactgtgctgtgttcccaaagtatcataggtatgagaaagagcgtctgatcgatatgtggatagcgcaagatttgctatgttccgctgatattcacacacgacctgaggacattggaaatgaatactttgatgatctacttgattggggatttttcgaaaaacagtttgagcactcaaccttactcatcatgcatgatctaattcatgatctggcacagaaggtttcatctgacgaaagctttaccatagagggcaatgagcctaggaatgcaccgccatgtgttcgtcatgtcagtgtaataacagagtgggagtacaaaacaaaattgaatggcactgtgtatcctaatgattctttcctccaagagttctctaattccttccgtgagttgcaacaaaggagcttaagcacattgatgctgtttgggccacatgacttggattttgcagacacgtttcggcaagaactcaatgaggtaaggtcaatccgtgtgttgaaactggagatggtcttctttgacttggattcattgataggcaacatctcagcatttgtcaatcttcgctatctagaactgggctgcttctacaagggccccaggctggagctaccagaagctatatgcaggctgtatcaccttaaagtcctggatataaagaagaactggggtcctagcacatctttgccaagagaaatgagcaagcttgttaacttgcggcattttattgctgaaaaggagttacatgcaaaaatagctggcatcggaaagatggtttccctgcaggagctaaaggcatttgatgtcaaaaaggaccatgagttcagcatatcacagctgagaggactgaatcagctaaggggatcaataagcatttctagtctttacaatgcagggcatgaagaggctagccaagcaaggctctgtgacaaggataacctaacttgtttgcacctgtcatggctgactttatctaggaaccgtgttgcacggcgtactcttcctatcctggaggatcttaaaccacattctggccttaaaaatctgcaagttgttggatacaggcattctttaccatcatggctttgcagcactgtccatctcacctctttgcggtcactccacctggatagatgcatacgttggcaaacaattccacatccccagcagttgcctcttctccaggagctgcatttgattcaactgcctcgtgtttacaaaatagagattggtcctctgaaggtccttgaaatacgctggttgcaaaatctgaggcagtgcatacttttagataaggaacagtcatatgctaccctacagatccttgaagtggagggatgccccaaattggatgaatttctattgcagattttcatgtcttcgggtgtacaaagcacataccaatttcttggtattcacaggcttaagatacacaatgacttccttcgtgctagcatcccgctcctgctcctaaattctttatcagacatagatctgtgtggtgagcactcaaaatttacgaggtttcgactaaaaccatttggcacatcagatgggttgagtctacaaatcaaaggagatagatatattcagaagatagaggaaagattgttcacattagagaaactcaaggatctgcgggaacttgaaatccgggactatcaatcagtgatattccaacgtcaattctgggaaggcttcgaacagttgacatcattgaaaaagtttagagtgatcaagtgcccagaaatattttctaccaactttgagctatttctgcctccgtcagttgaggaacttgagttgagtggatgcaacattacattgatacaactatcacaactcctcgtgaaccttcatttacttaagagtttcaagttaactaattgccaaggggtaacatccttacctgtagggttgtttacagatgaacagaacacaatgtcagaaggctcatggcacattcctcccagatgcttcacgagtctggaaagtttgcaaatctctttcacaacagctccatctgatgcaaattcaattatgcactttacgagcaagaaaggcctaggaagatttgtatctcttaagaaaattgttatagaaaattgccctactctgctatctagagcgctttcaggaggagcatctcatatatctccatcatctttggataaactctgcatgactggtatccaagacagcactctgcagttctcagatgtctcttccatcgcggatttagatgtgtctggatgcccgaagttggcatgtctcgacctgagttcttgtaccgcgctagaaaagttgtgtgttatagattgccgtttgttacagtcaattgaaggtttgccgtcatgctcagcactgagggatttgaaaattcgaaactgtgcattgctgccttcgctcagcgcatcactccacaccctgaaaacactgagcatagagaataacacaaatctagcatctctggaactgaaatcatgcacatcattgcagaaactatgcatcaaagactgcccggcactgacatcatgggaaggtttgaaatcccttgtttctcttgagatcttgaaagttgaagcgtctcctgggttcataacgagatggatatcagcagcagctgaagttaatatcgaggagaagaatttctcactaccacttgaaaagctcaacgttgataacattgatgtcctttgtgtgcccatatgcagccagttaacttctctcaagatattatccattgaagaggatcgtcacgatccagatggtcatgtggagtttttgacagacaaccatgtcaaaggactgtcatttctcacctgcttgagatttcttgatctggaaaaccttgagcaactccggtcactgcctgcagaacttggatcccttgcatccctgcagagactacatgttggcaactgtggacatattacttccctgccggtagggggtctcccagcttcgctcaaggacatggaactctataattgcagcaaagaactaaacgtactgtgccgagatatgcttagacttcgaagaaacttacatttgtgggtggatggcgacgaggaggatttcttttcacagaattgctctgacgaagaaataagtgagcttatgttcgcatatcgtatagcctttacaccaggttcttttttggaagaacagaacaatacgagaacaccttctattttcgatgaagggagcaaaagaaacaaaatatcaaaatacaagagaagaaaaaaggctacagcctacagatgaaagactattcttggaagtgttgaatctaaattgcctacgtaacaagaagctacgattccggctgacactctggattttttagacaatggaatctttattataagacacagccaaatactgttactgtggattggtgttgaaatactgtccagtttcaagtgttaaggaaatagagcagaacttcagacatctttccttttaaaaaaaaaaaaaaaaaaaaaaaaaaaaaaccagaggggccgctccaccatcaaactggcctcgtgcc

SEQ ID NO: 6345 - DNA, 657 bp, Oryza sativa
  Clone ID: PAT_MRT4530_13044C.1
ctaactgaaaatccgaaatccatccatgtccatgtccatgtccaagtcgatgtcgttcgccggaacaaggatgatggccgcggcggcccggcgcgccgtccactcccagcctccgtccggccccctcaccgacatcgcggaagaatcgcaggttgagatcgtctgtttgtttggttggttttggggatcgatcgatctttggttgctgctcatcagttgattaattgaattgatcgctaggtgatcagctccctttatgaggtggcaaaggcgaagaatctttcccgggtgccacggcagttggatccttcgacgcgggtgcacatcgctcgaagcaacaggttcaaatgatcgacagcatagatgaaacccatttgtgattgattccaaaatagaaaccgatggtttcccagtcaaaagttccagcaagttgtctccaaaactataaatactggcagccatcgccaacctcattgtgtatgcatattctcttgtggtatttatgtactccctccttttcacaatgtaagtcattctagcatttttcacattcatattgatgttaatgaatctagacagatatattttcatgatgccttgtggtgaactgtttgctatgttgttaagattgctgaaatatttgtggttaagacgcat

SEQ ID NO: 6346 - DNA, 213 bp, Oryza sativa
  Clone ID: PAT_MRT4530_13045C.1
caagagtgtgggagtaataataaatatacctaggatactctatcaatcgcaactaggagttatgatctccatggttaaaagacctatattttcatgttttatgcacctcgatgtgaacattataattttcaaggagggttctatgggtttaaccttcccctggttgcccagcgacttaccagcaacaattccaacaaaaaaaaaaaaaaaaaa

SEQ ID NO: 6347 - DNA, 792 bp, Oryza sativa
  Clone ID: PAT_MRT4530_13046C.1
cccctcccttttttttttttttttttttttttttttttttttttgtgacagaaaatggcagtttattccactatctatactagtataattgcatggtttttcattatcatcatccacagatacacattggtgagcattaagagtacattctgctttaccaatactcctatgatgcctacaaaaaagtggctgcttcaaagtatcacctggaatctatatagtagcaaatgcagtgagatggatggcctcctttctctacacaaaaggaggcttcagttgcacaaagctgccatgttctaggcctaaatatactttgtgagtcaaactccgctgaatgccatggagtttcatcaggcaaacgggcttcgatatatacaagactcgaccacaggttatattgttatcctaaagtgcatagatcttcttgtattcgttgttcagtagctctgtatccgaatcgactgatatggaccacgactggctggtggatgacctcctgatcttcttcatgttcttctcctccatcctgtgagcgataatgcagtagcacatggacccaagggtggccagcatgatcgcggtgccgattgccattgtacaccaagctagccaccgatcatcacggcccacgacgacatatgttagtgctatgaaggctgctgagatgcaaaggcatgccatccacatcagcttgttcatcacaaagaccatcttcttcttggctttctgctcaacaacaattagagaggtctggacaacgacgacggcaagcgagataaaaagagccaaggc

SEQ ID NO: 6348 - DNA, 210 bp, Oryza sativa
  Clone ID: PAT_MRT4530_13047C.1
atggcgggagctcagcagcgacgcgactggtgtgcctccccctcatcagctccgtccccctgcgtcagcgccatccgacggcggctgaagcatagcagcggtgacgagaatagaagccatggtgaagcagaagtagaggaagatgcaacgttgtcgtcgaagaacgaagaacaggagcagtcacgcttgaagcgctacccaaaaacttga

SEQ ID NO: 6349 - DNA, 262 bp, Oryza sativa
  Clone ID: PAT_MRT4530_13048C.1
cggacgcgtgggcggcaccaataccaatctctgactcctccggcctccggcggccggcgagagagatcccaccctcaccgacgacggcgagcgaccaccatgtcctcctccaccttcagcggcgatgagaccgcccctttcttcgggtttctcggcgccggcttcggcctcgtattctactgcatgggcgccggctacggcaccccccagagccgcgtgggcgtggcgtccatgggggtgatgcgcccggaactggtgatga

SEQ ID NO: 6350 - DNA, 4461 bp, Oryza sativa
  Clone ID: PAT_MRT4530_13049C.1
atggcggcggcgccgtcggcgagcgggcggcggagcatgagctgggggtcgtcgatctcgcagtcgttccggcaggcggaggcggacgacccgttcggtcgcgcggcgtcgcagcaggggcacgacgacgacgaggagaacctccggtgggcggcgctcgagaagctccccacctacgaccgcatgcgccgcggcgtcatccgcaccgcgctcctccatcacgacggcggcggcgacggcggcggcgcggcggcggcggcgaaggacgggaggatggagctcgtcgacatccagaagctcgccgccggcaacctcggccgcgcgctcctcgaccgcgtgttccaggacgacagcgagcgcttcctccgccgcctccgggaccgcatcgacatggtggggatcgagctgccgacgatcgaggtgaggtacgagcagctgtcgatccaggcggaggtgttcgtcggcagccgtgcgctgcccacgctcaccaacgccgccaccaacgtcctccagggtctcattggacgatttggttcttcaaataagaggaccattaacatactgcaagatgttagtggcatcatcaagccatccaggatgacacttcttcttgggcctccatcctcgggaaagagcacactaatgcgagcacttacagggaagcttgataaaaacctcaaggtgtccggcgacatcacatactgtggacacacattttctgagttctaccctgagaggaccagtgcatatgtcagtcagtatgatcttcataatgcagagatgactgtgagagagacattggatttctctgggcggtgcttaggcattggtgcaagatatgacatgctcgcggaactcgcgagaagggagcgcaatgcaggcattaagccagatcctgagatcgatgctttcatgaaagctactgcagtgcaagggcataaaactaacatcactacagatgttactctcaaggcacttgggttggacatttgtgctgatattattattggggatgagatgattagaggaatttctggtgggcaaaagaagcgtgtgacaacaggggagatgttaacgggaccagcacgggcattgttcatggatgaaatatccaccggtctagatagctctagcacatttgagattgtcaagtatattgggcatttggtccatgtgatgaatgagactgtgatgatatccctcctgcagccaccaccggagacctacaatctttttgatgacataattctactatcagaaggatatatagtctatcacggaccacgtgagaacatcttggaattcttcgaaaatgctggtttccgatgccctgaaaggaaaggaatcgctgatttccttcaagaggtcacttccaagaaagaccagcagcagtactggtaccatgaccaagaacggtatcggtatgtgtcagttccagagtttgcacaacgtttcaagtcattccatgtaggtcagaaaatgcagaaggagatgcaaattccttatgacaagtccagcacacatcctgctgcattgacaactaccaagtatgggctatccagttgggagtcactcagggcagtgatgtcaagagagtggttattgatgaagcgcaactccttcatctacattttcaaggtcacccagttgatcatccttgccttcatgtccatgactgtgttcctcagaacaaagatgcctagtgggacaatctctgatggcactaaattccttggggctctcacctttagtttgatcaccatcttgttcaatggctttgctgagctacaactgaccataaagaagcttcctgtgttctacaaacatagagatttcttgttcttccctgcatggacctttggagtagcaaatatcctcttgaaagttcctgtttctcttgtagaggcggcggtatgggttgtgctcacatactatgtgatggggtttgcaccctctgcaggaaggttctttcgtcaatttatagctttctttgttactcaccaaatggcaatggctatgttccgatttcttggtgctattttgaaaacaatggttgtggccaatacttttgggatgtttgtgctgcttattgtcttcatttttggaggatttctcatatctagaaatgacatcaagccatggtggatttggggttactgggcatctcctatgatgtatagtcaacaagcaatatcaatcaatgagttccttgctagtagatgggctattccaaatactgatgcaacaattgatgagccaactgttggcaaggctattctcaaatccaaaggcttgattactagtgatggggggttttggatttccattggagcccttataggattccttgttgtgttcaatatcttatacattttggcccttacatacttgagtcgtggaagcagatcaacaaatcagcaaagtagatcacaaattgtcttgcctttccaacccctttcactttgtttcaaccatgtaaactactatgtggatatgccaacagaaatgaaagagcaaggattcacagaaagccgtctccagttactatctgatatcagtggagttttcagaccaggtgttttgacagcattagttggtgtaagtggagctggcaagaccaccctaatggatgtcttagcaggaaggaaaacaagtggagtaattgaaggagacatcaccctctctggttatccaaagaaacaagaaacttttgcacgcattagtggttactgtgaacagactgatattcattcaccaaatgttactgtctatgaatccattctctactctgcttggctacgtctttcgtcagatgttgacaccaatacgaggaagatgttcgtggatgaagtcatgtcccttgtagagcttgatgtgttacgtaatgctttggtgggtcttcctggagttagtggtttatcaactgaacagagaaagaggctcacaattgcagtggagttggtagcaaacccttcagtaatattcatggatgagccaacttctggacttgatgctagagctgcagcaattgtcatgcgaacccttttgctattgaaaaggggagggcaagttatttatgctggtgaactcggccgccactcccataaactagttgaatattttgaggcagttccaggtgttccaaagataacagaaggatataatcctgcaacatggatgctagaagtcacctcccctatagctgaggctcgtcttaatgtaaattttgctgaaatttatgctaattctgagctttataggaaaaaccaagagctaatcaaggaattgagcactcccccaccaggatatcaagatctctcatttcctacaaagtattctcaaaatttctatagtcaatgcattgcaaacttttggaagcaatatcgttcttattggaagaatccaccatacaatgccatgcgctatcttatgacattgctcaatggccttgtctttggcacggtattttggcaaaaaggaactaagatatcatcacaacaagatttgttcaatttgcttggagccacttatgctgcaactttcttccttggggctgccaattgtatcacagttcaacctgttgtttccatcgaaagaacagtcttctaccgcgaaagggcagcagggatgtactcttcattgtcctatgcatttgctcaggcatgcgtggaggtcatctacaacatcttacaggggattctatacactattatcatctatgcaatgattggatatgactggaaagccgacaaattcttctatttcatgttctttattgtagcaagtttcaactacttcacattgtttgggatgatgttggtggcatgcaccccatctgcaatgcttgcaaacattctcatatcctttgtacttcctctctggaatctttttgctgggttcctcgttgttaggccgttgataccgatttggtggaggtggtactactgggcaaaccccgtgtcatggaccatctatggtgttgtggcgtcacagtttggtaaaaatggtgatgttctttcggttcccggtgggagccctacggtagtgaagcaattcttggaggacaacctagggatgcggcatagtttcctaggatatgttgtgctcacacattttggctacatcatcgttttcttcttcatctttggctatgccatcaagtacttcaacttccagaaacgatagagatggtatgtcatggcatagagtgacattatttttggccgccactgccacttgcagctaaagagggctactacacaattacttagttaagttagaagtgcttgtagattgttctagtttgtaaacattcacttcatgtatctatatacacaccatgctattctaagccatggatgtgatttgttattccatttgcagactaatagatcatcctaagattgtataaacctctaggaattgtaaaagttggcccacaagtgtaaaaaaaaaaaaaaa

SEQ ID NO: 6351 - DNA, 495 bp, Oryza sativa
  Clone ID: PAT_MRT4530_1304C.1
atggcctgcgaggtggcggacaagggcgggaagcaacgcagcggtgctgctgccggagcctcggggtcgattgctagcgggggtaaagcaccgacctccatgtctgatgatggggactggtccggcctccctagctccaccaccaaagttgaggccgatgaaaacgtgcttcgatattattgctgcattaaggctctccctgctgcaccattgccgttgccgaatccaaggccgtggacatccttggcttgcctagatccacatgtcggcacgtggacgacctccgttctgcacatcagtgccgcggatgaccttgcctcacttcgcctagatctgcccgttgccgttgtggtcgttgagcgccttgtcaccaaccttgtacacaacctacaacagccagatccggtgctcccgagccgtgaatcttccagatttggtgctcccgcaaggcccgaccatcgtcaccgtgccacagcactggggagggagggttga

SEQ ID NO: 6352 - DNA, 1958 bp, Oryza sativa
  Clone ID: PAT_MRT4530_13050C.1
atggcgtcgcctccaaccgcctccgcctccgccagtgaggccgcggaatccggcaggcggagcgcgccggggccgatcgacgtgccgagcccgagggaccacctgcaccacctcctcgaccgacgtgacacgccgcgggtcgtgcacgtggaggggacgacgatgcagcggcagcgtggggaggcggcgggtgacgcgggggcggcggcggcggcgaagcccgaggtgaagctggtgaccggggatggcgggtacgtgctcgaggacgtgccgcatgtgtgcgactacctccccgatctaccgacatactcaaatccactgcaagataacccggcatactcggttgtgaagcaatactttgtaaacccagatgacactgtctgccagaaggccattgttcacaaggatggccctagaggcaaccacttccgtcgtgctgggcctcgacagagggtgttttttgaatcggatgaggtccatgcatgcattgtcacatgtggaggactgtgccctggactgaacactgtcattagggaaattggtgggtatagaggtttctatgcttgtaacaccattgacttgagtccaaagagtgtaaacgacattcacaaaaggggtggaactgttcttgggacatcacgtggaggccatgacaccatgaagattgttgacagcatccaggatcgtggtataaatcaggtttatgtaattggtggtgatggtactcaaaggggtgcaggagtgatttttgaagagattagaagacgtggtctcaaggttgctgttgctggcattccaaagacgattgataatgatataccagtaattgacagatcatttggtttcgacactgcagttgaggaggcccaacgtgcaataaatgctgctcatgtagaagctggaagcgccgagaatggtataggcctcgtaaagctaatgggtcgacacagtggttttattgcacactatgctactctagccagcagagacgtggattgttgcttgattccagagtcacctttctatctggaaggtgaaggtggcctttttagatatttggaaaagcgtctgaaggagaatggtcatatggttatcgttgttgcggagggtgcagggcagaaacttattaatgaaacaaaggaatcaatggggaaagatgcttcaggcaattcgattcttcttgatgttggtctttggttatctcaaaagataaaagagcatttcaagaaaatcaagactactataaatctcaagtatatagatcctacatacatgatacgtgccattcctagcaatgcatctgacaatgtgtattgcacactgttggcacacagtgtggttcatggagccatggctggatacactggtttcactgttggccaagtaaatggtcggcattgctatatcccgttttacaggatcacagagaagcagaacaaagtttcaattactgataggatgtgggcaagacttctctcctcaaccaaccagccaagtttcctcagcaagaaagatgtggaggacgcaaagatggaagaagagagagcatccaagtttttcgatgggccgcctcccaaccccaaggttgaagacaaagtcgcttccaatggcaaggctgtgaagtgaggcagaaggctactgatctattatgtgcagatggattaattattactcaataatgtcagtaatctatctatggctagtgagatggattagtaaataatattagtatatctatggcaagtgatgctcagctcttcctgtccaaattaaaatgccgagaatagatctcctctagcaggttatcgttattatatttatgttactgctgtttgcttgctgtttatgataggcatctcttggaatgctataattttttttcacatctaatgtgatatgtctatattgcggtaaaaagcaacatgccgaattcccgcgggactagttctctccctcgt

SEQ ID NO: 6353 - DNA, 3171 bp, Oryza sativa
  Clone ID: PAT_MRT4530_13051C.1
atggtgaccggtggcgccgtgccggcggcggcgccggtgtggaaggggaaagtgaagtccgtcccgtcgggagatacggtggtgatcatggacacatccaaggcggaggaggtcatcccgccgccggagatgtccgtcacgctgtcgtgcatcatcgcgcccaacctggctcgacgcggtgggatggacgagcctttcgcatgggagagcagggagtacctgaggaggctcctcatcggacaagacgtcaggtttcgagtagaatacactgcttctccctcgggccgcaaattcggcatggtcttctttgctgagaagaatgtcgcttgcatggtagtagctgcaggtcttgctaaggtgaaagagcaagggcagaagggagaaataagcccgtatgttgctgagttgctaaggctggagacgattgccagggaccaaggcttaggccgttggagcaagcttcctggcgctcttgagtcgtcaataagagatctgccaccatcgacaattggagatggcagatctttcgatgccaagggtttcgttgctgaaaacaaagggaagagcttggaagccattgtagagcatgttcgcgatggaagtactattcgtgtgcacttgattcccagtttcctttatgtccaagtttacgttgctggcgtccaggccccatccatgggaagacgagcaactcctcccccaaatgctcaagctggagttggcaatggcgcagcaaatggagaagcttccactactccagcaccaatggcagcagcacagaaactattggcatcagctgacatttattctgaagtcccaccagacaggtttggacaagaagctaagcacttcaccgagacacgggtgcttaacagagaagtgcggattgtgatggagggtacagacaatttcaacaacatatttggttcagtttattattctgatggggatgttgtaaaggacttggcacttgatctggttcaaaatggactcgcaaagtatgttgaatggagtgcaaatgtgcttgatcctcaacttaagacaaagttgaggaatgctgatcttcaggttaagaaggaacagttaagaatctggactggatttaagcccccggtgacaaacacaaagccaattcacaaccaaaagttcacaggaaaagtgatagaggttgtgaacgggtactgcctagtcatcgctgatgacgctgaaccttatggcagtccttcagcagaacgccgagttaatctttcaagcatcagaccccccaagtttgaaaagccttcagaggagaacaaatcctctgaacaatttgctcgcacagcaaaggaattcctgcgcacaagactgattggaaaacaagtcaacgtctcaatggagtactcgaggaggatcaacattgcagacggacagattgctggcccgagaactaactcgactgaaaccagagttttggagtacgggtcggtgttccttcccagctcatcgcatgctgatggagaaaccgctactagtagctcggacagcagcaataatcagctcgggatcaacgttgcggcgctgctggtctcgcgcggattagccgacatcaccaggcaccgtgactacgaggacaggtcgcatcactacgatgctctcatagctgcccatgcgcgagctgagaagacgaagaaaggctaccactccaagaaggagtgccctcctattcatatgacagatttgacgagggtacccaaaaaggcgaaggaattccttcacctgttgcaacgcagcaggaggcattccgcaattgttgagtacgttttcagcggccatcgtttcaaagtgacgatccctaaagagacttgcaccattgcattcgcgctttctggtgttcggtgccccggtagagatgagccctactctgatgaggccatcacaatgatgaggagaaggatattacaacggaatgtcgagattgagatcaacacagttgatagaactggaacattcttaggttccttatgggaatctaatatcaatgtggcttcggttcttttggaggctggtcttgctaagatcagctcatttgcagtggataagatgccagatgctcaggttctcttaaagactgaaaaaattgcaaagcaaaagaaattgaaggtatgggagaactacgaggaagttgaagtttccaacgtctctctttatgataataaagagactctaaaggttattgtcactgaagtgctaggtgctggaatgttttatgtccaagcacttgctgatgaacatgtggagttcgtacgtcatcagcttgcttctttagacattaaggatgatccagctgaagctttagaagtgaaagagctggaaacttcaaaagaggttgctactttgacaaaagatttacctgaaactttggatgccgaagacccatcttctgatgtggctaaggatgaatcagtaacttctaaggatatagacccattaccagatgattcaaacacagctccatttactcctatgaagggagaaatggtgcttgcattgttccgctgcgacaattcatggaacagagccatgattataggtgagtgtcagggagttgaaggacctgagtttgaagtattttacattgactatggaaaccaagaacttgttcctcacagttgcctgagacctatcaatctatccatttcctctattcctccccttgcaaagctgtgcagccttgcctttgtgaaggtgcccagtctaaatgactatcttgggcaagaggcagctatgtatctgaacagtatcttgcttgacaatgggagagaatttgaggctattgtcgaagagcgagatgctgcttcgggagggaaattgcagggtcagggaaccggagaaatcctcggcgtgactctactcgatagtgagaccgacaatagcatcaatgctgagatgctagagagagggtatggtcaacttgagaggaggagatgggactcgagggagaggagggcagccatcaagaagcttgaggaattccaggaggtagcaaggaaggagcagctaggcgtctggtgcccaaagaatgcaaggaagcagggcatggatgaaaacgagtaccctgtcctggccagagcaccacctcccccaaagaagggatatgacctgatcaagttcattgcgtcccggtccgactaa

SEQ ID NO: 6354 - DNA, 654 bp, Oryza sativa
  Clone ID: PAT_MRT4530_13052C.1
ttttgttacaacaacattttctcgatatattccatacatatatattcacacagcactgaagccgtctgaacgtatcaaaaaacaaatgatgatacaacatttgatgaaaacccatggacatgctattcggctcctaactgctgtcgtgcagcagatggacgacatactgaccagaattttctcgagtgaaccaactcctgcaacttttattcactagtatctctacaaatgaccaacatccaatgtacaacagcataagatcatccaatgtacgacagcatatgatgatccggcatgaaaaaggcaaaaatagctcatggagaaagcaagcattatccccttcttgattcggagataatatacaattcccccatgcactgcatagcgttccgagtgcctcttatgagtcgaattgcaaagaatggccgacaatttatatgtagcaatattcttatcggtgacctctcctccttgatgcaatgcgggctcgtggaaggcccagaatagccaccagcccaccgataaaagatgcagcagcagccactgcaaaggctggtgcattgccaccaccaaacagttggtcccagggcccgctacccagtgacacaataacctgtggtatgacaatagccaaattaagaatgcccattgcta

SEQ ID NO: 6355 - DNA, 373 bp, Oryza sativa
  Clone ID: PAT_MRT4530_13053C.1
gtgcaaaacacatatcatcctttaacatgacacatgcatgctgcaagtgctccttgccaggggtgggatgcacggccctagggtggacataacatagatacactggaatgaccaatcaatgaccggttgtatagcttgatgattacaaggaacataaatgctccaaatactaatcagataaccacagacctaaagggcggatattgtacgatatacaaatagcaaacctagggtaggtgacggcccagctagacagcacacggcccaggggcaatctgttgactgcgttataatgaacagaggcaataaacaacaatcgacaggtcaaaaggcccggcagtccgcgcaggcctgatggcaaaggtgctttatt

SEQ ID NO: 6356 - DNA, 306 bp, Oryza sativa
  Clone ID: PAT_MRT4530_13054C.1
cccacgcgttagtccacgcgtccgcgcacgcgtgcgcggacctgcgagtcggagagccaccggatcaagggcccgtgcgcgcgcaaggcgaactgctacagcgtatgcatcacggagggcttcatggacagctactgctacggcgtgcgtcggcgctacatgtgcacgaagccctgtccgtgatcgatgaaccacaagctaacgcagtagatcgagccgacaccttgcgcatgtgtcatggagtagatcgagcggatcatacctgccttatgaatgaataaaagcgtgtggcttatgcgtggttaa

SEQ ID NO: 6357 - DNA, 666 bp, Oryza sativa
  unsure (1)..(666): unsure at all n locations
  Clone ID: PAT_MRT4530_13055C.1
cactaaactagaacctgcttcacaacacaacacaactactacctgttcaactgctactactgcaacgagagagaaaaaacaatttcagtttcagaagagagaaaggagcaactgagcaagaactgaagaaaatagagagagagaagccatggagcaggggtacggctgctacagctactaccagcagtacaagagcagcggcagtttcatcagtggcaaggagaagaggccgccgctgaagagggggcagctgaagcggcagattgtgaggacgctcagcaacctcatggcgccggcgacgaggagcagcggcgacgctgctgctgctgcagactccaagaagaaggcagcggatcgcagcagcttcaggagagaagccagctacaactgaatcgatccaatcgaacagcaacatcatcatcatctgatactcagattgatatgcatattacttgtagtatattgcttgtgtacgtgtgctgtgcagtaggagtattccgtacgtagatgtgtatggatcgatgtagttgacatggtgacaggaaaagttgctgctgctagattgtagatgcccttttgttcatctttccctcaattttgttcggacctttcggagtattagtaatgaagatcaattttcttttgttgaaaggctaaaaaaaagan

SEQ ID NO: 6358 - DNA, 1305 bp, Oryza sativa
  Clone ID: PAT_MRT4530_13056C.1
atgggcaagctcaatccctatgaaatgaaatgcaaattcaatctgcagctaatatccacctcccctgagctgtgctgctgcgctgcgctctcggactcctcccagatccccaatccccccacgctctccggccatcgcgggtggagcagggccgccgccgagggctgggggggagcgcgagtcccggggatccgagccatctgccggtgggcggcggcggcggcggcggagttggggttcgtcgtcttggtcttgggtcttcttcgtccctcgctgcggtatgtatgcctgtgctgtgctgcctcgagaacaaacgttcaccgcgtccccggcggcggcactcagccggagcacgcggctgcggtgtggatcgccctggctttcagggggcaatctcctgatcgtggatcagacgcatcaggaccaaaacagtctagtgtttcatcacatgaggactggttctctgggcacagtgaagactgtggtttcaagaagccagcatttgatgttccttttgacctaagtgaactacaaaattttgactatgctatagaagattgtgtttacgtccttcttgttgattcacagtttggaggagtggtaaatgtccaaggtgatctgaacaagcttgattttgatttgaacaatgtttatgactctgctgcagagtggataaaaaagcatgcacaaatcacagtttcttccatagaccgcgtatggaacaaacttggcaatgctaactggggcgacattgggactcttcaacagcaaagtcattctcctgaaattgttgaagtacaagaggagggagctgttaatgtaaaaccaaaggaaattttgaagcttgaggtgccgttcatccgccgccttgccggcctcccgcccggccgcctcgagctccgccgccgcctggggagcgttgccacccgccacccgcctcctcggcggccggtgcccgcccgctgccgcctcgggctccgctgcccgcccgggaagcgccgtcgccacgccggacccgccggcctcgttggccgcctgctcggccgcccgccgccggcctcgcaggctgcctgcccggccgcccgcctcgctggcctcgctggccgcccgccgccggcctcgcaggccgcctgcccggccgctcgccacttcgcggccctccctgccgccgcgcgccgcccggcctcacgtggtaggaggaggaggaggaagagaagagaagagaagggagaggaatgggagaggagaagggatggaggattgggtgaggctgaggatggagaagggataagggaggctgtttaa

SEQ ID NO: 6359 - DNA, 350 bp, Oryza sativa
  Clone ID: PAT_MRT4530_13057C.1
ttggtggttttattgaacattgtggtttacttcactatttatcattacgacaaaggtgtccataatcctgattgggtatcacaacataaagaaaatctaatacgcaacttaaacagtactatatagacaatccacacgatcttacggttccaataaacactaacggatcataacccccaaaattagccaaaatattccaagaacaaaaaaagcacaaactatgaacaagagagggtaacataacaaatccttaaataattaaaaacgagcgtgacacatgttccagaagcaatatattacctgtgccaaaaaaaataactacgaccataattagttgagagcgcaagcaa

SEQ ID NO: 6360 - DNA, 736 bp, Oryza sativa
  unsure (1)..(736): unsure at all n locations
  Clone ID: PAT_MRT4530_13058C.1
gcacagtgaagactgtggtttcaagaagccagcatttgatgttccttttgacctaagtgaactacaaaattttgactatgctatagaaggtgttactttccaacagctagtacggatgccaaatgctcttcatgcctcaacatcagatatttttgaagctactgcacatcttgctttggaagattttcttcatgcaagtattaagggtttgtgggaaactttctggggccctgatgaatcgatgcctttctctgttgcctgtatacacagcacaagctccaaattttatcctgctgagaaggctattagcagtgggagacttgatggcgtttgtgcaacggctgtattgctgaagagtttaaagcattcacaaggaaggtgggatcatattgttgtactggctttgttgagacctgatattggaatgttttcggggcagaatgaccaacagccatctccggctgttttgggggaggcactattctttgccttgcgtgttctactttctcgaagccttagtaggtcttccacagttcttcaaaattcagattgtgtnttacgtccttcttgttgattcacagtttggaggagtggtaaatgtccaaggtgatctgaacaagcttgattttgatttgaacaatgtttatgactctgctgcagagtggataaaaaagcatgcacanatcacagtttcttccatagaccgcgtatggaacaaacttggncatgctaactg

SEQ ID NO: 6361 - DNA, 365 bp, Oryza sativa
  Clone ID: PAT_MRT4530_13059C.1
atgatttgggcccacaatcttgtgtcccacgccccttcgggaagagagctcgaggttgatccgtcgctgcttcgctcggcgctgcttgggccgtgcgctgccgctccgcttgttgccattgcttggaccaagctgctgccgctcacgaccatgacctcaaccgtttcattcggcaccacttgggccgcgccactcgtgactacgacctcaatcactctgcttgacgttgcttgggtcgcgccactcgacgccgtcgtggcgctgctcgaccggcgtggcatctgcatctctgacgcccgacggtggcatgttgacgtgaaggacgggcagatcagggctcagcacctgccgattttgctgttcag

SEQ ID NO: 6362 - DNA, 348 bp, Oryza sativa
  Clone ID: PAT_MRT4530_1305C.1
atgagcagggtcggagagtgcggcggcggcggcggctgcggggcacggcgagggaaggcggcgcacgccggtgccggggcggtggccgggttcctggggtgcttgctgctggtgtgggcgatgggtgggtgtgggagggggtgtggtggtggtggtggggagggtgtgagggacagggtggaggaggtggcggcgcagttcaacctcagcatgagcaagctgcaggcgctggcgtcgctcctgtcttcgccggagataatatacttcattcattatgccctgggatcttatcatcatgcatttctaactgacgatttgaactatgatgtagcgggaatgcatatgtaa

SEQ ID NO: 6363 - DNA, 231 bp, Oryza sativa
  Clone ID: PAT_MRT4530_13060C.1
gggaaaaatgtgtccgtgcttttaacaggttaaacaatgaatagtagtagtctgcagagcctcagtaacatcaagcagttttgctgatcttcgtgtgtgaggaacactcgagtcctcactctttttaagttacaacaatctctatacttagaagtgggttctaatgttctatgccggtacgagctacagggaacataacacttttctgcaagcagcaaagaaacccccccc

SEQ ID NO: 6364 - DNA, 195 bp, Oryza sativa
  Clone ID: PAT_MRT4530_13061C.1
atggcggtttgggaggcgtcgaccaagccgctggctgccaataatggagacgaccgagttcatcaacgccttgaaacaggaggtacagtcgttaacttgggtgtttggttaattaccttgcaggcaattggcatgcctcatgttattcctggtctaatgaaggctgttggcattgtgtacagtgaaggtgactga

SEQ ID NO: 6365 - DNA, 2136 bp, Oryza sativa
  Clone ID: PAT_MRT4530_13062C.1
ctctgcatctcggatttgctatcagcaaccaacaccatgtcctccagtacgttagtgctcctgcagctcctataccttattagccttatcctaccagccttctctgccaacgatgacaaccaattcgcctactctggcttctctggtgctaacctgaccatggatggtgcaactatcacatcaggtggcctcctagagctcaccaatggcacagtccagcagaagggccatgcattctacccggtcccgttgcgctttgtccgatcacccaatggatcagtgctctccttctcggcatccttcgtattcgccatcctatctgtctacactgatctaagtgctcatggcatggccttcgtcattgtgccaagcatgaacttctcagctgcgttgcctggccaattcctgggcctcgccaacatccagagcaacggcaatagcagcaaccatttcttcgctgtcgagctcgacaccatccaaaacaaggagtttggcgacatcaatgcaaaccatgccggcgtcaacatgaacggtctccgatcagagcagtcctactacgccggctactacgatgacaaggatggtaacttccataacttgagcctgattagccgtgaggccatgcaggtgtgggtggactacgatagcaacaacacgcagatcactgtggccatggctcccatcaaggttgcgagacccatgaagccattgttcacagccagctacaacctcacatctgtgattacagatgttgcgtatgttggtttctcctctgcaactggcacaatcaacgtgcggcattgtgtactcggctggagctttgcgataaatagtcctgcttcagccattaacttaggtaagctaccaaagctgccacgcatgggcccaaagccacgatcgaaggtattggagattgttctaccagtagcaacggcaagttttgtccttactgtgggcattattggtcttgtactcatacgaaggcatatgaggtatacagaactgcgcgaagattgggaggttgagtttggaccgcaccggttctcttataaggatctgtatcatgcaactgaaggattcaagaatgagaatctgctgggtgtaggaggatttgggagagtatataagggtacccttccagtgtcaaaattggagattgcagtaaagagggtgtgtcatgaatcaaggcaaggaatgaaggaatttgttgccgagattgttagtattggtcgtctccaacaccataatctcgtgcaattacttggctattgtagaagaagaggtgagctgttcttagtgtatgactacatgccaaatggaagtgttgacaaatacatacatagtatagagggaaaaaccattctaacttgggcccaaaggtggcatatcatcaaaggcattgcatcttgcttggtctatctccacgaagagtgggaaaaagctgttatccatcgggacataaaagctagtaatgttcttcttgatggcgatatgaacggacgacttggtgactttggccttgcaagattgtatgatcatgatgatgacccacaaaccacgcatgtggttggaacaataggatacctagctccagaactaggacacactagcaaggcgacccctcttactgatgtatttgcttttggcatgtttgttctcgaggttgcctgtgggcagagacccatcaatcaaagttcacttgatagccaaacgatgttagttgactgggtgcttgagcaatggaacaaaggatcactagtcagtacagtggatagcaggcttgaaggaaattataatgttagagaggcagttttagctataaatcttggacttttatgctctcacccttttgctaatgcaaggccttctatgcggcaggtcattcattaccttgatggtagcattccattaccagagatgtcaccaacagatttgagctatcatatgatgacaataatgcaaaatgaagggtttgacgagtacatcatgacaagttcatcgatgagtgaaatgctcaggcattccagcagcacgtctgcaggtttgcgtcgcaagtggctcaagcgatctgggaggaatgggaatggtgcaactggcctgggaggatactgcagcagggctcctttctttgtgtag

SEQ ID NO: 6366 - DNA, 586 bp, Oryza sativa
  unsure (1)..(586): unsure at all n locations
  Clone ID: PAT_MRT4530_13063C.1
gcacgaggcccgctcaagcacgggccacctagctgtttaatgaaatctcccaatgttacgactaacctcctattttcacctaatggataaccacttgaatcaaataggatacatatatgcgatttgtcctaggctgtgtttagttcacgttaaaattaaaagtttgattgaaattggaacgatgtgatggaaaagttaaaagtttatatgtgtaggaaagtttagatgtgatggaaaaattaaaagtttgaagaaaaaatttagaactaaacaaggccctggaccactttggtgtgcagcaagtttgtgaaaggaggattactcacggtcgcaatcccctgatccacggccgtccttgagaaccaggaaatagaccccaccgacaacaacagaggccgtcatggcccagacgaacacggccatngcggctgccatggtctgctctacccggtacgcaaacgcgtagctaagggcagtcaacagctcccaggcttgtcgcagcagccgcctgcgctccttcgccggcgacatcggcgtgagctgcttgacgcggcggaggacgacaaagagcgcggcgaggttggcg

SEQ ID NO: 6367 - DNA, 171 bp, Oryza sativa
  unsure (1)..(171): unsure at all n locations
  Clone ID: PAT_MRT4530_13064C.1
acatctccgcgtgttcctgcgagattggtcgatcgatcaaacatcgcgtaattacaagaagcgtgtagtgtacttgaacatgagaaaattcatcaggtgcaaagttagancacttgctatgaacaaaaagctactactagtattttgctgtgcttcaaaaaaaaaaaaaaa

SEQ ID NO: 6368 - DNA, 259 bp, Oryza sativa
  Clone ID: PAT_MRT4530_13065C.1
tcgaaaaaaaaaataaaaacaacagcgaaaaaaacaacgggaaacaaagtacaataaataaaaaaccacacaacctggggaccacaactatggggcgtcattcaagaaccacgttgctcctacatacatgcgagggtgtcatcttttcttaagtctcccctatgaaaatttcctgggccgtcttttcataaccgcttagcgtgcaaaacctcctgtggtccccacccttaatcctttccagaccatccccttttgccct

SEQ ID NO: 6369 - DNA, 1548 bp, Oryza sativa
  Clone ID: PAT_MRT4530_13066C.1
aagcttttttttttaggaacaaagaatcactgtttcatgacgctgtaatttggtcagacaatacagcgtttatgaatgtacactgcaaaattgggagctttgtggctttctttgtacaaagaatatgtcaaaatgctactgggggtttgcataaagttcacccaagtcagctaataactcacatttgctctttgcctaaaacatcagaaatccagaactccaaaatcctgataatatgctgtcaaaccaaagaacacagtaaatataaatccaactttgatatctacgagcgaaaagaaaaaggaaaagagttccattgggaagatcagtaatggttatacatttcaaggatcaagattattagtgtatgccgcagctgtatcatttacacttatcagggcctcggaggattaaacagcacaatgcaaagacggatcattcatcacgtggctggccttctgcagcattttgagccgtattctgctcccttgattgcacctctttatcatcatcttcagcatcttcaatctgggaatcagaataggaatcactttcagaggtgatggctccagagcaggcttcaccgtcctctccatggaagaacctggcgagcgacaagggattgtaagtagagctggctttgcggaggccctgaatcgccttcattgccgcgagtgtgcttcggtacacgtccgaggtttcaacatcgacagatgacgctgggtcatggctagccgcatcatcattctgaggttgcaacttagcagaggagctagcagactcaagtacttctgcttcgataggaaacaggagctcaagattagcctcacattctcgaacaagccttgttaaaggttccgttgtgaaaaatggttggtgtcgagcacgttgagtgaaaggtaggctgagcaaaccacctgttctcttgtcatattttttcagtatcttcacaagtccggcaaaatttagggagctataggtttgcagaagaatcatctccccatggatgatgacaaaagctttgcgtatctctaacatctcttcagtgaattcgctcttagatgtaaaagccccattcttcttagctttgacacgttcaattctttctttgagcacctggaggcggatgacgtaccactcctccctctcgatgtagaagtcgttgagcttctggagctccatgtcgaggaccctggcgaaccagttccccagggcgatgcccccatccccatccccatctcccgcaggcacctccgccgccgcggcgacgggagggggatctccatcggggggcaggttcttgattagcttcttgagggacttgtacgccagatacttgtccctccacgccggcagcgtctcctccaggtggctcctgaaatccttcccgaatttcatactcgatttggaacagaattcctcgaagaattcgcaggaaatctcttctcccttaatctggctcggagtgggttggattggaagagcgactcggcccggaacagaattcctcgaagaattcgcaggaaatctcttctcccttaatctggc

SEQ ID NO: 6370 - DNA, 353 bp, Oryza sativa
  Clone ID: PAT_MRT4530_13067C.1
gattgaaaagtttggaacaagatcgctatgttaggtgaggtatgcacacaagagagttcaggaagcatactttgacttatgcttatgtttatgtttgaccttctgcgatctatggaaaatgtagtggctgggtcgacaaggtgtgatgtaaagagagaggtctggactattagtcaaatagctggagtattaggagctgcacaagatcctgtttccttgaattcccgcccctgggatttgtgcaaagtgcatgtagtgatcgtgtgctccttgtcagcatccactttttagtgcttgttggttctatttaattaatgaacacttcaaatgcttagttgaaaaaaaaaaaaaaa

SEQ ID NO: 6371 - DNA, 264 bp, Oryza sativa
  Clone ID: PAT_MRT4530_13068C.1
atggttcacaacggtggaacccgtgaaagcagcgaccatgtagccttgcttatgcccagcaagtgcccgactgctaagacggatcaatatcccactcgtgcagtaactagtagtaagtgggaccttcgaacggctctggtgtcctcagccttgcaaactattgatatcgtgtgggtaaagctggacagtctctgcagagaagaaccgtattacgaagaagttccagaaggtagcgaggcctacttcaatgatgagtttttctag

SEQ ID NO: 6372 - DNA, 238 bp, Oryza sativa
  Clone ID: PAT_MRT4530_13069C.1
tttttgtttttttgaatttgttgtgtttcacataacatttttgcaatattcattgtttaaatcataacaaggggcccatgatccaatacttggccggaaatagaaccatccaaacgcatcacaatccaagggtgacaaccggctcttaactattggaaaacaaagggcatcaaaccagttcgagctagcaaaaactttttttactcccgcttgctaaggctatacagtttttacaggg

SEQ ID NO: 6373 - DNA, 381 bp, Oryza sativa
  Clone ID: PAT_MRT4530_1306C.1
atggcggcggcggcggtgacggtcgcggctggcggcggctaccaacggcggatggtgatggcggcggcgacacaggcagaccgtcttggcgcaaagaggcgcagccgatggcagcggaggccggctaggcgcgagagatgcggacggcgcaaatggaggccggtttggtgcgagaagcgcgaccgatggaaggaggccggattggcacgagaggcgcgtccggtggaggaggccggcttggcacgagaggcgcggctggcgatggaggaggcgtacctcggtgcgaggaggagctgccagtgggtgtggagcagttttcggcgcatgaaggctagccggcggggcgtcggtccaggggtcccacatgtcggcagagcttga

SEQ ID NO: 6374 - DNA, 489 bp, Oryza sativa
  Clone ID: PAT_MRT4530_13070C.1
atggtcgatgtagccgaagtcgggaagctgatgtcgaggtacccaagccgcagagcgcgcatggggcgccgtagagtggtcgtggacgcacaggagggcgtcatggaccaaggtgatcagaccgaagttgcacacaacggaacaatgaagtcgaagccgaagttgatgccgatgtcggagacaccaacgcacgagatcacagcagagacgatggctagtcaacagggtcaaaaggaggcactgcagaaagtggtcacagggcgctcggccaacgactgtccagccagagatgctgacggagggcgtcggcgcagcaagacggaggcggtgcggaaggagtccggcggccgggtggagaggtcgacggggtggtgccggcagagcgcgccaggccgggggcggtcggggctcggcgacgccggccgtgcacctcgacgcggtgaggaagaagcgaccgtccacccggcggcggcggggatggctcgatga

SEQ ID NO: 6375 - DNA, 1426 bp, Oryza sativa
  Clone ID: PAT_MRT4530_13071C.1
ctctccatctcagcccagcaccaaggccagcccatctccctccttcattctcggcggacctaggacggcccaaaccagcccaatcaccccctcctttctcctcccaagcatccaacacacgcgcccgccacctgctcgacgaaatgttgaaccgggcgagcagcgtgccaaaccgtgccgcaccgcgtcgcgctacaccgtgactatagatggccaaaaggcccgaagcccgacggcccggcccatggcacggtattttggcccagcccaagcacagcacgttcgggcccgtgcccgcccggcctgaccactaggccgtgccggcccccgtcagcctcgccaacacccgctacgcccggtgcacagcctcgccttcccgcggtcgcgcgtccacgccgaaagggtgtgccgagctcacgccctccgtgccaccgtagccgatgtcgatatccggccccaaacgggcgccgcccattccatccgtcgctgacacgtgcccaggagaagccgagtgatcggcgctcactacgccgcctccttggcgccgtcgctcgcccttgcaccgctgctctgagtccaccgccctcgtgtgctagcgctccatcgcccgcagttgtgcgtccacgccgaaagcgtgcgccgtgcccacgcccaccgccccctccttgtctcttcaccgcacatggccacaccgccgccgccagcccaccaacctccccaccgccaccatgaagtggattaccagtttcgaccgcgtcccagaataggcgcactggatcctgcaccacctcgccaatgagctcgagcgccttagccatgcctcctcctcgacccccacctccaagccaaaggcatcggcttccccctccaccctacccctctccttctacaccccccacctctttcttcccttccccacccccttccctaccatctcttcccacccctccccctcccccccgtccagctcccctttttctcctattctccccccgtccccccccccccccccttttcccccccccccccccaccgcccccctcgtctccctccagtgtgtggcagacggagcaccagcaacccccccctatttttttccccccccctactttcttttttcacttccttccccctcccttcgcgctccgccccatccaactccgcccaccccctcccccgcccgattttgcccgcccccatgcgactttcactttctctcccccccccccctccactcccccccccccccctctcctctcatcccttctccccttatttccccccgccccccaatctttctatttctccccctctcctaccccctcactgccctcccccctcacccactctcttattctttcaccaccccctcgttatttcgacccgcccccacctacatttaccccccgcccccatccactacttt

SEQ ID NO: 6376 - DNA, 165 bp, Oryza sativa
  Clone ID: PAT_MRT4530_13072C.1
atgggcaagcagccggaggattatttggagaatggagattcatcagttccttggagcgcgtggaggcagctagcagaagctcatactgaatattcatataggtcccgtgccctcgcgccgaacaagcctgcagaaaaccccaaattgccctccaacggaatcatc

SEQ ID NO: 6377 - DNA, 6739 bp, Oryza sativa
  Clone ID: PAT_MRT4530_13073C.1
atggcatggggaggcgcaggcaatcttgtgcctgttaggccagcgggttctgtcaatgctaaaggacaggggccacgcgagcagcgcgttaaaggcagcaagctcctcagtggccgcttcttgtgcataggtggcatcctcaaggagaggtgtagtgatggcagcagtcgggcaatgtggaggcacagagagggaggaggagcaggagaagatgggagggggagatggaggtggcattggctggggaagaagagggggaacagggatagaagtgatcttgcggaagtagatgatcctgaaagtgcaatgtccacagttgctcaattgttggagcaactccatactagcatgacatctctaccagagaaagaagtgacgactaaaagattgcttgaactggccaaagaaaaaaaggaagcaagggttttgataggtagccattctcaggcgattccactatttatatctatccttagaagtgggacatctatagcaaaagtaaatgctgcagcactacttagcgcactctgcaaggaagaggacctgcgtgtcaaggtcctgttaggaggttgcataccacccttgctctctcttttgaagtctgaatctactgaagcaaagaaggcggctgctgaagctatttttgaagtgtcttctggtggactttcagatgatcatataggtatgaaaatatttgtgacagaaggtgttgtgccaaccctctgggacatgctcaaacctaagtcacaccaagataaagtagttgagggttttgtcactggtgccttaaggaatctctgtggagacaaagatggttattggagggccaatcttgaagctggtggagtagaaattataactggtcttatttcatctaagaatactacttcacagtcaaatgctgcctcccttttagcacggttggtatctgcctttggtgatagcatccccaaaattattgatgccggggctgttaaggctcttcttcgcctcctaaatcgagacaatgacatttcagttcgtgaaagtgcggccgatgctttggaggctctatcttccaagtctagtattgcaaagaaggctgtggtagatgctggtggcattcctgttctcattggagcagttgtagctccttcaaaagagtgcatgcgtggggatacttgtcattctctacaaagtcatgctgttcatgctttatcaaatatctgtggtggaacagtatctctgttgctttatcttggagagctctgccaggtgcccagtccacctgttcccctcgctgacattcttggtgcacttgcatatacattgatggtatttagtggcactgatggtaaatcttttgatccgattgagatagaaaatattttgattgtgctcctgaagtcctatgatagtaatcttgtgcttgatcgtattcttgaggctttagccagtctatatggaaatgcatgtctgtctggtaggcttaatcactcgaatgcaaagaaggtccttgttgggctgatcactatggcttctgctgatgtgcagaaaaatcttgttcatgctttaacgagcttgtgctctgatggtattggaatatgggatgctctaggaaagagagaaggaactcaattgctgatatcatttcttgggctttctagtgagcagcatcaggagtatgctgtttcattgttggctatattgagtgatgaagtagatgacagtaaatgggcaataaccgctgctggaggtattcctccacttgtccagctactggagacaggatctcaaaaagcaaaagaagatgctgctcatatcttgtggaacttgtgttgtcacagtgatgatatcagtgcatgtgtcgagagtgctggggcagttcttgcattgctttggcttctaaagagtggtagccctcatggacaagaggcatcagctaaagcactcaagaagattatacggtctgctgattcctccacaattaatcagttacgagcactgctgcttagtgactctcttagtacaaaggcccatgccattacagttcttgggcatgtacttgtgatggcttcccagagagatctagtgcagaatggagctccagccaataaagggctcagatctcttattgatattcttgagtcatcaaatgaggaaactcaggaacaagctgcaactgtggtggctgatattttcagtacccgtcaggatatttgtgatatcttaggaactgatgaaattattcagccatgcatgaagcttttgacaagtgggaaccaagttattgcaacacaatctgctcgagctttaggagcactctcccactcggctaatgccatgttgaagaacaagatgtcatgcatagctgaaggctatgtgcaaactcttatagagatgtcaaagtcaccatccattgatgctgctgaaacaacaattgctgcattggcaaatttcctatcagatgcacatattgccaaggaagcactagacggcaacatcgtcctggctttgactagagtacttaaggaagggagcttggaaggaaagattagtgcttcacggtcgctctgtcagttgctcaaccagttccccctcaatgaagttattccagattactcgcagtgctattttataattcatgcactgctggtgtgtctatctggcatcaatttagaaaatgctactaatttggatcccttgaatgtacttgcatggatggctaggaccaaggagggcgcgcactttagttctcccttgtggtctgcctttcttgatgttccagaaagcttagagcctttagtgcgctgtatcagtgttgggcttccaccgattcaagataaggccattcaaattcttgcaagtttatgtcaggaccaaccttctctacttggtgagcatttgaacagaagtcaaggatgcattgcttcccttgctagtagagttattgaatcaacaaacatggaaataagaattggcagtgccatcaccctcatatctgcaatgagacacagcagggaacactcaattgatgttattgaagcatcagggcatctgaagaatctaatatctgcatccattgatatgatgaagcaagattctgccccaacatccctagatattgaagtttggaaaccataccccgaaaacagtttgtataactatgataaggatgttctgggtgtgtctggatcaggaaaggtcttggaagaaacagttgcgctttggttgctctcacttatttgttcttctcatttgagtagtaaacttactgttatggacctcggtggtgttgagactatatctgataaacttgctagctacaccactaatcaacaggattcaatgcttgttcaatctccagcaataatgcgaacaataccttctttagcttcgttgctaaaatcagacaagatcattgacaaatactttgctgctcagtcactggctagccttgtttccactggaagcagaagtatacagcttgctattgcaaattctggtgcagttatgggtactatagctatgattggacagatcgaatctactatgccaaaccttgttgctatggctgaagaattcaagttggcagataacccaagtaaaataatattgagaagcctttttgagcttgaagatgtccgtacgagtgctactgctcgaaggtccattccgttgcttgtggatctacttaaaccaatgccagacagacaaggcgcacctctggttgctttgcaccttctgactcaactagcggaaggcagtgagacaaataaagtagctatggcagaggctggagtcttggatgctttaacaaagtatctatctttaagtcctcaagactcaactgaaactactataatcaatctactgcggatcctatacacaaaccctgatcttctttaccatgaatcctcaattagcacttcaaatcaattggtagctgtcttacgtctgggctcaagaaattctaggcttaatgcagcaaggacgttacagaacctctttgattcagagaatataagagacactgaagtggcttggcaagctattccgccattacttgatatgcttgagtcaggaactgaaacagaacagcaggcagcacttggtgctctaatcaaactttcttctgggaatatctcaaaggcttcagctttgtttgatgtagaaggcactacacttgaaagcctctacaaaattttatccttcagttcgtcattggagcttaagaatgatgccgctcagctctgctatattctttttgagaattctactataagggcatcacccattgcctctgaatgccttcaacccctgatatcattaatgacgtcaggctctacttttgttgttgaacctgcagttcgtgctctaaataggctactggatgaggagtacaatgcagagattgctgccactagtgaagttgttgatcttcttgttagttttgttcctgggactaatcaccaactgtctgaggcatgtattggtgctctcataaaattgggtaaggaccgtcccaactgcaagcttgagatggttaaagctggcattattgaacatgtgcttgatatgattcttgatgttcctgtttctgttagttcatcgattgctgagttgcttcgcattttgacaaacaacagtggcattgctaaaagttctgctgcagcaaaaatgcatagcgcattgcaagctcttgtaaatattctagaaaagcctcaaagtctcgcggcattgaagttaagtcccagtcaaataattgaaccgttaatatcattccttgagtctccctctcaagcaatccagcaacttggcactgaattactgacacatcttctagagcaggagcatttccaacaggatatcactacaaaaaatgcagttgtccctctggtgcagcttgctggtattggaatcttgagtttacaacagactgcagttaaagcgcttgagagcatatctcagagttggcctaaggctgtagcagatgcaggtggaattcttgaactttcaaaggtaattgtccaagatgatcctcagccaagtcaagcattatgggactctgcagcacttgtattatgtaatgttttgcgctatagctctgataactatgtccaagtgtcaatagctgtacttgtaagactgctgaattccaccatcgagagtactgttacaatagctctgaatgctcttcttgtgcaagagaaaagtaagtcacgctgtgctttagccatggctgaggctggggctgtgcgtgctctgttaaagctccttaagagccatcgttgtgaggaatccgctgcaagattgcttgaagctctgataaacaatgcaagggtccgggagacaaaagttgccaaatattctattggtcctctctcacagtaccttttagatccccagtctaagaatcagtcagccaagttcttggttactcttgcactgggtgacattttccagcatgaagcactcgcaagagcaagtgactctgtatctgcttgccgtgctcttgtaagcgtacttgaggaccagcctacggatgatatgacaatggttgctatttgtgcactacaaagcttagttctgcacagcaggacaaataggcgtgctgttgcggaggctggaggcattttggttgtacaggaattgcttctgtctccaaatgtagatattgcaggacaggctgctcttctaatcaagtatctatttttaaaccatacacttcaagaatatgtttcgaatgagctcattcgatctctcactgctgccttggaaagagagctactctctacatcaaccatcaatgaagttattttgaggactatacatgtgatattcaacaactttaaaaaagtccggttttctgaggcagcaaccttgtgcataccccatttggtttgtgccctgaaggatggaaatgaggctgcccaagaaagtgtgctcgacaccctttgcttgctgaaagaatcttggccacaaatgaatgaggacattgcaaaagcccaatccctgatttctgctgaggcgatacctgtactacaaatgcttatgaagacatgtcctcccagttttcacgagagagctgatagcttgctgcaatgcttacctggttgcctgacagtgaccatcttacgtgggaataacttaaagcagacaatggggagtacaaatgcattttgctgcctgcaaataggaaatgggcccccaaggcaaactaaggtggttaacaatagcatctgcccagtatggaatgagggtttcacttggttatttgatatcccaccaaaggggcagaagctatacatcttgtgcaaaagcaaaaacacgtttggaaagtcgacactcggtcgagtcaccatccagatcgacaacgttgtcaccgagggtgtatacagtggtttcttcagccttaaacatgatggtggcaaggatggctcgagaaccctagagatagagattgtatggtctaataggccatccaatgacaatatgtagcagtgctgatttgcctatcgccaatgttatagttttggccttcatgtaaatcagccccataaaacatccaaattcattttatgtagaaagtttagccaattcacaaacgtatttaacattcgattatttcaaggtcctttctggattgtgtagccttgtagctccagcagattttggaccggctatttttgtacaggcgaacttatttcctgtaattataacttggagtagcttagtgaagatgccatttggatgatcg

SEQ ID NO: 6378 - DNA, 264 bp, Oryza sativa
  Clone ID: PAT_MRT4530_13074C.1
atggggatgggccgcgcgccgggatccgcatggataatgctgccgcctgacaggatggatgctgatgtggttgcaaggcggttgggtgacagtatcaggcccgtagtatggtttgtgctttaccacggtctaaactcttcgtttgtttcatctgggatcctgacgaaaaaggctggtgatgtttgctacgaaatgggctggcccaagacagaaaagggcccaggactgagaaatgggccgaaatgtttgaatcacgccgattga

SEQ ID NO: 6379 - DNA, 396 bp, Oryza sativa
  Clone ID: PAT_MRT4530_13075C.1
atggcactgctcgtgatgtcgtgcgtggcgcgcctcgacgacaaggacatgggggctggaggcggcgtggaggaggcgtgggtggcgagcaggtggcggccgtcgcgcaccgatgaggtcaggcacctcatggtgcacgagagcatgcatgacgtggtcggaaatctctcggtttttcttcttctctcctcagcagacggcttgacgccctccatctccatccctccccatatggcggtgtcactccccgtggcccccttcccccgagctggcgacaccctttccccgagccggcggctcagccgtggtgcctacactctccctctccctctacttgcgaccctgcgccaaggctgcctagtgagcagcggtccgcgacgggtcggggagcagtag

SEQ ID NO: 6380 - DNA, 408 bp, Oryza sativa
  Clone ID: PAT_MRT4530_13076C.1
atgcaattgtgtctttcggtcactttattttggttggtaggatccgcctacaggcgggtaacaggggtattaagattagggtgtaagggaaggaacagttgggaaatccccggtctcaaagagacaagagacatacagactttagggactatgggcaatgagggaggagccgagcggcgaggatgtgcatttactaaaccttttttggaaaagattgacttcagttcggaggcaaatgaaacacttccacaactcgcggatagaattgattgcccggaatcacttattggttggtggttggagtgcatttcctatatataccttttcatttcttggttgaattccactgttaatcgaaggattttcctttgcaattttggcatattgaagtgcgtgcatttcttctgg

SEQ ID NO: 6381 - DNA, 2666 bp, Oryza sativa
  Clone ID: PAT_MRT4530_13077C.1
acctgaaatactgtttttttttttttttaataaaggtactcctaaatactcttccataggaataatacaatcaaataatttactatattaacattagtgactacaaaatgtgatgcagctttcgtgatctgtgattgaacatgtctctgatctaaagcctaccactaacttgctggaacctttacaagagagaagagcccagataaaagaatatcgctctagacagcttaaataaaacctagagcgtaaagaattaatctaccaggtgaaaagaaaataattggataatacaacactctgtcattcagggatttatattgcagtcccgtaggaagacttgatcgaaatcgacgtattttgaccagtatttgcgatatctggacaatccaatctcaagccagggtttcagattaccattgtagtgtatgacagatgccctccggatatccttctcattgatgtttgggttgtacccaagtcccaactgatgccaggagtgatgaagagggaaggtacggttccaaaatgttacgagaccagcaggaagagtacctagcttccacaatatcctattttcgttcagtctttgccaattgtggtagacgtcagtaatcttttgtcttctccactcagatagatcgaacacattcatgccatacgcccaaccgcaggcacgcgggtcaaaattgctggcaataagaggatttgagaagttgaggtacttatcaaacctatgaaaggtctctccacaggtctcaacagcaccattaaccttgccttttagatcaatggaccaaatcgcacttaagtcctgctgtactacagtgtcatcatccaggaataacaccttgctaagcttcgggaagatttcagggagataaaacctcagatgattgagcattgacaagtacttggggttccggaacttgggattttcatcacgcctggcctgcccactcttgaagtagtaatcaatcatagactgtgattctagctgcttcataactggactgtaggtagaattcagccatgtaaactcttcaatgttttgaacctgaatggctgcttcacccaagggattagccaagaaccacatcttcattgcagcatagttaagcctatccgtgacaatgtggaagacatgatctgctggtttcttagcatgaataatagtggagtttacaaccactgcagcagccaacacattatctgagaacaacgcatagtgatagagttttggatcttccaacttttctatatgtgggaattttttattgttggagttggtgtagtagtactcatttgtaagccgcagcggaaggcaatgaagtccttttggtaaagattttgctgctacttgtgctagatagttggtttcctttttatgagattggagtcgctcctctgttgagtgaagggttgcacggagcctgttcagagcacccgagcaactatcaagaattctctttccctttcccaatgtttgctccattgctcttattttgctaagtacattctgaggaagctggccaccactggttgcatcacctaggactctttggatatccctcatccgtgcacgaagctcccttgcaaaaccatgattgcctctagaagctacaaggctcagatatgtcgttgctctcgtcaactggtccttgattgtgcggatggtagcgtctggggaagtagtggaatgaccagcactaacacttgttgggagagcagaattactgttagttgttggtgtgtaagactctttgggaatagcttttgtaacttgttcagacaatctaccagtgctcctttcctgaaagacaatcactgacggttgagtggttgacggaacacatatactatgactgtggataattgattccttttctagggatgaattcaggtttccactagtgtgcgttccagcaatgttgttcacccctgtttcacctgttccatcattctgttcttccacactaacacccaactttaccctatcaaccctttcaccatcccgctcctcacctccgttgatctcccatggttgagtaaacccatctgaacctctgtccctgctgacaacctcccagataacgccatcccgtcccgactgagcagcaccattcccttcagtaatcaccacattggcatcccctgatcctgggtccttcctcgatacacttgcatcggatttctcgaatgccggattcttactcgccgcctcaaccacttgccaatcttcggttgctgatagcacccggttcttgtgctcgcctagcctctcaatcgtcaaatctttggtgagggagacgtcggaggcagccaccaccagattgtactcgccatcccgatccagcacgccgctcgccacggtggagtccgggagggtggagacggagacgggggagccgccgtagaggacgaggggcgcgagcaccgacgagaggaggagcagcagcaccacgcccctgcagcgccggccccgcgccaccgccaccatgggctccccaattcccgccgcctccctgcacttcggagagcacgcgcgcctcgccgccgccgccgccgccgcgccgagcgatgcgggaggaggaggagatggcggtcgcgttttgcggtgggcgcaggcgcagcgaaagccgagccgcccgccgtttcctgcagcccgg

SEQ ID NO: 6382 - DNA, 181 bp, Oryza sativa
  Clone ID: PAT_MRT4530_13078C.1
ctaacatacgtacatccttatccaggggaacacatcaatcaccgcgttgcacgcgaccatatacgacgaacatgccagcgcataccgagacgtgcgcagcccatgcgtatgtgcgttgtagtctatccgtaccgtatgtgcacgagcgcatagtcctggcctgcacacggccctatgcgtg

SEQ ID NO: 6383 - DNA, 877 bp, Oryza sativa
  Clone ID: PAT_MRT4530_13079C.1
tgcgaagagcacgggcaaaactagggtttcgggttgtctcgcggaggcggagaggccgcaatccctcgtgctctccgatcctccggagcccccgccggccacggggagctcgccgatccgatcaaccggggttccggcctccggccccgcttcggcgggaggtttactcgtatccgcttcccctaccgtctcgtctttgcatttccgctcgcttcgatttcgccgtggcttgatgcctctgatctctctcgttttgcttggattttgccgttggcccgatgatgattgcgatttagaccctcgcgaatcgatcgattggttggttggttgatggatggatagatagatcggctcggatttgaggctcgccctttgcatctgcaagcgggttgaggtcccgagaatggctagtacggcgttggctcctcgatgatctgggcgctgaaacatgctgggggggtcggagaggcactgacatgtgggcccgcccacgcggcaggaacatggtttactgctgcttctgctatactataaaacctgctctttttctttcttttttctcctcttcctcctcctcctcctcctctcttgccaccgctgcggcgggtcgtcgtcgtcgtcgtgcatcatcatcatcgtcctcttctgccgtacccttgagacatgctccagtgccagcgtcgagggccgccgcattagcctaagatggaaaacgaagttgtgaaatctgagggccaattggtaatacagacaattacgcagactatgataccaaaacaaaaaaaatgccgacgtgatcattacacaaaatataaaaatcaaaaactcatgacaacaacaaatgaaaaataacaaaaaacttaaaaaaaaaaaaaaa

SEQ ID NO: 6384 - DNA, 290 bp, Oryza sativa
  Clone ID: PAT_MRT4530_1307C.1
acccaccatagaagagacaatcaacatacaaggaacaacagaagtcacaacatacaagccaacatacgctaagacaagacgtcggatattgacttcggggataagcacggctagtcccctacggtgtctccggatactgtcaagagagacgaaagcgctatctctgatctcgtcgggcacggactcgaggaggaagactaccctgttgtcgactacgagtcagaccttcagaccgccgtatcgacaacagttagataggctaccccaaatattatactgttttgattatg

SEQ ID NO: 6385 - DNA, 1451 bp, Oryza sativa
  Clone ID: PAT_MRT4530_13080C.1
atgaagatcacggtgcattcatccaaggccgtgaagccggtgtacggcgacgccgtggccgctccgagcaccgccgacgttgtgccgctcagtgtgttcgacagggcgaactttgacacgtacgtctccgtcatatacgccttccgcccgccggctccggccaactccgtcctcgaggcgggcctcgccaaggcgctggccgagtaccgcgagtgggcgggccgcctcggcgtggatggcgacggcgaccgcgccatcctgctcaacgacgcgggcgcgcggttcgtcgaggcgacggccgacgtgacgctggacagcgtcgtgccgctggagccgacgcctcgggtgacgagcctccacccgagcgccgacgacgacggcgccgaggcggaggtgatgatggtccaggtcacgcggttcgcgtgcgggtccctcgccgtgggcttcaccgcgcaccacatggtgtccgacggccgcgccaccagcaacttcttcctcgcgtggagccaggccacccgcggcgtcgccatccaccccgtcccggtgcacgaccgcgcctccttcttcacgccgcgcgacccgccacgggtggactacgagcaccgcggcgtggagtttaagacttgcgaaaagctcgacagaaacgagaacaacgacgacggccatggacacggccacgacggcgaggtggtggtgacacacaaggtgcacttcagtagggagttcatctccaagctcaaggcgctcgcgtcggccggtggcggccagcgttcgtacagcaccctgcagtgcgtggtggcgcacctgtggcgctgcataacgatggctcgcgggctcgaggggagcgtggccacgagcgtgtccatcgccgtggacgggcgcgcgcggatgagcccgccggtgctggatggctacacgggcaacgtcgtgctctgggcacggccgaccgccaccgcgcgggagctcgtgaccatgccgctgcagcacgcgatgggtctcatcaaccgggcggtggcacggatcaacgacggctacttcaagtcgttcgtcgacttcgccaactccggcgcggtggaggaggagcggctggtggcgtcggccgacgcggcggagatggtgctgagcccgaacatcgaggtggacagctggctgcggatcccgttctacgagcttgacttcggcagcggccagccattcctgttcacgcctagctacctgccggtggagggtcttctcatcctcctgccatctttctccggcgacggcagcgtcgacgcctacgtgccactcttcagccacgacatggacaccttcaagaactgctgctatgtactccctgaactcagctaattctgctggcggtcttggtcgttgactgcacgaagtgtcccatcttttttattgtgtctttcaaatcgtctattcatttctctaaaaaaaaaaaaaaaaaa

SEQ ID NO: 6386 - DNA, 1001 bp, Oryza sativa
  Clone ID: PAT_MRT4530_13081C.1
gcacgaggctcctcgccgtctccggggtcgtcgtcgtctccttcctctcgccagtgccaccacagctcaagcgtgatccagcgtcgggccgcgcgtgcgagcgagcgagcgtgcgagatgtcggccgccggggaggaggacaagaagccggcggggggagagggcggcggcgcccacatcaacctcaaggtcaagggacaggatgggaacgaggtattcttccgcatcaagagatctacgcagctgaagaagctgatgaacgcctattgtgaccgtcagtctgtggatatgaatgctattgcattcctatttgatggtcgtaggctccgtggcgagcagacccctgacgagctcgagatggaagacggggacgagatcgacgccatgctccaccagactggaggctgcctgcctgcctagaagcttaggagttcttgcagcctcgtaaaattgtgcctttagtaggctcaatatctagaagtacatgaaaaaaaagaagcctaaaagaacttgtgaggctttggtcctgtgccatagctgaaggacattagaagagctttgtttggcaaaaatattttggtacttcggctgttatgactcgtttatccataccctaatatgtccatcgttgctggtgcttggcatgttttcttttgcatcaaaaaaaaaaaaaactgctgtgtgtttcgtggcacagcacattttaagtgatttactgctagcttgtaccttttctgtttgtaatattccgatcgtgcagcgagtggtcagataatcgaacctgcaggaggaacaatgaaagcattggcatcctacacctgaagcctcaaggtatggttaaaactgcaacttgatgaggagcttctcgtctctgctgtgttctgtctgttgtgcttaaggagagcaaagatgagtgattagagaataagattgaggtatgttgtgggcatcagcccattttttatgtgtaaaccgattccttaaaaaaaaaaaaaaaaaaa

SEQ ID NO: 6387 - DNA, 504 bp, Oryza sativa
  Clone ID: PAT_MRT4530_13082C.1
atgtttcttgctctcgtgatactcctcgccgtggcggccggctcgtggcaacctgcggcgacctccacgccggcgacggtgagtcctgctcctgccgtatcaccggtggcggcgccggcgggagaactcggcggcggcggcgctggcgcgcggcgagatcaggacagggagttcgtccgcggctgctgcgctcgcacgctctacccgcgcctctgcaccgcggcgctctcgccgtacgccgccgccgtcggctccagccacgcccgcctcgccgtcccctccgccaacctaaccgccggcaccatcaacagcctcggcgggcggatcccgtcaccgtcgaccaccggcaccaccgagtcccccgccggcgcgctcggcgactgcgccgaggccgtggcgtcggcggccgacctggcggcgcgcgcggcggggcggctggacggcgtcgagcgggccgtggccgggcccgaggtgctgtggcgcgtccgcgacgcgcagacgtga

SEQ ID NO: 6388 - DNA, 231 bp, Oryza sativa
  Clone ID: PAT_MRT4530_13083C.1
atggctccatctttaccgctagacccaataaatggccctacacctcttcgatggtacatgaatggtggaaggcaagcgccaaagcagtgcatttacaatataagtctcaaaattatatatatccgacttgagagaaatccgctcgagagaattctgcaagcgcttgagccgaactcggtgccatcggcgacgggattgattgaactagcaaataatcccatcataaactaa

SEQ ID NO: 6389 - DNA, 176 bp, Oryza sativa
  Clone ID: PAT_MRT4530_13084C.1
cccgggctgcaggaattcggcacgaggggattgtgcttcctcatcttgaagtgaaactaaaatacagttgataagatattagtcgattttgggaagttctacattggtagaagttaaatctaactgttgaattcatgtacacctcccattcagaactaggatcacagtggaagcac

SEQ ID NO: 6390 - DNA, 1217 bp, Oryza sativa
  unsure (1)..(1217): unsure at all n locations
  Clone ID: PAT_MRT4530_13085C.1
gnggctgcgccgcagaggtggtgcagccagccaagggcggtagggaccttctgcggatatttaaggagctgaagcaatcagtcgtgtctgactggggcggcgtcaggccgcctttggtagaggaggataaggagttcctagacaaaaagcagaagctgcaggattgggagcagcagttgactagcgcatcacaacaggctgaagcacttgtgaaggctcagcaagatatgggtgaaacaatgggggcacttggattggcattcatcaaacttacaaaatttgagacggaggaagcaatgtatgactctcagaggataagagctgctgacagcaaacgtatagccactgcagctgtcaaagctagccgagcatgtcgagatttgaatacgcaaactgtcaaatatctggacactctccatgaacatctagggataatgctgtctgtccatactgcattttctgatcggtcaagtgcattattgactgtacaaacgctcatgtcagacctggcatcattgcaattgaggattgaaaaactcgaagcagctgcatcaaaaatatttggtggtgataaatctaggcttcgcaaagttgaagagttaagggaaacaataagggctactgaagatgctaaatgctgtgcactaagggaatatgagagaatcaaggaaaataatagaagtgaactcaacagactagaccgagagaagaaggaggatatgcttgagatgataaaaggatatgttacaagccaagctgcatacgctgagaagatcgtggagggttgggagacagttgcagaggagacgagtggatacgcccgaagatctgataacaacatagcgtggtagcattcacaacttttgcccgtcttctcttggttggcacatgtgagtgtgtatgtacaatgtgtaacctaggatggtgaaggccaacagtagaagaaagacagacctaattcaatttgtttttcatttatttaaagaatattggcgtagttcaactatcgggagtacgggcgcacatcgtcacactactgccgtactgcgcatacgattggagctgcctgcctgcttggttaacctccgcaacgtttgttcggcttagtcagcatggttttgtttccctactcgggtcgggttccctcgtcccgaaggccgcctgcccggttatgaagcatcttaaaaggtcgcttgctaaaaaaaaaaaaaaaaaaa

SEQ ID NO: 6391 - DNA, 228 bp, Oryza sativa
  Clone ID: PAT_MRT4530_13086C.1
atggagagaaaaacgcttgcgtcctacgcgttgctgcggtcctgcggctgcctgcttgccgctacagcaatgctaattgctgcgctgcagcatattttggtggttttggacgctgccggaatggaatcagccgcacttgagggaaagctagcgtcgtatagccatggccattggccattgctacagcagaacacacaccgcgccaagctccagggcacgccgctgtag

SEQ ID NO: 6392 - DNA, 930 bp, Oryza sativa
  Clone ID: PAT_MRT4530_13087C.1
tttttctttttttttctgttcggctcagggttgtgcatcatgcaattacatcttaaaaatagacttccttttaacagctacaaagccatcatcactattgccactataagattttttttttttttttttttttttttttttttagatggaagtcacaaagcacacaggcacacagtacgtgcaaaacttgctggtaatcagtcaaatacaacttgcaaagtaacaattagaaacacaagtgttgcataaagatgacaaaatgagagcgcatgcaacatgattccatttcattactcttccataagattttcttcggtctgctgctgagaaactttgaccacgacctttgtcttttgtgttgacagcatggtatccttcttcgggagcatttgaatatcctgttccaactccttagcatctctctccctttgctttgtcttaccctgtttttgcctctctgtaatatgttttttatggcgttcatgtctaatctttgtaataagagggatagccttaagagtttgtgcagtgacattccggtcatagcgctctggtctgttcctcttcctctcaaactcaaaggtggagtcctgcgtcatgtccttcccatgcaagcatctgtatgcttttgtccatttaaccttacgaggattcctcttcatcttaaaatttttatggcattttgaccggcaaaagcggaagatcttggcgtcgttgcggacgaactggatgccgtggccggggtagatggtggaggagcagaaccagcacttctccaacctcatcgcgccccgcctccttccttgccgccggactaccggccctccgaaatcgcagcggcacctagggggagagcagggcggcgccgcggcggggacgagagcgagagagaccggccgacggcgcaagggttcgtgagattccggccgg

SEQ ID NO: 6393 - DNA, 5255 bp, Oryza sativa
  Clone ID: PAT_MRT4530_13088C.1
atggtcgaggttttggaggaagaggtggaggtgcacacccccactccttccgggagtgaggatgccagcgggagtcacgatccgcgtcatcaccgacgcaactctcggactccgcccctccgcgacccctcgcggagggaggatcccgcccgatcgggtggctcggccctctccccgcctctggacgggggaggccacggcacgttagagtgggccgccgcctgacctatcgcgacggtagctcgccccagggcgcggttcaggcggcaggagccctcctgcggcaccctccggtgaacacggagccggaggcccccgtccaacgatagttggacgacgtcgccaacttggtcaccactgcccagcggcagttagccgcgagtggccgttccaccaccacaggtacgtcacgtacctccacctccctgtcatcgtcagcaaagaggagggcccgtcggacagccacagcctcgaggcgatctacggccccaacgtcgtcaggggccttgggaagttggaggcatcacgatggcctctacggggagcaggacgctcaagtcaacatcgagcgtcgccgagacgagcgccgcgatgcccgcatgggagaaggcgcctcctcgtctggagtgccgcgttcctcctcgcgcggcggccagcccctcacgttcacccttgggggaattggttgtagggccttcgtggctagtctccggaacgtccggtggcccctgaagtttcgccccaacctcacggagaaatatgatggcagcatcaatccctccgagttcctccaaatttataccacgatcatcgtggcggcgggaggggatgaccgggtcatggcgaattatttttccatggctcttaagggtcaggcgcgcggctggctcatgacccagccccccgacaccatccactcatgggaggacctgtgccagcagttcatcacgaacttccagggtacatacccccgtccgggggaggaggcggacctacatgctgtgcagcggaaggacgacgagtccctccgctcatacatacaacgcttctaccaggtccgcaacactattccgtgcatcccggcccacgcggtcgtttatgcatttcggaacggcgtgtggcacaaccgcatgctagagaagatcgcctccaaggagcctaagaccaccgccgagctcttcgagctagcggacaaggtggctcggaaggaggaggcgtgggcttggaattcccccagcactggtgcggcggctgcggctgcccccgagactgcccctcgctccaagcggcgggacatgaggggcaagcggaaaccggcccgctctgatgacgagggccacgtccttgcggctgatgggtcttcgcgggccccgcgcaacgaaaaggccaccggtggcaagccgagctccaccgccccctccggtgagggtcgatcggcggacaagtggtgctcagtgcacaatacttatcggcacagtctcgccgactgccgctcggtcatgaacttggccgagcggtttcggaaagccgatgaggagaagcggcagagtcgacgggagggcaaagcccccgcgacccccaccaatgatcggcgagaggagtccaagaagaaggcccccgccgacgatggtgatgacggaactgtcgccactctcgacggggggggggggggggcttgccctcacacctcccgtcgtggattcaaggccatgaggcgtgagcttctggccgtcgtcccgactcacgaggctgcacggaaggcgcgttggtcggaggtgaagctcaccttcgatcagagcgaccatccgacggccccggggatgaagctctagccatcgctgccgatcatcggtgtgactctggggcacacgtggcctctcggccacgttgagctcctagtaaccttcggtgactccaccaacttccgtaccgagcggatcgacttcgacgtggcggacctcaatctgctctacaacgcggtcctgggcaggcctgcgttgctgaagttcatggccgccacccactatgcctatctccagatgaagatgccgggccttagtggccccatcaccgtctttggcgatgtcaaggtcgccctcgcctgcgcggagcagcacgccaacaacctggcggtggccatggagccgcaggccccggtggcctccgcgtcccgcgcttccaagaagcgcctcaccttggctgatgaggaaagcgcgctcgtctccttcctgcgggcaaactccgacgtcttcacatagaagccgtcggacatgcccggggtaaccagggaggtgatcgagcatcgcctcgccgtgcggccggacgcgcaacccatccggcaaaaagtgcgacgtcaagccccggagcggcaagccttcatccgagaggaggtggcgcggctcctggaggctggcttcatccgctaggttatccatccggagtggctggcaaacccggtggttgtcccgaaggccaacggcaagctccggatgtgcatcgactacacagacctcaacaaggcatgccctaaggatcccttccctttaccacacatagatcagatagtcgactccactacggggtgcgaccttttgtgttttctagatgcctactctgggtatcaccagatccgcatggctagggaagatgaggaaaaaactgtcttcattactcccgtgggcactttttgttattcaactatgccttttggtttaaagaatgcaggccctacttttcagcgtatgactcgtattactttaagtaatcagatagggcgcaatatagaggtgtatgttgatgacctggtggtaaagacgcgccaccaggacacgttgttgtaggatttggccgagacttttgacagtcttaggtccacacgcatgaaactgaaccccgacaagtgtgtgttcggtgtgccggcgggcaaactccttagttttctagtctcctcccgagatggcccctcgttcccggacggcccggtgcccgaagcccccgacccccgggagggccccgaggcccccgtgggagggtgagaggctctgacggttgcccccgaggcctgtcatcccgaactagtccgggatccccccggggccactaagctcgggcgcctcgggccagttgcccctgacagcaaggaccggccccaccgaaaggtgcagcggcccatctactttgtcagtaaggcactccgagacgcgaaaacccgatacccataggcacagaagatgctttacacagtcttaatggcctcaaggaagttgcgacattacttccaagcgcatcgggtttccgtcgtaacgtcttaccctcttggccaaatcttgcacaaccgagagggcaccggtcgggtcgtgaagtgggccatcgtgcttgctaagttcgacctgcacttcaaaccgcgacacgcgatcaaaagctaggttctggatgacttcgtcgtagaatggacaccggtggatgaccctcttccgtccgatcttccctccctccccggagacggtggagacccgagcgccgacattcgcgccgggcactgggttatgcacttcgacggctccctcaaccttcgtggtgtgggggctggagtcacgctaacttcgccaaccagggatgtcctcaagtacgtcgttcggctcgatttccgagccacgagcaatatggcagagtacgaaggactcctcgcggggttgagggcggcggccggaatgggcatccgccgcctcctagtcctaggtgattcctagttggtcgtgaatcaggactctaaggagtaccagtgcaccgacccgcaaatggatgcatacgtccgtgaagtacgacgtatggaacgccacttcgacggactcgagctccagcacgtgccccgacgcgacgatgcaatcgctgatgagttgtcgcatatcatgtcggcgcgagccccactccctccggggaccttcgaggaaaggctcgtgcagccgtcggcacatttggaccccccgagggaccccggcgccacgacctccgccccgagccccgacagcctgcgggcctcggggcccgaggggatcgaccccaacccccctcgtcacgtcgcctggatgactgacatccgggcatatctcgacaataatactcttcctgaggatcgtgcagaagctgagaagcttgcgcgtatctctaagcggtacgtgctcgtagaagggaccctcaaccgacgggccgccaacgggatactcttgaagtgtatttctcgggaacagggcgtcgagctcattgctgacgctcatgaggacatccttggaccgttcaaagcggctcgaggcgggtatcagcacctgtatgtcgccatcgacaagttcaccaagtggcccgaggcttacccggttgtcaaaatcgacaagcattccgcccgcaagttcatcaggggcatcacgtcccggttcggggtgcccaaccatatcattacggataatggcacccagttcaccagtgagctgttcggcgactattgtgacgacatgggcatcaagctatgcttcgcctcgcccgcccaccccaagagcaacggccaagtcgagcgagccaacgcagaaatcttcaagggccccaagactaagacgtacaatgtcctgaagaagcacggggattcgtggcttgaagagttgcccgctgtgctgtgggcaaaccggaccactccaagtcgcgccacaggagaaaccccctttttcctggtgtatggcgccgaggcggtcctaccttcggagctttccctgggttcggctcgtgtcacgctgtacaatgaggccactcaggatgatctccgctgcgatgatcttgactacttggaagagcggaggaggtgcgcggccctgcgggcggcgcactatcaacaaagcctgcggcgctatcatcagcgccacgtccggacccgatcactacaagttggcgacctcgtcctacgccgcgtacagtcgcgcttggggctaagcaagctctcaccaatgtgggaagggccatacaaagtgatcggcgttccccggctaggctctgttcggctaaccacggaggatggcacggagttgcctaacccctagaatatcaaacacctccgccgcttctatccatagcgtcgcaattttttgctttccaggagctcgggccaacccccgcacaacccctcggcttgtgcaggcttggccgggggctaccactgtgaattactttgtacctttttccctttccaagcaataaattttttcccacctaaa

SEQ ID NO: 6394 - DNA, 1654 bp, Oryza sativa
  Clone ID: PAT_MRT4530_13089C.1
ggcaaaaatctagcattcgtagaataaattacgattaaggttgtgcaatatgcaatttaatcttaaaaatagacatccttttaacagttcacaaagccatcaatactattgatactataagatagctggaagtcacaaaccagacggtcggtgcaaaactttgctggtacccagtcaaatacaccgttcatagtaacgatttgatgaaacacagtcctacataacaacatgcaaaacttgattccatttcattactcttccataagattctcttctgtctgctgctgggaaactttaaccacgacttttgttttttgtgttgatagggtaaccttctttggaagcatttgaatatcctgttccaactccttagcatccctctcccgttgctttgtcttaccctgtttttgcctctctgtaatatgtttcttctgccgttcatgtctaatctttgtaataagagagatagccttaagtgtttgctcagtgacattccggtcatagcgctctggcctgttccttttcctctcaaactcaaaggtggagtcctgcgtcatgtccttcccatgcaagcacctgtacgcttttgtccatttaaccttacgaggattcctcttcatcttgaaatttttatgacattttgaccggcaaaagcgaaagatcttgggcgtcgttccggacgaactggatgccgtggccggggtagacggtggaggagcagaaccagcacttctccaacctcatcgcgccgcctccgaactatcgccccctcctccggaatcgcagcagcaccacccacgctgctgctgctgctgctgtccgaactagccacaaggagattggagaggaagattgaggcctggtatggctatggggatgggggcgaggccgacgcggcgtcgacaggaggtcgctccaaagaggcggcgttgggggaaggaaaggacacggcaggcaggggcagctccctcacctccgccggatctaacgggaggggaggcggctctccttccgcaggcagcggcgcctctccaccctcacctcctctccctcgccatggggccgcgggagggctcgacggtggcgggcggcgctttcccctccgacggatccaggaggggaggtggtggcggcccagcgtcccagcggccccttccaccggatccagtgggaggggagcagccggcggcccgacatccctcctcctctcgagaggctcgccaacgacggcagccaccatggccgggagaggcgaggatgtgctccaccgcgaccaatcctccccagtcactttgccgccggcgctagggccaatgacggccgagagggcttcctccttagcttcttcacctgccggctttgcggtggggcgagaagcggctgcggccacaactagaggtagtgggggagagggggcgggaggtggcagggggagttgctcccccaccagcatctcaccgctccctttccttctcatcagggtgccgccgccccgctcctcgccagatccggtgggtcgatggctcccggcggcatggcaggtcgacggctccctggccgcttggcgggtcagcttggcgtcgttgcggacgaactggatgccgtggccggggtagatggtggaggagcagaaccagcacttctccaacctcat

SEQ ID NO: 6395 - DNA, 685 bp, Oryza sativa
  Clone ID: PAT_MRT4530_1308C.1
gcctctaattgcctaactttattgaagatggctcctaatatcctttataacttcgaactctcaggcacatgggttaagattatctaggaatataacatatggcgcaaaggaatctgaggggcatctagaacggaatctgagtcacattctatgttctaaaccactcacacagccaaaaaaccacatgcaaattaaacaccacctaaaggcaaatatttaactaatactaagtaataacttaactttccattttccccaacgctgcgcttggagctttagtggtactccggcgggtactgaagacagtccttcgaccaaaaaagagcctacacagtttcaggacgcacggagcttttgtaggcatcaagcatctggtttcccggtgccgtgggcgaaaatatagagctaccactgcttaccatggacatggggatggccaatacattacgagccatcttggagagggttgggaacttaatggtgttaagcttccaccactccaaaattgcaaagtattggatgcggcgcatgagggctttttccaggtattgttccggcttagatattgagggctggcgtcgcgcaatttctgaaagattgattgccaagcctaagagttcatcgccattgggtggggttactgaagcactattggccggaacatgggcatctctgatagcttccc

SEQ ID NO: 6396 - DNA, 1600 bp, Oryza sativa
  Clone ID: PAT_MRT4530_13090C.1
cccctcccccccggctgaacaaaaaaagaaaagaaaaaccctaggccgcctagagagagaaaggaggagaagggttcgccggcggcggatcggatcggcggcattcactcgtcgtctcgatggagtacgcggcgccggcaggggcaggggcagggggctactactactacccgccgtcgcagcagcacaagcctcgccgtcccccgcggcccgccgcccgctgggtcaagcactggatcccgcaggatctcgccacctcctccggcaaatgcgccctctacaagtgggtcagggaggatgtgtacaagaatctcaaggacggcaaggccgtgccggagccggaggcggtgaagcctgaacccaccacggagatcctcttcctctgcagctatgaaaactgtggcaaaacctttgtcgatgtcgccgccttaaggaagcacgctcatgtgcacaacgagaggcagtatatttgtcaggagcctggctgtgggaagaaattcgtagatagctccaagttgaagagacaccaccttattcatacaggacagaaggattttatctgtccccatccaggctgtggtaaggccttctcattggattttaacctgcgttcgcatctaaaaacgcatgcgttggaaaactatcatgtatgcccatttccagcatgtggcaaaagatttacgagtgactccaaattaaaatcccatgtcaagggccatgaaaagactggaactccgatcacagcacaatatgtgccatcatcagataaaccacaaagcagcagtaagcctgcgacaccagcaacaactaagcctacaacaccagcagcaacgaagacgacaacacctgcatcaactaagcctacaacaccagcacccacaagctttgctgagcgaccatatgtctgcccatatgatggttgtgggaaagcctacattcacagttacaaattgaaccttcatctaaaaactcagcatcctgaacatggtcaagaagagaatggtaggattgctgcacatgcaagtgagcatgctgtaaatgatcgtgccaatcagtataactatgctgagattgtcgaccttgcaccgaatccaaaaaggagcaagacaaattcagggcataagaccccctcatctaataaagcctacaatgtcaagatttctagcgtgttgcctgctgatatcagtggagtgaagaatcagtggccaggtaagtatgaagatgacagtgaagagacagaagaagaccagggcaacaacattgaagatggctggagatatggtaaccagaatgccgatgatgaggaaacagaatatgaagattaaccaaacgattctcttttgtcctttactaacatcctgctgcaatatatgcactaactagacagtagacgtggtggctgatacctttactaatctgcgtgcattctgaaccctggaagtagattagagaagtgctgttcttgagagtagtagaatcagatggccgtgattgtgtggtttggtcataaatagtctttgtatgcgacttattctcgttcagttttttatgctcgatctatgtattcaatcataagttgtgttatcatcgttttgtaaaa

SEQ ID NO: 6397 - DNA, 663 bp, Oryza sativa
  Clone ID: PAT_MRT4530_13091C.1
cttgaacttaaaggagtaataaataataaagcggggaaacaagaaatgtggagcatgatcgaccacaaccgaaagtataagacgtcgcgaacaataataaattaaagcggaaaaaaaatttattggaaaaaaaaagaaagcaaaagaaaaagaagtaatatagagaaaaaaaagggaaaaggagaaaattgaacaaaaaaaagggggggaaaatagcgccaccacactacttaccgagcgaataggtcggaaaaaaaaaaaaaaaaaaaaaaaaaaaacggagaaggggtaataaaaaaaaatgagataaaatgggaaaaatagggaaaaaaaaagaaatatatatatatgggggttatttttgatagaatgagaaaaaaaaaaaaaaaaatataaaaaacagaaaaaaaaaatggattaaaagaaaaatagaaaaaaaaaaaaagaaaaagattttggggaatagggataagggaataaacaaaaaaaaagaaaatataagaaaaaaaaaagaggcgaaagggaaaaaaaatagaacaacggggtagaagggaacgagtacaattaaaaaaaaaagagataaaagtggatataaaaaaaaaacctggaaaatcaccagcaaaaaaagagagaacattttggttgagtaaataaataatgatg

SEQ ID NO: 6398 - DNA, 111 bp, Oryza sativa
  Clone ID: PAT_MRT4530_13092C.1
atgaacgcgcagaaccctttaacgcggatggaattcttctgggtcggtgctcccatcataattttcaatggctctgggtcggaatctctcaggccatcggacatcacatag

SEQ ID NO: 6399 - DNA, 140 bp, Oryza sativa
  Clone ID: PAT_MRT4530_13093C.1
ctcgtagttcaatcgcacgcgtcgtgatctaactagccacctcgccacctcgatgatttatcaatagtgtaaacaatattaaattttcatataattgctggtgaaaatgtgtttataactaatcaattgagcagttactt

SEQ ID NO: 6400 - DNA, 413 bp, Oryza sativa
  Clone ID: PAT_MRT4530_13094C.1
caagttcaaggaggatgccgtatgacagtttatctattaattaggaatagtttgttagtttccttttatctttaggaaagtatgtttagtgtccgataaggacttgtatcaactcatgggtataaatatgtacacccggggtctatgtaatatatcaatctatcgatcaatacaactactctcggtgcatcgccaccctctttaccgaggtttttacttgtcttccggcggaaattggcacctgacacggggctgcatcggctttcgatctccggcgaaggggtaagtcctacattccattgggccctggtgaatctgtcatctacgtcggcgtcgttcacggctgcatcgctacgacttcttggatctctctggtttggttgattgatttgcctacctgatatctcaattct

SEQ ID NO: 6401 - DNA, 180 bp, Oryza sativa
  Clone ID: PAT_MRT4530_13095C.1
atggcgacggcgggacgagctccggaaccttctaacggacaaaaggagagggcggcgcacgacggggatggggctccggcggcgtacctcgtcgtaggagggttggccgtggtggacctcggccgcgcgaacccaacggcggcgacggcgtggtgcggcggcgagtgtagcggcggctag

SEQ ID NO: 6402 - DNA, 258 bp, Oryza sativa
  Clone ID: PAT_MRT4530_13096C.1
aactcgtacacacatcttattgccagttcctacgactgactggactgacttgagaaggtgtacaggacaattgccactggcatgaatgtacaaatgactggactgaagcaaccacggaccatttatgtagactggggaaaaaaagccccgaagttacatcgggcaataaatagccttgtttatgtgcacaacccaactaacagaattcggcagctggacaagcggactcagagcttatccatggccgcgatcctgaag

SEQ ID NO: 6403 - DNA, 1560 bp, Oryza sativa
  Clone ID: PAT_MRT4530_13097C.1
atggccatcggagcgttcgtcgaaggaggcggcagtgggtacagtgggcgcgtgactccgttcgtggtgctgtcgtgcatcgtcgccggcagcggtggcatcctcttcggctacgacctcggcatctcaggtggggtaacgtcgatggagccgttcctgaagaagttcttcccggacgtgtaccatcagatgaagggggacaagaagaaggtgagcaactactgccgctttgacagcgagctcctcaccgtcttcacctcctccctctacatcgccggcctcgtcgccactctcgtcgcctcctccgtcaccaggcgcttcggccgccgtgcctccatactcatcggcggctccgtcttcgtcgccggctccgtcttcggcggcgccgctgtcaacatctacatgctcatcctcaacagggtcctgctcggcattggactcggcttcaccaaccagtcgatcccgctgtatctgtcggagatggcgcctccgcagcaccgtggcgccatcaacaacgggttcgagctgtgcatcagcatcggcatcctcatcgctaacctcatcaactacggcgtggacaagatcgagggcgggtgggggtggaggatctccctgtccatggccgccgtccccgcggcgttcctcaccgtgggcgcgctgttcctgccggagacgcccagcttcgtgatccagcgcagcggcgacgtggactcggctcgggcgttgctgcagcggctgcgcggcacggcggcggtgcacaaggagctggaggacctggtgatggcgagcgaggtgtccaagacgatcaggcacccgctgcggaacatgctccggcgtcggtacaggccgcagctggtgatcgcggtgctggtgcccctgttcaaccaggtgaccgggatcaacgtgataaacttctacgcgccggtgatgttccggacgatcgggctgcgggagagcgcgtcgctgatgtcggcggtggtgacgcgggtgtgcgcgacggcggcgaacgtggtggcgatggcggtggtggacaggctggggaggaggaggctgctgctggtgggaggggtgcagatgctggtgtcgcaggtgatggtgggggcgatcctggcgggcaagttcagggagcacggggaggagatggagaaggagtacgcgtacctggtgctgagcgtcatgtgcgtcttcgtcgcgggcttcgcctggtcgtgggggcccctcacctacctggtccccgccgagatctgccctctggaggtgcggtcggcggggcagagcatcgtcatcgccgtcatcttcctcctcaccttcctcatcggccagaccttcctcgccatgctctgccacctcaagttcgccaccttcttcctcttcgccgcctgcctctgcgtcatgacgctcttcgtcttcttcttcctccctgagaccaagcagctgcccatggagcagatggatcagctctggaggacgcattggttctggaagaggatcgtcggcgactccccccaacaacaagtagtcgagctacaccaccaccaccaaagatcatcatcagaataa

SEQ ID NO: 6404 - DNA, 2206 bp, Oryza sativa
  Clone ID: PAT_MRT4530_13098C.1
tttttttttttttttagggataaaaatatatttatctgattatctccaaatgaccgatgtggcacataagattccagcatacaatcagtagcaacttgaataactttccattcaaattatcaagttaaccatctactagatactctcttaaaatagaattctactattgaaacaaaactaaccattaactgagaatagaacaacgaaacaaaggtctgacctatggcaaggcatcaccagatttcttctgatcatcaccttcattctcttctgtaatatcattggtgtcactatgggactcaacaacctgcgcctcctcaacattaacagttgaatcatcattttcaccttccttcttgcgaccaagcactgcctcaattgctgctcgactagccctggcagcagcttcctccttggcctttgcctcggccttcttcctctcctcttcttctttagctaaagcctccgctctagccttctcttcagctgcacgtgcagctgcctctgctttctccctctcaacatcctcatacaacttcgtcatatccccatctctcccatctttctgtagtgccccttccaaaagtgcctttaattcatcgctaaacacaacactctcatccaaaagaatacacttggccatcttaattgcatcatccaacctcgcagcatcaatatacgccctcaacaacagctcatagctaccaatatttggcttgacttccttttctggcatcttatcaaaaaacccctgtgcctcatcaagcctatcaaccttcaccaagccaccaataactttgttaaatgcattggcattaggtctcaagccagcaacgaacatcttattgaagtaagaaacagagtcatccaccctatccaccttaaagtaggactcaattagcaagacataagtgtactcatcagggttaacaccacgctcacccatctccttgtacaattgttccgcctccccaacaagttcattcttcccaagccagtcaatcagattattgtaggagagtgcatccggagcacacctcttctcacccatcttaccaaacacctcaatcgcatcctggaacctttcagcccggcagtatgcatccaccatgacattaaagctccccaggttcacagcaatcctccttggtggatcatgctcctcgcacatcctatcaaacagctggagcgcatcgtccaacttcccattcctcccaagggcatcgagcaccatgttgtaactcacagccccaaacctcaccttcgaaccctccccaagcacctccgcgtagcaatccatggcctctttctccatacccttcaagaagtaccccttcattaagttcccataaaccatcccatcaagaatctgcccaccgccgagcttctcaacaagctcctcgtacagagagaccactgtgtcgccatccccggcgttgacaaagccacccatgacaagggcgtacacctggggatcaggggcaacgaggccacgctccagcatcccatctttgagctcgatggcctgttcaagcttcccattctcagcgagggagcgggcgaggatgcggtaggtggtgggcgaggggaggacgggggagtcgtccttgaggaggaggcggaagtgctcgagcgcggtgtcggggcggcggcagtcgcagtaggcctggaggaggaggttgtaggtggcgacggtgggcgcgacggaggcctgcgtgacgaagcggtggagcgagaggaggtcggcgtagcgcgcctggcggagcagcgcggcgaggacggcgttgcaggtgaacaccgtgggcctgcagttggagtagatggagtggcgggtgagcagcgcggcctcgtcgaggtcgtcctcgcggacgagcgcgaggatgcggcggtggaggtcgaggcgcttgccggagagcgcggaggccggctcggggagcttgggcgcgttggggttggacgccgggcgcggcgcccccggggcgcgctgcggcgccggaccgccgcgtgcgctgggcggctccacgcggaggcggcgcttgcggcggcggcgctcggcggcggcgtcggtcggggtggcctggtcggcgtcggccggggttggggccggggtgggggttgcggtagcgaggcagaggaggcggaggtgggggcggagagggagagggagagggaggaggcgggagaggagcggcttagagagcgccat

SEQ ID NO: 6405 - DNA, 553 bp, Oryza sativa
  Clone ID: PAT_MRT4530_13099C.1
gcacgagatagtatcctactataatgagccatgcaattttttttaacaagaaacagactaacacgaggcacatacagtggtccaataataaaaaaattgcatggctcattatagtatcctactaggcttttcatgctctaggttcattgatatacaacttttctgaatgtgaatgagctccttgaacctggattttggttaggcagattatctgcattatcttttacactattgtatttggttaagtgggttatctatgtgaggccagatgtagtgattggtcttacttgtgatgctaacaagcatgctttcaaaaggtagacatacttacagaattgttcttttggaaaaatggaacatgaactgtgatttaacgctcttatcagtcaatagccatccttttaattgtaattttcatatatagagcagaactacctagcatttccctgatgctatcataacacatgaaactgacagcgaaaattgaagggcctaatatttattttgtcctacaatgttgcactttgtaaaactataaataaaattataactc

SEQ ID NO: 6406 - DNA, 353 bp, Oryza sativa
  unsure (1)..(353): unsure at all n locations
  Clone ID: PAT_MRT4530_1309C.1
ttgggggtttttttttttttttggttttctcttatttttttgtgtttttttttttggagtggattcttgttcaaattctacttttgagactgctcacaaaatttcatttcagttcaaggctagtcctgtgggggcaaaaaggggggggatcccccattgaatggcccccccgccaacacggggggccagatgctggataccggagaaaaaggaggccccccccacgaagggaatttcaggcttgatgatcaattctnnnggacccaacactctagttggggggaggcgacggcgtattggtgatcataacgcaaggaatttgtcgcccgggaggacgctggatccatggactt

SEQ ID NO: 6407 - DNA, 526 bp, Oryza sativa
  Clone ID: PAT_MRT4530_130C.1
cccacgcgtccgctcgacggagcctcctctctcaccgcacgccgttgtctccgtcttgcattagttgttctgatccaactttctcatctcctttcctctactttctttcttcatagcgtgcagcacaagagcccactccggcaagcagtgagcaccacaagattgctgttgctccagcctccatcatgatccaagcaagggcaggaagcattggagaacaaagaagattagttcaacttcagttctttgcggatgcaatttttcaagtttcaagctttccactgttgttgcagaagcaagctagaatcaagtggtttagatttgctttcaagaacgtgtgttgtattttattttattatcgtttggatctgagcgatgatagaatcagttcatcagcacatctgaagtgtccatcatatgtttgtgagaggaatattttcagctccattgtcgtagaatcaatgtaatgtaaaatgaagaatcaatgtaattgagtattttctattaataatagaatggcattttt

SEQ ID NO: 6408 - DNA, 657 bp, Oryza sativa
  Clone ID: PAT_MRT4530_13100C.1
atggctgccatcgcctttgatctgaacgagccacccccacccgagctggacttaaacgagacaattgattggatgagctcactcgatgactgccacgaaagtcctgctcataaactcgattatgatggtgatgaagaaggtagaggtaacgaagacgaagagaatggagatggaggagaagatgtggctggaggtgatgaacaagatgatcaggccggtctggaggcacaagtgcacgccggagatgaacatgcagagggagtattaatgcaggatttgagtttgggtgagaacctgagaaagaggaggtactactcggacgaactaaagatcgccatatacctggtgttgttggcgaaggcagatccacctgtgctccaccgtggcgtttcgaagcaagtcgcgctgaaattcggcgtgcctcttagacttgtgcagcatgtatggcaaaatggtaaggaaaagggatgtgtagacggcgttgtgaacaagcttttcaaaaacgttggccgcaaaaggatagagatagacttggaagccatcagagatgtgccttcgggggagcgtgcaaccctccggcgtctcgctgacgcactaggtgtgaagaagaccacacttcataatcgcttgaaggaagtgaagtttcgttggcgctag

SEQ ID NO: 6409 - DNA, 771 bp, Oryza sativa
  Clone ID: PAT_MRT4530_13101C.1
atggttccagttgtgtgtttggtttatgtggctagcttccaggctgccggtgagattagggacgaaggagctcgtcggcgcgagttgaggagctcgtcggcgcgagcggaggaactcgtcggcgcgagcggaggagaggcggaggcgggtcgcggacgagtggcgacggtcgcgaaggcggaggtcggacacggacgaggcggcggcggtcgcagaggcggaggtcggacgcggacgaggcggcggcagtcgtggatgtggcatgggcggtcgcggaggtggagggagcaggcggaggaggacagagcggcgccggaggagggagcaagcggaggagggacaggccgcggtcgcggaaaagcagcggccggtcccagaggcgaggcgaggcgcgggcgagcggcggccggtcccggaggcgaggtgaggcgcggacgaacggcggcggtcggtcgcggacaaggcggcggccggtcgcgaaggcgaaggtcggacacggacaaggcggcggcggtcgcggacgagcggcggcggttgcgcggaggaggacggagcggcgctggtggagggagcaggcggaggagggacgagcggctgtggcggcgccgcggcggagccgagcgggaggctgcgggagttgacaccgttctctccgtcgaagtgggatggattggtccggccgattttggtggaccatttcgtcccggatctgagaggaatattcctctccagggaccatcccatcccactcacctctcaaccaaacacccc

SEQ ID NO: 6410 - DNA, 668 bp, Oryza sativa
  Clone ID: PAT_MRT4530_13102C.1
atggttccaattgtgtgtttggtttgtgcggctagcttccaggctgctggtgagattggggacgaaggagctcgtcggcgcaagttgaggagctcgttggcgcgagcggaggagaggcggaggcgggtcgcggacgagcggcgacggtcgcgaaggtggcggcgggcgtggacgagcggcggcggtcgcggagacgaggcgaacgcggacgagcggcggcggttggttgcggaggcggaggtcggacacggacgaggcggcgaggcgaggcgtgggcgagcggaggccggtctcggaggcgaggcgaggcgcggacgagcggcggccggtcccggaggcgaggcgaggtgcaaaggagcggcggcggccggtcgcggaggcggaggtcggacacgaacgaggcggcggcggtcgcggatgagcggcggcagtcgcgcggaggaggacggagcggcgctgggggagggagcaggcggatgagggacgagcggccgtggcggcgccgcggcagagccgagcgggaggctgcgggagttgacgccgttctgtccgtcgaagtgggatggattggtccggccgatttcggcggaccatctcgtcacggatctaagaggaatattcctctccagggaccatcccatcccactcacctctcaacaaaacacctc

SEQ ID NO: 6411 - DNA, 807 bp, Oryza sativa
  Clone ID: PAT_MRT4530_13103C.1
gaggtgtttggttgagaggtgagtgggatgggatggtccctggagaggaatattcctctcagatccgggatgagatggtccgccaaaatcggacggaccaatccatcccacttcgacggacaaaacggcgtcaactcccgcacgcagcctcccgctcggctccgccgcagcgccgccacggccgctcgtccctcctccgcctgctccctcccccagcgccgctccgtcctcctccgcgcgactgccgccgctcatccgcgaccgccaccgctcgtctgcgaccgccgccgcctcgtccgtgtccgacctccgcctccgtgaccggccgccgccttgtccgcgaccgaccgtcgccgcgaggcgcgctcgtccgcgcctcgcctcacctcgcctccgggaccggccgccgctcgtccgcgcctcacctcgcctccgggaccggcctccgctcgctcgcgcctcgcctcgcctccgggaccggccgccgctcgcctgaccgccgcctgtccctcctccgcttgctccctcccccggcgctgctccgtcctccttcgcttgctccctccacctccgcgaccgaccgccgccgcctcgtccgcgtccgacctccgcctccgcgaccgccgccgcctcgtccgtgtccgacctccgccttcgcgaccgttgccgctcgtccgtgacccgcctccgcctctcctccgctcgcgccgacgagctcctcaacttgcgccgacgagctccttcgtccccaatctcacccgcagcctggaagctagccgcacaaaccaaacacacaattggaaccat

SEQ ID NO: 6412 - DNA, 816 bp, Oryza sativa
  Clone ID: PAT_MRT4530_13104C.1
ggggtgtttggttgagaggtgagtggaatgggatggtccctagagaggaatattcctctcagatccgggacgaaatggtccgccaaaatcggccggaccaatccatcccacttcgatggagagaacggcgtcaattcccggagcctcccgctcggctccgccgcggtgccgccacggccgctcgtccctcctccgcctgctccctcccccagcgccgctccgtcctcctccgcgcgacctccgccgctcatccgtgaccgccgccgccttgtccgtgtccgacctccgcctccgcgaccggccgccgccttgtccgccgaccgaccgccgccgccttgtccgccgaccgaccgccgccgctcgtccgcgcctcacctcgcctccaggaccggccgccgctcgccctcgcctcgcctcgcctccgggaccggccgccgcttgtccgcgaccgccgcctgtccctcccccggcgccgctccgtcctcctccacctgctccctccacctccgctaccgcccctgccacatccgtgaccgccgccgcctcgtccgcgtccgaccttcgcctccgcggccgccgccgcctcgtccgtgtccgacctctgccttcgcgaccaaccgccgccgctcgtccgcgcccgccgccaccttcgcgtccgtgtccgacctctgccttcgcgaccaaccgccgccgatcgtccgcgcccgccgccaccttcgcgaccgtcgccgctcgtccgcgacccgcctccgcctctcctccgctcgcgccgacgagctcctccgtccccaatctcaccagcagcctggaagctag

SEQ ID NO: 6413 - DNA, 1268 bp, Oryza sativa
  Clone ID: PAT_MRT4530_13105C.1
aaaaaaagaaataccccaagctcaattttcttctctacacaaccgaaaggtggagcgttggcgaaggaccaaccaatttcctctctctaatcgccgcggcgggggatagattgggagtgagcgcgtatggcggaggagcagttcctcgccgtcgcggtggacgccgccaagaacgccggcgagatcatccgcaagggcttctaccagaccaagaacgtggagcacaagggccaggtggatttggtgacggagacggacaaggcctgcgaggacctcatcttcaaccacctccggaagcactacccggaccacaagttcatcggcgaggagacgtccgcggcgctcggcgccaccgcggacctcaccgacgacccgacctggatcgtcgaccccctcgatggcaccaccaatttcgtccatggcttcccttttgtttgcgtctcgatcggtctcaccgtcgggaaaattcctactgttggagttgtgtacaaccccatcatgaatgagcttttcacagctgttcgtggaaaaggtgccttcctcaatggttctccaatcaaaacttcatctcaaaacgagctggtgaaggctcttctggtaacagaggttggaaccaaaagagataaggccactctggatgatacaacaaacagaatcaacaagttactattcaagattagatctatacggatgtgtggctcgttggccttgaacatgtgtggagttgcctgtggtaggcttgatttgtgttatgagattggatttggtggcccctgggatgtggccgctggagctctgattcttcgggaagctggtggttttgtttttgatccgagtggtggggagtttgatctgatggcacgaagaatggcaggatcaaacagctatctgaaggatcaattcatcaaagaattgggagatacaagttgaacaacatattcctcaacatgaagtagaataagaatataagatcgccctgccaattttattggggcaaattttctttctagtggttctgcataaacagcatgcctgttgcggaaaagttttggacgcagtatggcattgtattgtttgaaacttttttttttttggcactactatccggtgttacttcggaaactagtgcatcgaagattcgaagtagcttaatcagaattttgaaccgaatgttcagatggattgtgcaatgtgcatttcccccatgatttcgtctcctatgcacattatgtggaagatgttccaaaataatattatcagttataacc

SEQ ID NO: 6414 - DNA, 490 bp, Oryza sativa
  Clone ID: PAT_MRT4530_13106C.1
ccctcttttctttcttctttcttacaggagacacacgaggaagggaagtaacgttaagctagcactagacgcggccgaaaccgcatcaatcaaggatgcacacacatgccagcatggagacagatagaccttatcaagatcatacttttattccataatagcggcagatactactaaaacagggagacaaaatctggtacgaatgaacacatagacccaccgctgagcttttgaatgcatataaaggatacagccgaacgataagccacttcaccctggagcagaacttggaagagccactggcggagagaacgctgacgccgaagttataggtgtgctggaagcgtagcaggcgttgagcccctagatgccgcgctccgggtactagaagcatctgtacggggcgcgcctggcacaggcgcagcagggtggggccttgagggtgcagaggccgatgaaggaggccgccgtaagcccggggccgccttgt

SEQ ID NO: 6415 - DNA, 575 bp, Oryza sativa
  Clone ID: PAT_MRT4530_13107C.1
ggacaaaaatgtaacccctgatttagccatataagggtttccttttttttttaaatggggacaaaaaaaagcagtataaattttttttcactgatttcaggacccttttaatttggatttgcccatgcttcacgggggggttacaaagttgcaccccccccttttcctactttttttttaaaccggggtccaaaacgggtttttatgtcccccggggatacaaaaaaaggggcctaaactacaacattgttttggggggggtccatttttgaactacatgctgggggctacttcttaaagggggggtcccccccacggccctgggccttggataactgaataaaggggtaaggggccccctccattggaatgccccgttgcacaaagggtttgccaaaataaagggggattttcccaggggcccccccaacggtttcgaaaaaaggattgggcatttcccctgggccattggaaatgccaccccatataacaataaaaacccctgggaaaaaaaagggttttcttttaatttgggccctgtctttttggggggaaaaaaaggtccccccacaaaa

SEQ ID NO: 6416 - DNA, 357 bp, Oryza sativa
  Clone ID: PAT_MRT4530_13108C.1
atggagcggcagcggcgggtggaaaaggagctaggtggcaaaatcaaacagtgcggcgacgaggaatggttgcgtgccctgagcacaattccgaagggagacggcgcgcggtggaaggcatcggtcatcgaggaagatgggaagcgtgctccacaccgcctctcctcgtcgccgctgctccacgctgccgctcctcttccctgctccccatcgtcggtggaaggtgtcggcggaaaccggtccacaccgctgctcctcgccccctctgctccgtggagccatcctcgtcccagttccgcgctgccgctcctcgtcgttggtggaaggcgtcaacggaggcgccgcgagttaggatga

SEQ ID NO: 6417 - DNA, 672 bp, Oryza sativa
  Clone ID: PAT_MRT4530_13109C.1
gacgcggaggtgccgcccgttgtgcccggcgtgtgcgtgccgccggcgccgccgacgcagcagcaaccgggggcgggattgggggcgggcgacgtgcgggtgttcggcgatcaggacgcggatgtgccgccgcccgttgtgcccgagctgtgcgcgccgccgccgccgccgcagccggtggcggaggtgcagatgcgcggcgaggaggttccggtgatcgccgtgccggcgccgaacgaggagagggcgatcgtgctgtacaagccagacgacgccgcccgcaacctcctcctcggcccactccgcccggaattccctctccgcgtcagccccgattggatccacggcctcaagagcaccgcgctgcgagaggcgagcgaacaccgtgctctgttcgaggagctagccatggacgagacctccaacctggccatggtaccatgggttcccgtgccctcaaactcccaggaagcctccacgtcggccgccgcgacggcgacgacgacgacggagatgatggacgccgaggacacgtccatggaggtcgagcaggacgggggatcgggaggatcccacctcgccgccgccggcgaggcgccctactaccagtggccgcagcactgcatggcgccgccgccgcagccgccgctcccggcgcgcagtggagactga

SEQ ID NO: 6418 - DNA, 297 bp, Oryza sativa
  Clone ID: PAT_MRT4530_1310C.1
aatgtaaataaacttaattatattaatggggttttttttttttggggggtttttttttgggaagttgaaaaccaaagttttattagaagttggtaccggcaaaaaagttagcaccggcctttaaaaaaaatgcgcacgtacggatggggggattaagggttctacaaagaagacaagggggggggtccagagggattccaaactggtaccgggatacgtacaaacagccagaatgcacgatcgatcatgcgttgggttgcatgcaaagtccgtacgtaacgtagttgcaaataaaca

SEQ ID NO: 6419 - DNA, 300 bp, Oryza sativa
  Clone ID: PAT_MRT4530_13110C.1
atggctgctgcggcgtcgtctcgccgaggaagatggatgggcgacgaggaagacgagagtagcaccgccgccgtctcccgtctcggctgcggcgatcggtgctacctcatcttttgccttccgctccacgtcgggccaccgttggggagaagcgcgaacgtcagggggagtggcgacgagccggcccatggcaacgagctcgccagcgacgcgccgtcggcgctgctccgccaccgctctcgcccgccattgcagaggccgcaggcgcaagaggcgggccgccatcgatggaggaggtaa

SEQ ID NO: 6420 - DNA, 192 bp, Oryza sativa
  Clone ID: PAT_MRT4530_13111C.1
atggcggtggaccacgtgctcgccgcgctctgcaacctcatggcagcatgccccaagggccgccgcgcgatgagccacgaacccgacgggagctcgccggtgctgggctcggagggaggcagggagggatgccggattgggagcgagctcctccctgtcggcaagctggaggatgaacgagaaggaagataa

SEQ ID NO: 6421 - DNA, 329 bp, Oryza sativa
  Clone ID: PAT_MRT4530_13112C.1
cccacgcgtccgagttgggctcctttacgatgcaagttcttcatttgattggtaattaataacagatggttggcttcggatcggctagtctcttccacagccgagtgcatgccatctttgagatcaaagtgatgaaactatacaacacatacaattgtctctcgtgtcttttgcaagctgtgtgtacttcccttctcttggagatggggttgcgctggggttgcatctcagccaacgacagttcatttttcaggttggtggtgtgtaaagccatcaatgaagtttcaaaagagatgcgcaaaggactaaactcattgattattctagta

SEQ ID NO: 6422 - DNA, 462 bp, Oryza sativa
  Clone ID: PAT_MRT4530_13113C.1
atgatcactggtgatagcaaccctgacaaggaggttgaatcgatagcacacagacttggatgtgtactgatattggcagtatcttctggagtggaggaacacacaacacaaggtgttctgatttccccgttggcggtggggacccactccaacaggtctgggcccgggaccgggtctaaatgtccacctatggggcagtcggggcatgacctgcatcttgagcagggcttggggaagcacctcccagtttgccaccgttcttgtgttgtcttcaccgacagttccaaccccggttgggggtggggactcacagtggccagggctagagcaacattgagcccgagttggagatggggccggggacaggtgaggaagtcgagtgtcagggaagagggcattctggcccaacccatccctcaccagccctgttactacccctactcaacaccgacaactctataa

SEQ ID NO: 6423 - DNA, 957 bp, Oryza sativa
  Clone ID: PAT_MRT4530_13114C.1
cccacgcgtccgcccacgcgtccgacctgagattaagaaggaaatcaaggaaagccgaatcaacgttacatcaaaagtggtgaattacataaataatgccagtggtgatgctcggccctcagttttcgtgagcgcaacagccattggcttctatggtaccagtgagatcagtagcttcgatgagtcaagtccgtcaggcaatgactatctagcagaggtgtgtcgagagtgggaggccagggcatgccaagtaaaccaagaggatgttaggcttgtgcttcttcggattggggttgttctcggcaaggacggcggcgctctagccaagatgattcccctttttatgatgtttgccggcggccccctggggacgggacggcaatggttttcctggattcaccaggacgacctggtggacctcatctacgagtccctcaagaacccatcatataaaggcgtgataaacggaaccgcacccaacccggttcggctgtcggagatgtgcgagcggctggggcgagtcgtcggccgcccctcctggctgccggtgccagaaatcgccctcaaagcggtgctcggagaaggtgcatcagtggtcctggaagggcagaaggttcttcctgtgaaggccaagcaactgggcttctcctaccgatacccctatgtacaggatgcactccgggccattgccagggacctatgactgatcgactcagatgaatactcaaatcgatcgatccgccgtgcacgcacaacagtagatatcaaaattgaaatatattatatataccaaaagcaaactattattgttgttggcttgtattatctctgattaaactaggccatacgtttcattggatggcgtacgtctttccaccatttttagactgaagcaaatatatgcacgtgaatgaatgagtatatatttaaaataaaaaaaaaaaaaaaaagggcggg

SEQ ID NO: 6424 - DNA, 588 bp, Oryza sativa
  Clone ID: PAT_MRT4530_13115C.1
atggactggcggccggacggcgcggcgccgccggttccggtggcggcggcgcccgtcgtacctgtggatttcacggtggtcaagaggcggctcggtggcggcggcgacatggaggtgcgcgacgcgtcgggcggcctcgcgttccggttcgtggcggcggcggcggcgggcggtggcgggggcgggggcagggcgctgctcgacgccgccggtggtgttctcgtcaccgtgaggagcggcgaggtgatgggagagtggcaagcattcagaggaaacagtttggattataaagacataatttacacggcaaaatcaatatcagtttgttcaaatcgaaatgaagtacatgtattcatgccaccaagaagcaattttcaagatacgaaagcaagctacaggctcataggaaatacatcccggagagcatgcacaataataagtggggactccattgtttctcagacaaatctcctatataaactcaagaaggttgtctattcaacacggaagtttagagtgaccatttacccaggaaatgatacacttcttgtcatggcaatggttatgaacttctttatggaaaaatga

SEQ ID NO: 6425 - DNA, 480 bp, Oryza sativa
  Clone ID: PAT_MRT4530_13116C.1
catgcactccaaataggaggactgaatgcccagttcaaattaatttcaagttttcaaggtgaaagcagaagatcagattaacaaaaaagtgaagaacacgcccgaaaaagtgaagaacacgttatgctggagtggaatgtactaatttaagtctacagtagcaaatctcgctacaaatcatgcactcgcacctcaggtttcatttatatagtgccagaaaaggatgaagctacaagtttccaactagttgtacaagcatacattgtgaggatgaataggatgccccatgtttcagacctcgcttgcctttgtacatgcactctataaggcagacctccgaaatctgtttgttactctctggtgaagatcagaaagggccacagcaattttagcaccaacaagagcattgttctttacaagcgcaatattggcttctagcgaagatcgtccagttagtactttcactctgtcaagcatgaa

SEQ ID NO: 6426 - DNA, 240 bp, Oryza sativa
  Clone ID: PAT_MRT4530_13117C.1
atgcataccagggggggcctcctcctcctcctcctcctcacctgcatcctgcatgcatgcaaaaagcaggagaaggaatcaaggaatcaaaatgaaacatccatgcaggcttcagccccatcatctcccccatcttttgctgaccaggtggctggcaaaaattgcaatggcaatggggcaatcacgcaccgaatccgcctaaagagatgggggaaaagaaggggaggaaacagcagctga

SEQ ID NO: 6427 - DNA, 530 bp, Oryza sativa
  Clone ID: PAT_MRT4530_13118C.1
ttttctacgtggtgccgctcgacaaggccaccgggatgacgcgcccgctcgtcgagatcctccgggacctcaacaagcgcgtccccgacaagatcatcgaccccgacaccaacaccgtcccctggtcagtgctgctccccatccccccttcgatctcttctcctgcccgttccgctcttgcgctgcagaatgatccggctgatgttgcaataggatttaggcacagcgaagttatcgaattgatagggtgaatgaatgcgcgacatgaatcattttggggattttgctggagcaattatcgcaattcaggaatttgggagtaaaggtggtgccattttttcacgtatcgcattggatggaagatttagctttgctttcaatagctaatgaattttccaccggcgcgaacaattcgatcggttttgccttgtgttaattacaaaatgttctacctctaccatccaagggccaaacagggggcacgttttatcaactatcgatgagtatgggtccactggatattaggatga

SEQ ID NO: 6428 - DNA, 119 bp, Oryza sativa
  Clone ID: PAT_MRT4530_13119C.1
cgccagagcgcgaggagacgcacacatagactaggcattggtagagttgtcagattgatacgatagcaggcgatgtcggcacaggcaggagctgtttccgtgagggagagatgtgtaca

SEQ ID NO: 6429 - DNA, 2191 bp, Oryza sativa
  Clone ID: PAT_MRT4530_1311C.1
atcagttactacttcaaaatattattcgaagttttgaaattcaaatttttaattgataaaaagaaagtcacaagaaaaaatggccaaaataatagcacgccacctcctcgtagcagctgctctacggcatgtggcgacgtgaagatctcgtatcctttcgggttcgaggccggctgctcgtggcctggcttcgagctcatctgccgtgacaccatcaagggcaagaagcccttcctgccaccggtcacggagagcgttggatacttggagctggagagcatctctctgctcgatggtaaggcacgggtgtggaacaacatcagctcctatactgctacaacagcgccactaaagggatgacaaatgagtccagcgacacggtctacctccccggccgaggcatacaggctctccgacaccgagaataagttcataatcgttgggtgctacacggtggcgtacatcacagcgtgctcggcgttttgcgggccgaaaggcaataacttgacgagcctaatggatggcgcctgctccggcacaggctgctgcgaggccaccatcaccgagggacacacctcctacaatacgatgtttgatccggactacaacacgacgcagatctacaatgttagcagctgcagctatgcggtgctgatggagtcatcaagatttagctttcggaggagctacgtgatgaattcatcgcagttcatcgataccaacggcgggcgggtgccaatggtcgttgactgggctgtgcagaacgcgagcaattgcgtggaagcgcagaaagatcatgactcctacgcgtgcatcagcagcaacagcgtgtgcgtcaactcgtccagcggacccggctacatctgcaactgtactcatggataccaaggaaacccttacctattacacggctgccaagatattgatgaatgtgaagaacatgagaattaccattgctacggaacctgcaaaaatatactaggaagtttcgaatgttcatgtcctgcggaatcccgaacgaaaatcggggcgttacaatgtacgtataacgtctgttttttgctgtatatcatttcttgtgatccggcacagacagaacacaaaaaaacaagctctattaagacagacagatgaattttttcaacaacatggaggtcagctactgctagaaatgatgaaggtagagggcaatgttgggtttaccctctatgagagagggcagatcgaaactgcaacaaataacttcaacaaggcacacattgtcggggagggaggacagggaacagtttacagggcagagatagatggcactattgttgcgataaaaaggtgcaaggagattgatgagagcaggaagatggactttgtacaggagctggtcatactttgtcgtgtcaaccaccctaacattgtcaagctacttggttgttgcctacaatttgaggcacccatgcttgtctatgagtttgtgcaaaatagaacacttcatgagctattggacttccaaaggaacaggagttgccatgtcactttgggaacccgcctgaggattgccgccgagtctgccgatgcgcttgcgcatctccattcgttaccacacccgatactccatggtgatgtgaaaccagcgaacatactactcaccgaagaattggttgcaaaggtgtctgactttggctgctcaacaattgatgagaaaactcaggttgcgcccaagggcacacctggatatcttgacccagactacctgcttgagtatcagctcacagctaagaatgatctgtatagctttggagtaattctggttgaacttctaactggtaagaggccactatcaaaagaaaggaagaccttgacctcaatgtttaaggaggctatgacggatggcacactcattaaactccttgatagtgacattgttaatgaagacaacctgagagtgatccatcaggctgcagtgctagcgagtcagtgcttgattattccaggtacggcaaggccagagatgaggtatgtggcagagcagcttcagcaacttgcatttgcagatgaagtgcagcaagatccacagccaccgcttgtgcttgcgggtcttaggtttacggcagagatggcaaatacacgtacaacatcctcatggcaaactgatagcaagactaccggggtttacagcctcgagaagaatgttaga

SEQ ID NO: 6430 - DNA, 445 bp, Oryza sativa
  Clone ID: PAT_MRT4530_13120C.1
tgccaactcagcatatttacgatcaacttgatcaacagtaccaagggggtgtgcaacaacaaccactggccaatatgattgctgatgtgatgaggggacaatttggttccaagcctaaagacagtgggatcatgtatcggcatccttacccataatattttgacagagtttctttgccgaaccgatacaagattccggatttctcaaaattctcatggctgaataatgtcaccacctacaagcatatcagccgatttctagcacaatgtagtgaagcatcggctatagaggccttgagagttagattttttcccttgtcattgtctaattcatcaggtcttgggttttcctgcttgagccgaggttttttgagttctagttggtctctatcccgagtaatacatgcattttacttaccaggtaccaccacttattatttagtcga

SEQ ID NO: 6431 - DNA, 321 bp, Oryza sativa
  Clone ID: PAT_MRT4530_13121C.1
atggagggcgcacggcgccagagcgctcacctcggaatcgccattgaggacgcaagaaaggcgaacagagaaaaggggattagggtggagaagaaggaaggggacgaaaaagaaaaggggaaaacagtaccggcgcgatttatgacggtttcctcgcgccgcacgccgcatggagcaggcctgtatagcgttgtctatctcccattcgccaaccagtacaaacatgggcccatactccctgcacgggagcaaactggatatatatccatggtccctggtctcggcgcagggcagatacgaaagaccccattaaacgcgtga

SEQ ID NO: 6432 - DNA, 1579 bp, Oryza sativa
  Clone ID: PAT_MRT4530_13122C.1
ggcagcaatagcagtagactaagagtatgtaaaattggcagcttacattcttcacacacatataccattacacattctgcatccatccatgtacgaaacaacatcgaaaatagctccagaaacactctaaatatagacgtaaaaaaagtaacattagctaaaacaaaaccagaaaaaaaaagagatcagactgatcgagtcacaaattacagcgacgagctcgcaggaattttattcagtagtacatgagctgctgctgcgaggggccaacgttggggaagctggcatcatacatggcctggctcacgcctgcacccatccccattgcctgcttcagatgctgctgtgcctgagcctgcatcagcgcctggcttgacaccatcttgctcaaggcgaggctgcgctggtactcgaggagatcggccgccgtcacgctgggagcggcgggagggggcagaggcgccgacgtggtgccgggtggcgtcggcttgttgccccaggaacacttgattggtttaccacctagaatgcgaccgtttcccatctggattgcgagggcggcttctgcgtggttgctgtatctgacgaagccaaatcctttgccaagctggatccggacctcctcaatggccccagctccaagtgcgtggaaaagacgatggagcacatcttgagtaacctcgtgagcaaggtttccaacataaacagttctgtactgtggattgttctctggggcatcttcatttgctttctccttcccgtcttctgtcaaattgttagtcagatcagctacgttttttgaatctgaagtctgctgctcgccattgctggcaccctttgttgcccagttgcagcgtatctgccgacttccaagccattgtccatacctgttgattcctgaaggaaacaaagccataacctctagatcttccagtcttttgatcccacataactcgggcatcactagataccagaaagtagtgcaatttaagatccagataaacgagcaactggaatatccagagaagaatgcaaataatgcggaatcagtaacctctgggatttgctttccattaagtgtcaaaattgataatgcagctgatctgcggtcatagtagtcaacaaagccataagatgacttctcttttcgtataagcttgcatccttcaactaaaccagtactctgaaaaacctctcggagaagtgcctctgtgacttgaacatgaacattgccaacatatacactgcggcatgtactcgtatcaaagccaggaggcagatttccagtaaggattggctctatctgaagaccaatctcaaacaaaattaactgatcaagtatcagaacactgcataaattcggatcactcaaattctcagacttgtattctccaaacaagagaaagaaaaaaggtgtctttgaattccaaattgcactaccctgctgctggggcggcgcggcggcgaggagcgggtggtggtggtggtggagcggcggcggtggcggcatcgcgtacatggacggcggcatcagcgccgccgcctgctgcttctgctgctgctgctgctgcggcagcat

SEQ ID NO: 6433 - DNA, 1030 bp, Oryza sativa
  Clone ID: PAT_MRT4530_13123C.1
agagaggttgggcagtagccatcatcatcatcaattcatctctccaaaaaaaatcagagtagaatctcatcactcaggggaacgccggggatcctctcccatggggtcgttcaaggggcacgtgctgccggggacgctgttcctggcggtgggggcgtggcacgtgtgggcggcggcggcgaggttcgccgccgacccgcgcgggttcaggctgcgcgcctggaaccccgtggacgtcggcggcggcggcgcgccggcgtggctccccgcccacctcgagctctacgtcatcgccggcggcgccttcctcgacatgtgcgtcgaggtgctctactccacccacctccacatcttcgccgacggcggcatcaaccccgcccacctcaacgacctcgagcacggcggcatgctcctcatgttcttcctcttcggcatcctcgccctcctctcccaaaaaaccaggtacctgccgttgccggagggggcgctgtgcctggtggcgtcgacggcgttcatggcggagctcctcctcttctacttccactccaccacccaccagggcctcgagggctactaccactacctcctcgtcgtcgtcgtcgcgctctgcgtcgccaccaccgtgctcggcgccctcctccccgcgagcttccccgtcgacatcgccagcggcgccgccatcgcgctccagggcctctggttctaccagacggcgttcacgctctacgggccctcgctgccggcgggctgccgccgcgacgccgacggccacatcgactgccacacccacgccgcccaggagcgcgccgagcagctcgccaacttccagctgttcggcctcgtcttcctcgtctgcgcctacgcgctcgggtgcttcgccgtcgccgcggcgaggcacgggcaccccgacctggccacgatgcacgccaagcacgtcgccgccatggaggcgcagctcgccggcgccggcgccggcgagggggacaggttcgtcggctctgcgctgccgctggaggacaccgcgatctaa

SEQ ID NO: 6434 - DNA, 462 bp, Oryza sativa
  Clone ID: PAT_MRT4530_13124C.1
atggacggagatgagattagtgcaggtctagggatgactgcacctgatatcaatcggttctatgccgtgactgccgtcgcctgcgcggcggacggcggggctagggcggcgctcggccctccgcttctccggccagggcggcgctcgccccttcgcttctcgcgcgcgacggggccagggacggcgatgttgtggcggtcagtagggccaagagcggcgccatcctctttagcctcctacctcaatgacctcgcggcggcagccgttggggaaccgagaagacggcaggcaccgtcgcgttccagtgggatggccggcgaggagggggccgcggcggctgtggacgtaaccgtgccaggcagcgccgcgctcaccggcggatcccttcccagcggctgcagggaccacggctacacgccccgcctcggccgtcatctactccggccgccctgtgccgcctag

SEQ ID NO: 6435 - DNA, 384 bp, Oryza sativa
  Clone ID: PAT_MRT4530_13125C.1
atggctggtttttttaaatgaaacattctttcattaaattcctatttaccaacactctatacaaaaacatcactcctaaactaattcatacatatcattattaaaaaaatattaccttattcttatatccaaaccaataaaaaattaccacatttctcaacacactaataaatctaactccagaagaaaaaaaacctcaacatatcataattatcacatttaattcatcttctacttctacactattcacaaccaacctttattacctacccactttactcaacaactcttttaaaatcctccccaaacttccatcctaacaaaacttacaactgaaactttttatccaacttactttcacaaatcattcataaccctctttat

SEQ ID NO: 6436 - DNA, 737 bp, Oryza sativa
  unsure (1)..(737): unsure at all n locations
  Clone ID: PAT_MRT4530_13126C.1
ccggccgggggccagccaaaattgccttgctaatcatgggccccacgcatgggcccacccatttctcactccgtccgcctctcctcaagcgtgccgcccttctgcgcgccgccaacaccgttcctccgccgcgccgtcattgccaccggcctctgccgcaagcgccgctcccgtcggccgaccacctccctcgtcgttgccatcggcctccgcgcaagcgccgttcccgccagccgaccacctccctcgctgctaccttcccatcgctgcatgcgccgcacccgccggccgaccgcctccctcgtcgctgccttcccatcgccacacagccgctcccgccggccgaccgtctccctcgccgccgccttcccatctccgccgcataggctccacagcgccttcgctggccgaccgcccccctcgccgccttcccttctccaccacgcgcggctccacaacgcctccgacgcgtgcgccgctcccgccggcagaccgcctccctcgctgccgccttcccttctccgccacgcgggctccacagcacctccgccaccgcacgggttcagccggcggagatgagaggagaagaagaagaagaagaagaacaagaagaagaagagagagagagagagagaggggggtggagaagaagggtgaaaaaactgacacgtgngacccacagttacagtggagaactgtaatagagaggctgntggagtgaaaggcagatttgactc

SEQ ID NO: 6437 - DNA, 609 bp, Oryza sativa
  Clone ID: PAT_MRT4530_13127C.1
atgaattcctcggttggatctgctggaagaatgatggaagaggtagcaaatgaggggaatgttgtccttagtgaaagaagtatgaaagagcaacatagtgacaaggatgatgtttgtgttgaaagagcaatggaacaagtatcaagtcatgatgatgatgtgttgagggaagcactgcttgaaactgggttgtttacaggtgccatgagcattgatcaaattgatgcaggtgatgagtttgaaatacaagatgagtttggacatgaagatggagaaactgaagatgagggggtccaatctcaacctgcagtccctgatgttggtctggtgtctgggttaagacctggtacctgggttttctgggaggtaccagacctagtacctatatttgtgaggcggatacctctatactgtgagaatcggaggaagggatgggagcagcggtgcggcaccgtcgtcatgggggaggcggagggagggaggggagcgacggcgcagcagcgccggcatggggaggcggaggaatggaggggagcggcggcgcagcagcgccggcgtgcgaaggtggaggaagcgaggggagcggcggcgcacgccggcaagctgtga

SEQ ID NO: 6438 - DNA, 210 bp, Oryza sativa
  Clone ID: PAT_MRT4530_13128C.1
ttttctagcctcgacgagcgcttcctgcgactgcgtcgtctcgtcgatcttggttgtgcagccgagttcttctctagtcggtgggtgggggataggatggcagcacgcggaaaggctgatcggtgccggtgccgctaagaacgagacgacgaggagcttcaaggccgacctgcagttccccgtcgggaggatcgccagggtcctcaaggc

SEQ ID NO: 6439 - DNA, 2061 bp, Oryza sativa
  Clone ID: PAT_MRT4530_13129C.1
atgaagtccaatagaggagtgtctttcagcacaaagaatgcagcaagtggaagcaaattcacatcaagaggtagtggaaatagaggtgcattttctagctcaagtggtggtgcacgatctagcaattatggtacttccagtgggaaagatttggctgctccaaatgagaggaaaaatgcagcaaacacatcatctacttcagtgggttcttccaccaagagtagtggaattcaatgcttcaaatgtggtggtcgtggtcatgttgctagagagtgtccaaacaatagaaccatcgttgtgaatgatcaaggagagtatgaatctactagtgaggaagaacaagaagatagtgaagaggagaataatcttgagaaggatatctgtgaatttgaatctggtgctgctcttgttgtaactcaaattttgagtgtacaaatgagtgatgctgaaaatggacagcggcacaatctttttcaaactagagctaaagtgcaagataaagttgtcaaggtgatcattgatggtggaagttgccacaatcttgctagcaaagaaatggttgaaaagcttggtttgaagctgctaaaacatcctcatccatatcatgtgcaatggcttaataattcaggttctattaagattgcacaaagagtaaaagttcctttcaagattggtgaatatattgacaccatggagtgtgatgtggcacctatgacagtgtgtcacatgctgttgggaagaccatggcaatatgatcggtcatctctacattgtggtagaaccaatcaatacaccatcaagtggaagggcaaggagttgattcttaaacccatgacaccgcagcaaattctagctgagcacttgcaaaagagctctgaagtgaggaatgagagtgcaaaagaaggacagaaaaataatttgagtgccccccacaaatcggaatatgaagatgtctttccagaggaaacacctgttggacttcctccattgcgtggcattgaacatcaaattgatctcatccctggagctacacttccaaaccgtccagcataccgcaccaaccctgaagaaactaaggaaattcaaaggcaagtacaagcacttttagataaaggttatgttcgagaaagtttaagtccttgtgctgtccctgtgattttggtgccaaagaaagatggttcatggaggatgtgtgtagattgtagagccataaataacatcactgttcgctatcgtcatcctattcctaggctagatgatatgctagatgaattgagtgggtctatgatattttcgaaaattgatttgagaagtggtttccatcaaattagaatgaaaattggagacgaatggaaaactgcttttaaaacaaagtttgggttgtatgaatggttagttatgccttttggtttgactaatgcacctagtacattcatgagattaatgaaccatgtcttaagagcatttattggaaaatttgttgttgtgtactttgatgatatcctaatttacagcaagacattggaggaacatgttgctcatattcagcaagttttggatgtactcaggaaagaacaattatatgctaaccttgagaagtgcacattttgtacagatcaggttgtgtttcttggttttgttgtttcaggtttaggaattcaggttgatgaatcaaaggtgaaagcaataaaggattggccaactcctgaaaatgtaagccaggtgaaaagttttcgtggacttgctggtttttacaggagatttgtcagaggtttcagcaccatagctgcaccattgaacgagttgacaaagaaaggtgttgccttccaatggggagaaccgcaagagaaagctttccaagaattgaagaaaagattgtccgaaggccccttgcttgtgttgccggatttcactaaaaccttcgaggttgaatgtgatgcaagtgggattggtattggaggcgttctcatgcaaaatggacagcccgttgcatatttcagtgagaagttgggggatcctctagagtcgacctgcaggcatgcaagcttgagtattctatag

SEQ ID NO: 6440 - DNA, 1026 bp, Oryza sativa
  Clone ID: PAT_MRT4530_1312C.1
gcagagaccctcgttaaaacaactctctcttcgatacctgtttatcacctcacagtcctacatcaaaacaaatggctttacaagaagatcgattgtctcaggcgggcttttctttggaagggagacgaccctgaaaaatttggctggaaagatgaacacaggccttggcaaggaatgggacttccttgtaatgatctggatagagtgctgttcagagctggaacagtgattactctgggggatggaagaaaatgctccttttggtctgataactggctactaggacaatcgcccaaggatattgccctagagattttcaggctttccaagataaagatcaacaacgtaaagctcagcttagaaaataatcactggcttgcaatccttaatcccatcacatctatagaggagatagatgccctggtgcggcttggaagctacctgcaggaggtcacgctcaacacaaatgtgccagatgacatcttttggaagtggactgcgaatggagagtgtacaacaaaaagtgcctatgaagcccaattctccggaacaaccacaaacctaaatttctcccctctttggaaggcacaggctgaaccaaaacaacgtttctttggctggctcattttacatcaaaaaactctcacatcagagaatttgttaagaagacatttgccttgcgactggatctgcagcctttgttctgaagctttcgaggatgcgaatcatttggcaaaggggtgcattttcacaaggaatgtgtggaatcggctatgcaattggttaggttttaaccaatctcttttctctccgcaaaatgaagatatctcggtatggtgggattctatgctccattcagtgcaagaaaaaagagcgaagaaaaggatggtaggggcactactcaccacttggtggcatgtttggctggagcgcaaccatcgaattttcaatcagcaatctcagaccgagctgcaagtagcacacctaataaaagaaaacatagatctcatagagctcccaaaaaag

SEQ ID NO: 6441 - DNA, 418 bp, Oryza sativa
  Clone ID: PAT_MRT4530_13130C.1
gggggtaacccaacgggggaagcgcaagaaacagtaggtctcaacacagaagaagcacacccgtccagcaggagcgcatgaggggccggaagcatcaaccggtcatgggaaaaggagccctgcgagcaccttcgggtcccggcaagggaaacccacctatctaggtagacacagggaggtaaagggaaccagaggtctggccgaaacaaccgggggcttcggcggggaaagaaacctggatgaacggtgagccgcccaaaaattggatccccgaaccggaatcacatcagggagggcctcaatagaagaggggacccgccactcccaaggtgagacccccgggtcttggttttccgggtcttctggttctgatattagggagggtgactccgggtcccggtcttcccccccttctggt

SEQ ID NO: 6442 - DNA, 597 bp, Oryza sativa
  Clone ID: PAT_MRT4530_13131C.1
atggatctggcacctgatggtcagggatggaggtggcggtggacggagcatgggggtagaaggagacaacgctcggtggccggatctgcgtcccccaaccttgtggatggtggatccgacgcccagtggtcggaggtggtggccggattcggcgcccgacagatggggatggaggtggcgatggcgctcggaggttgggcgtggaggaggcggtggacgacgggatggcaacgggtcgggtcgagtacgggtagagcaaaaccatgcccggcccgagacccacgtacccgtgcccgactcatgcccgcaaagcctatcgggcaaaatcccatgcccgtcgggcatgggtatgccgacgggtatccactgggcttacctgttgtgcatcgcgtcgccaacaaccgctgcgccgctggtcactgcccgtgcgccgccatgtcgtcggccgccgcccgtgccgcctgcaccgtcggaggatgttgccatcgcgtcaccatgccgccagctgccgggctatggtggagcaagaggttggcgaccacgaggaagcggagctcgacggccgccgctgctagcgcgccgcgccgtcgcctctga

SEQ ID NO: 6443 - DNA, 539 bp, Oryza sativa
  Clone ID: PAT_MRT4530_13132C.1
acgtttcgttcacgatcattcacgttcgcgttctcgttaagttcacgtttcattcacctacgttcgttcgttcacttcacttttcgttcacggacgttcgttcgtttacgtacattcaaatacaacgttaagttcacgttcgttcatgttcacgttcgttaacgttcgttcacgttcattcgttcacgttcacgttcattaacgttcgttcacgttcacgttctcgttcacgttcgttcgttcacgttctcgttcacgttcgttcattcacgtggcggcagcggagcggcggcggagcggcggcggggcggcgcggctgcagcttggcgcggcggcggcgtcactcaactacgggcggggcgggagcggcggtgccgtgccacggcggcgtcatggcatcccggcgagacaagccaccaaagcaaaaagacacgaatggggggggacggggggggtggggccgttcgggtggggggggggggggggggggtgggggggccggggggatgggggggtggggccgctgcgactcttcgtgt

SEQ ID NO: 6444 - DNA, 2194 bp, Oryza sativa
  Clone ID: PAT_MRT4530_13133C.1
atggagtgggacagcgagtcggacggcgccggcagcatcggcgccggcgaggaggaggaggaggaggaagaggaggaggagggtggttttgggggaggaggtggtggtgggggcggcggcggagggatgttctcgttcgcgattgaagggatgctgcgcgcttcggggccgtgcgggctcgtcgtcaccgacgcgctcgagcccgactgccccatcatctacgtcaactgcgggttcgaggaggccacgggataccgcgcggaggaggtgctcggcaggaactggaaagatggctctccattgatgaacaagttacacctgacccctatatatggagatgatgagaccataactcattacatgggcattcagttcttcaccaatgctaatgttgatttgggaccattgcctggctcattgacgaaggaacctgtcagatctacaagatttactccagataactttttccggcccatatccactggaccagggcagagcaacttctgccgggaatattctagcctgttccagttgactgatgaagtactctgccagagtatcctgtcaagtagccattcagcgtcacggcttatcccttggatccaactgaagaaaagcctacctggaggatactgaatgttcctgggcgacccccacggtttgcctggggccacagcacctgtgttgttggaggaacaaaagcaatagtgcttggaggacaaactggagaagagtggatgttaaccgaaatccatgagctttctttggctagcagcacagtttgaggttcgaagtttattttttatgtttcagcaagcttccttcagaacaatcatgattattcatgtgtggcctgaaacttttcttcactggcaggactggaacactggatgagtatactgaatcttttggcaacgacttgtatttacttggaagaggtggtttgccttgagtagatccaaacctacatttggggttgcttgctttatgtagtcaaggtgtagtgatatgttctttttcttgttgtttgttttgtcttttaccagaaaatataattcataagctactcttgtgaaatgagtacccattttatgtattctcagacgcttctgacatgcattatgtttgggacaacagaacaacgttgtatagctgaatcatttgtgatgtactatgcttcttgagcatcttgctgccatctaacgacgcacaaacacaagtggagggtggtgcctgcttcgcgggcgccaccttcgtcattgggccactcaatgtctgtctatggtggcaggaaaattttgatgtttggtggtcttgctaagagtggtccactgcgactccggtcaagtgatgtgttcacaatggacttaagtgaagaggaaccctgctggcggtgcctcaccggtagtggaatgcctggggcaggaaatccagccggagctggtccacctcctcgccttgatcatgttgctgtcagcttacctggggggagagttttgatatttggtggatcagtggcaggtcttcattcagcgtcacagctttatctcttggatccaactgaagaaaagcctacctggaggatactgaatgttcctgggcgacccccacggtttgcctggggccacagcacctgtgttgttggaggaacaaaagcaatagtgcttggaggacaaactggagaagagtggatgttaaccgaaatccatgagctttctttggctagcagcacagtttgaggactggaacactggatgagtatactgaatcttttggcaacgacttgtatttacttggaagaggtggtttgccttgagtagatcaaaacctacatttggggttgcttgctttatgtagtcaaggtgtagtgatatgttctttttcttgttgtttgttttgtcttttaccagaaaatataattcataagctactcttgtgaaatgagtaccaattttatgtattctcagacgcttctgacatgcattatgttagggaaaacagaacaacgttgtatagctgaatcatttgtgatgtactatgcttcttgagcatcttgctgccatctctggcctctgggacacgatttgacgcttatgtgatgtatgcgagaaaaattttgatcgatcctctttgttgtaaatcatgtaacatgatgtagctgctttgtcaggtgaaaaaaaacctgcagcccggg

SEQ ID NO: 6445 - DNA, 525 bp, Oryza sativa
  Clone ID: PAT_MRT4530_13134C.1
cgctacggttctggacttctgaaccttaactcactttccaaacttatgtcacaagtgtggtatgccatagttttcgtggcaccaaaaaaaagagctacactttatgacaaatttttgctaataagggagtgtatgacatatggatcgaaaagccttgcagtaaaacgtcaagagaaaagaagagaacagggcaggaaattaccagccgcgaatggaatgcacgcatgtgatcacctctacctttcgccgtccatccgctgccgccggacgcgacagaagacggactgccgtggcagcgactggtctgatctgccggcggacttgctcgtcaccgtcttcagctctctggagatccccgacctgatctgctgcggcgtggccacccaccctccaccggcaacctctaccgcatcccgctccccgacgaccacgacaccctcccgaacggcgatccgccatcgacaacccctctacgattaccaccaccctccacccacagcccgttcaaccagctctctccttcgc

SEQ ID NO: 6446 - DNA, 750 bp, Oryza sativa
  Clone ID: PAT_MRT4530_13135C.1
cggtagtggaatgcctggggcaggaaatccagccggagctggtccacctcctcgcccttgatcatgttgctgtcagcttacctggggggagagttttgatatttggtggatcagtggcaggtcttcattcagcgtcacagctttatctcttggatacgcgtccggaaaagcctacctggaggatactgaatgttcctgggcgacccccacggtttgcctggggccacagcacctgtgttgttggaggaacaaaagcaatagtgcttggaggacaaactggagaagagtggatgttaaccgaaatccatgagctttctttggctagcagcacagtttgaggttcgaagtttattttttatgtttcagcgagcttccttcagaacaatcatgattattcatgtgtggcctgaaacttttcttcactggcaggactggaacactggatgagtatactgaatcttttggcaacgacttgtatttacttggaagaggtggtttgccttgagtagatcaaaacctacatttggggttgcttgctttatgtagtcaaggtgtagtgatatgttctttttcttgttgtttgttttgtcttttaccagaaaatataattcataagctactcttgtgaaatgagtaccaattttatgtattctcagacgcttttgacatgcattatgttagggaaaacagaacaacgttgtatagctgaatcatttgtgatgtactatgcttcttgagcatcttgctgcc

SEQ ID NO: 6447 - DNA, 1412 bp, Oryza sativa
  Clone ID: PAT_MRT4530_13136C.1
ttcggttgctgcgcgcttcggggccgtgcgggctcgtcgtcaccgacgcgctcgagcccgactgccccatcatctacgtcaactgcgggttcgaggaggccacgggataccgcgcggaggaggtgctcggcaggaactgccgattcctgcaatgcagaggaccctttgcgcaaaggagacatcccctaggtgatgccatggtggtttctgagattcgcaaatgcatagacaatggtaccgaattgcgtggtgatttgctaaatttcaggaaagatggctctccattgatgaacaagttacacctgacccctatatatggagatgatgagaccataactcattacatgggcattcagttcttcaccaatgctaatgttgatctcgtccgattgcctggctcattgacgaaggaacctgtcagatctacaagatttactccagataactttttccggcccatatccactggaccagggcagagcaacttctgccgggaatattctagcctgttccagttgactgatgaagtactctgccagagtatcctgtcaaggttgtcaccaagagatatagcatctgttagctctgtgtgtaggcggttgtatctcttgacaagaaatgaagatctttggagaatggtttgtcagaatgcatggggcagtgagactactcgagctcttgagactgtccctgcggcaaaaagattaggctggggtcgattggcaagagagctgaccacactggaagctgttgcttggaggaagttgacagttgggggtgccgtggagccatctcgatgtaacttcagtgcctgtgctgtagggaatcgtgttgttctctttggtggggaaggtgttaacatgcaaccaatgaatgacacatttgtgttggatttgaatgctatcaatccagaatggaggcatgtcaatgtaagctcagctcctcctggccgttggggccataccctatcatgcctaaatggatcgctgttagttgtgtttggtggatgtggaagacagggcctgcttaatgacgtgttcacattggatttggatgcaaaacagccgacctggcgcgagattcctggagttgcaccaccagttccacgttcatggcacagctcctgcactttagatgggacgaagttggtggtttctggtggctgtgcagactcaggtgtactactcagtgatacatatcttcttgatgtaacgatggacaaacctgtgtggagggaggtacctgcatcttggacgccaccttcgagattgggccactcaatgtctgactatggtggcaggaaaattctgatgtttggtggtcttgctcagagtggtccactgcgactccggtcaagtgatgcgtttacaacggacttaagtgaagaggaaccctgctggcggtgcctcacc

SEQ ID NO: 6448 - DNA, 106 bp, Oryza sativa
  Clone ID: PAT_MRT4530_13137C.1
aggggaatgatatatatttatgacaaattaatggagtgaaggatgaatttctacatgaaaaggcactgccataaggcgtgatcttttgagtgatctctgagttccg

SEQ ID NO: 6449 - DNA, 414 bp, Oryza sativa
  Clone ID: PAT_MRT4530_13138C.1
atggagttggggttaaggtgcaaaagtgaaaggccgtgttcacggccggggagtgctccttccacctacaacttcttcatccctgcggtgtcggtgttggacgccccgagatccatcgccatcgtaggaccgccggagaggaagaagaaagctaggccgaaggactcaagccgaagccaccgggagatctcgtcgatcaatctcgacaaggatctcgccgatccagcaagaaggagcccggatctagcgtcctcgctcttcttcatcgggtcgactcctacctccctaagtccctacaagcccgacaccaccgacatcaatggcgaccataacaatagtgtgcactacgagaggggaggagaaaaaaagggtggctcatggagaaagagcggtggtggcgggggaaattcttaa

SEQ ID NO: 6450 - DNA, 361 bp, Oryza sativa
  Clone ID: PAT_MRT4530_13139C.1
ggaaacaaaaaaacctacggtttaaccttttatttcactacccaatgggggtttttttaacctttcccttacgggactactttgtttttggccacccaagagtttttacccttgcaggggggtccttgcttatttaaacgggatttcacgtgcccaatgcttcttgggtaaaagcgtaagctagggattctttccgtttctggactttaaccatttagggggcggcactaaacccttttgcctaacaaaacaactctttttttgttttcccacaaccccgttttcacggtttaggctgctcccatttccctcgcccttactacgggaaacgctttagctttcttttcctcgggctaataaa

SEQ ID NO: 6451 - DNA, 1297 bp, Oryza sativa
  Clone ID: PAT_MRT4530_1313C.1
caatctacttaacctcctcctcctcctcgagctccgaatcccaaaaccctagccccacccgccgccgcacgccggaggaggaggagatggctgacaaggagaactccaccccggcctccgcggcgcggctcacccgctcgtctgcggcggctggggcgcaggccaagcgttcggccgccgcgggcgtcgccgacggtggcgcgccgccggcgaagaggaagcgcgtcgcgctcagcgacctcccgaccctctccaacgccgtcgtcgtcgccccccgccagccgcaccaccccgtcgtcatcaagccgtcgtccaagcagcccgagcccgccgcggaggcggcggcgcccagcggcggcggcggcggctcccccgtgtcatccgcgtcgacgtcgacggcgtcgccctcctccggttgggacccgcagtacgcctccgacatctacacctacctccgatccatggaggtggaggcgcggaggcagtcggcggcggactacatcgaggcggtgcaggtggacgtgacggcgaacatgcgggccatcctcgtggactggctggtggaggtcgccgacgagtacaagctcgtcgccgacacgctctacctcgccgtctcctacctcgaccgctacctctccgcccacccgctcaggcgcaacaggctgcagctcctcggcgtcggcgccatgctcatcgctgcgaagtacgaggagattagccctcctcatgtggaggatttctgctacatcactgataatacgtacactaggcaggaggttgtcaagatggagagcgacatactcaagcttctcgagttcgagatgggcaatcctaccatcaagacattcctcaggcggttcacgagatcttgccaggaagacaaaaagcgctccagcttgttattggagttcatggggagttatcttgctgagcttagtctacttgactacggctgtctccggttcttgccatcggtggttgctgcctcagtggtgtttgttgctaaactgaacattgatccgtacaccaatccttggagcaagaagatgcagaagttgacaggatacaaggtgtctgaactgaaggattgcatcttggccattcatgacttgcagctcagaaaaaaatgttcaaacttaactgcaattcgcgacaagtacaagcaacacaagttcaagtgtgtctcaacattgcttccccctgttgatatccctgcgtcatacctccaagatttaacagagtagctgtttttggtctgcaactttgcgatgttaacagtctgagcttgtctcgagct

SEQ ID NO: 6452 - DNA, 971 bp, Oryza sativa
  unsure (1)..(971): unsure at all n locations
  Clone ID: PAT_MRT4530_13140C.1
cgacacgccgtcgtcgccgaggggagagagagagaggccgtcggtcgtcgctaccactgtccccccccctctcgtcggagcgccccgtcgccggtcgggtttgatcgatggcgttcaagaggatcctgaaggagttgtaggacctgcataatgaccctcccaccttatgcattgtatgttctgtgggtgtggacattttcaattgatatgttacttatattgaaccttatacaattacatattatgatgtttatatctttgttttacttttcttttctaactctttccctttttaattctatcaactttattttctttttctcggcttctatttcttattttttaatatttttttcttatttttcttcattaactgattatttgtattgtattcctttttaatattatttttatattttcctatatcatattctaatatttctatctaatttttcttaattatattccatttatttttttctcttaattttttaatctcgttttacttattattgtacttttcataacttaaatttattatattctttttagatattatactattttattatatattattaaatatgtgcaaattctttaccttataatcattttttttctcttatctttcacatttttttaattattctaattcttaatatataaatataatttatatattatctcattattctgaaatctatccaatacattgctataactattttacttgtaatnatacttacattatttttatatattatgataactctatatattctcttcaacatttcgttaatatatgactcatcatcctatttcactccgataacttcccaattattcctctgacttcatacctcgttttatcctcattttatattcgctatacttcttaactttattctcttctcatccatgataatctattattttaatatctctttaattacttcatttataaaacttca

SEQ ID NO: 6453 - DNA, 446 bp, Oryza sativa
  Clone ID: PAT_MRT4530_13141C.1
cccacgcgtgggaagtaacaagaagtcttattcaaatacaaacccctctattagatctagaagtcgagtaatcaggaagacagggagcacaggctgaccaagagggagctgtgtacccctgccacagcagggacgagcttcactccgacatgaccaagggcatggacggccggcagatgtgcccataatgtgacttcactgcttcctggtgtggacgttgaccgttcatcgcaccactgctcacttaatacacaaaatagttgcctgcagctgccttgctaaagatggatgctcatgagacacaggaagctgctaatgcgcacaatgtcgagacaatgccgaccatcctatcgatgaaggaaggcactcacgctaacagggtaaggagacctaggaacgattacctgcctaatgccatgacgaaccacagaccggccagtgctgca

SEQ ID NO: 6454 - DNA, 2346 bp, Oryza sativa
  Clone ID: PAT_MRT4530_13142C.1
atggcggaggcagtaatccttgccatctcaaagatcggtaccactttaggagaagaagccaccaaggctgttctagcgaaactgtctgaaaaagtaacaaacttgaaaaatctgccaaggaatgttaaagatctaatgaaatggtctctttcggcagagctcatgagtccaaaaacaccttctgatattgagagacaaatatctggaggctgcctgccagaatttattaaagatgaagaccttgtgggggttgaagaaaataggagaaaattgactggatggctgtattccaatgagccgcatggtacagtgataacagtgtccggcatgggtggactgggaaaaactacattggtaaaaaatgtgtacgaccgggaaaagggaaacttccctgctcatgcttggattgttgtatcaaagacctacgatgtggaagaattgctatgcactctacttatgaaggttgcataccgagagcaatcaccagctgcaaacatgaataaaatggatgtttatgagttaacagataaaataaagaaaaagttagaagatagcaagtgcttgattgtactggatgatgtatgggaccatgaagcatacactatgatgcgcaatgcattccagaatctccaggaaagtcggattgtcatcacgacaaggaaggaagaagtggcagctcttgcatcctcaaaatatcgccttgatctccaacctttaggcaacactgactcattcaatctcttctgtagaagggctttccatggtagaacaggctgccccaaagaccttatggaggtggctacttctatagttaagaggtgtcaaggtctaccgctagcgattgtatctatgggaagcctgttgtcctcaaggaaacaaacagaatatgcctggaatcaaacatatagccaacttagaaatgagatgataaaaaatgatcatgtccgggcgatcctaaatctgagctaccacgatatgccaggagacctaagaaactgcttcttgtattgcagcatgttccctgaggattactccatgtcaagggagagccttgtgcgattatgggttgcacaaggctttgtagtgagaaaagatggtaacaaaccagaggatgtagctgaaggaaatctcatggaactcattcaccgtaatatgttggaagttgttgagaatgatgagctcagcagggtgagtacctgtaagatgcatgacattgtgcgcaacctggctcttgatgttgctaaagaggagatgtttggctcagcaagtgataatggcacaatgacgcagctggatacagaagttcgtcgcttctcaacatgtggatggaaagatgatagcgcaccaagggtgtcatttccgcacctccgaactctattgtcccttcaagctgtttcatcctccaccagcatgctgaactcaattttttctcgatcaaactaccttagtgttctcgagctgcaagactctgaaatcagtgaagtgccgacatccataggtaatctgtttaatctgcggtacattggcttaagacgcaccaacgtatgtaagctcccagaatgcattgagaatctctctaatctgcaaactttagatatcaagcaaaccaaaatagtgaaattaccacgaggaattgttaaggtcaagaagttgcggcatcttatagctgacagatatgctgatgagaaacggacagagttccgatacttcattggagtggaagctcctaaagggttatcaggtttggaagaactccagactcttgaaactgttcaagccagcaaggaattagcagaacagctagagaagctgacgaaactgcaaaacttgtggattgataatatcagtgctactaattgtgcaaagatttttactgctctgtccaagatgccacttctttcaagcctgcttctctctgcatgtgatgagaaggaggaacatgggaaaaatctcaggtacctagctctaagttggtgtcaacttggagaggatccacttcgagtgctcgggctacatgttccaaacctcacatacctgagacttaacagcatgattagtgcaaacaggttgatcattactgcaggatcctttcccaagttgaagacaattgtcttgaagctcatgccaaatgtcaaccggctgaagatcgcagatgatgcacttccagtcattgaaggtttatacaacgattcactgccagggctggagagagtccctgtgggcattgaaaatcttttctccctgaagaaactctggctcctcaatctgcatcaagacttcaaagcagattggatccatagagaaatgcaccggaaaatgcagcatgttccagatctgcgtgtttag

SEQ ID NO: 6455 - DNA, 1473 bp, Oryza sativa
  Clone ID: PAT_MRT4530_13143C.1
atgccaggagacctaagaaactgcttcttgtattgcagcatgttccctgaggattactccatgtcaagggagagccttgtgcgattatgggttgcagaaggctttgtagtgagaaaagatggtaacaaaccagaggatgtagctgaaggaaatctcatggaactcattcaccgtaatatgttggaagttgttgagaatgatgagctcagcagggtgagtacctgtaagatgcatgacattgtgcgcaacctggctcttgatgttgctaaagaggagatgtttggctcagcaagtgataatggcacaatgacgcagctggatacagaagttcgtcgcttctcaacatgtggatggaaagatgatagcgcaccaagggtgtcatttccgcacctccgaactctattgtcccttcaagcagtttcatcctccaccagcatgctgaactcaattttttctggatcaaactaccttagtgttctcgagctgcaagactctgaaatcagtgaagtgccgacatccataggtaatctgtttaatctgcggtacattggcttaagacgcaccaacgtaagtaagctcccagaatgtattgagaatctctctaatctgcaaactttagatatcaagcaaaccaaaatagtgaaattaccacgaggaattgttaaggtcaagaagttgcggcaccttatagctgacagatatgctgatgagaaacggacagagttccgatacttcattggagtggaagctcctaaagggttatctggtttggaagaactacagactcttgaaactgttcaagccagcaaggaattagcagaacagctggagaagctgacgaaactgcaaaacttgtggattgataatatcagtgctactaattgtgcaaagctttttactgctctgtccaagatgccacttctttcaagcctgcttctctctgcatgtgatgagaaggaggtactctgcttccaaaatctcaatccaatatccaagatgttccataggctaattgtccgagggcagtgggccactgggacactggaattgccgatatttcaggaacatggtaaaaatctcaggtacctagctctaagttggtgccaacttggagaggatccacttcgagtgctcgggctacatgttccaaacctcacatacctgagacttaacaacatgaatagtgcaaacaggttgatcattactgcaggatcctttcccaagttgaagacaattgtcttgaagctcatgccaaatgtcaaccggctgaagatcgcagatgatgcacttccagtcattgaaggtttatacatcgattcactggcagggctggagagagtccctgtgggcattgaaaaccttttctccctgaagaaactctggcttctcaatctgcatcaagacttcaaagcagactggattcatagagaaatgcaccggaaaatgcagcatgttccagatctgcgtgtttag

SEQ ID NO: 6456 - DNA, 330 bp, Oryza sativa
  unsure (1)..(330): unsure at all n locations
  Clone ID: PAT_MRT4530_13144C.1
gtagagaaggactacaacggatctaacgccgacagtgctgacgacaagaacgacaatggagaacactgttagtaggaacttaataggagttaactgataatgatagcatggcaacccactcgggagcactgtattgtatcaccaatgtatgggctgaacctatgctctgaggtacacaaatagctgtcatgaaatgctgctatgtgacggtggccaacaggatgatctcccgccacgtgacatactgacaacagacacatcgttgacttctctctnaaaatatgtaatatgatgatatttgctcaacacagatatctatgcatatctttg

SEQ ID NO: 6457 - DNA, 1020 bp, Oryza sativa
  Clone ID: PAT_MRT4530_13145C.1
atggcggaggcagtaatccttgccatctcaaagattggtaccactttaggagaagaagccaccaaggctgttctagcaaaactgtctgaaaaggtaacaaatttgaaaaatctgccaaggaatgtaacaagaatagaaaaggaactgaagatgatgaacaatgtaatacaagatttgggcacagcagatatcagaaaaaataccgtcaagggttggattgcggaggtgcgcaagctggcctaccatgttgaggatgtaatggataagtacttgtatcatgctcatcaaatgcaggaagatgggaaaatgaagaagtttgtgaaaggagcacaatatatcaagatttttgatgaaattgctgacgaaattgtccggatggaagaagagatcaagcatgttaaagatctaatgaaatggtctctttcggcagagctcatgagtacaaatacacctgatgatattgagagacaaatatctggaggctgcctgccagaatttattaaagatgaagaccttgtgggggttgaagaaaataggagaaaattgactggatggctgtattccaatgagccgcatggtacagtgataacagtgttcggcatgggtggactgggaaaaactacattggtaaaaaatgtgtacgaccgggaaaagggaaacttccctgctcatgcttggattgttgtatcgcagacctacgatgtggaagaattgctgcgcactctacttatgaaggttgcataccgagagcaatcaccagctgcaaacatgaataaaatggatgtttatgagttaacagataaaataaagaaaaagttagaagatagcaagtgcttgattgtactggatgatgtatgggaccatgaagcatacactatgatgcgcaatgcattccagaatctccaggaaagtcggattgtcatcacgacaaggaaggaagatgtggcagctcttgcatcctcaaaatatcgccttgagctccaacctttaggcaacactgactcattcaatctcttctga

SEQ ID NO: 6458 - DNA, 479 bp, Oryza sativa
  Clone ID: PAT_MRT4530_13146C.1
gaagcgataataggcgagccaaacattaaggagctcatgaatccaataatccggaggttttttaaaaaggactcatgataaactttcatgaacacgcgaacgattggaggaggacacaccaacattacactctattgagtcaactgacatccatagactataccaaaccttcggaggcccgctgaaataaaacatcactgtcgagcacaaggaaccgataagaacttgacctccttcatgccctgatataagaaaaagaacgatgggtcggcggatccgacaccgagaatagctatgaccgctccgcgctcgtgatgcctgctctcaccttcgaaaattggaagaccttgagctttcaagcagtactcgtgggagacctccctgctttctgcgaagactccttagctttcctcatccaccttggaggattggtcctggaggcctcctttctggcacggtccataacgtcccgtgtgcat

SEQ ID NO: 6459 - DNA, 531 bp, Oryza sativa
  Clone ID: PAT_MRT4530_13147C.1
ttagtcaattccttcaatgtctgcagaagttgggaaaacattttcagtatttagtagcttccttccctttgcctcaagaaaagctgtttgaaagacagcatatgaaacagctcttccttgaacttcgccgccgccgcgccccttgggcacggtgacgacgagctggccgttgacgtagccggccacggccatcgccgggcagctcgcctccggcagccgggacctccacttgtcgagctccatgtcgtcgtcgtcgccgtcgtcgtgtacgcctcctcctccggcctgcaccaccaccctgacaaccccggggtggatcctgacggtgcgcacgcgcacctcgccggcgagcgcggcggcggcggacacgacgaagtggaacgcgtcggggccttcgaacaccgcgacgtcggtgtccgccgggaacggcagctccagcaccttgctgtagacgtgcggcagccgccggagatccttcttgccgccgcagctgccgccggcggtcgtggctggtgatgggtggatcctcat

SEQ ID NO: 6460 - DNA, 1097 bp, Oryza sativa
  Clone ID: PAT_MRT4530_13148C.1
aaaaattaatcacatattctcctgtatttacaattgggtttcaggaaagaaaaaaaacaaaaacaaaaacaaaaacaaagagaagctacaacttacaaaacttacagtagcttccttccctttgcctcaagaaaagctgtttgaaagacagcatatgaaacagctcttccttgaactatgatggaagagaaacatcaaagaaccccatctttacccaaaaacaaagatggcaaagacattactagataataagtagattagatgaacaattagcgcagacaaagggctatcactctactgatgatttctctactgtacaaccaccagcctgccactaatcttccctccattgcagcacctccaggcctcctctccgccgtcgttgtcaccttcgccgccgccgcgccccttgggcacggtgacgacgagctggccgttgacgtagccggccacggccatcgccgggcagctcgcctccggcagccgggacctccacttgtcgagctccatgtcgtcgtcgtcgccgtcgtcgtgtacgcctcctcctccggcctgcaccaccaccctgacaaccccggggtggatcctgacggtgcgcacgcgcacctcgccggcgagcgcggcggcggcggacacgacgaagtggaacgcgtcggggccttcgaacaccgcgacgtcggtgtccgccgggaacggcagctccagcaccttgctgtagacgtgcggcagccgccggagatccttcttgccgccgcagctgccgccggcggtcgtggctggtgatgggtggatcctcatgtatagggagataagcccaagggagaggagatggatcacacggctcaggcagaggcaaaagagaggagccagtgagacgatggagattggagaccctgataggagtgcgtgtcccggtgtccgtgcctgtgttttgggcctgtttaaatccatgcccaaaattttataccctatcaaattgaacatttaaacacctacacgaaaaattaaatataggctaaaaaataactaattacacagattgtagttaattttacgagacaaaattttttaaagccctaaatacctcttataatttt

SEQ ID NO: 6461 - DNA, 441 bp, Oryza sativa
  Clone ID: PAT_MRT4530_13149C.1
atgagccacgagcaacacaacgagagggctcacattggacttgcatttatatgcaccgcagctgacttgttccagctactccttgtctcggcgcagaagatccgaagcaccgagcgccgtggcccacctgccaccgatggtggggcccacgatcacgcacccgggcaggaggggtggcccaaggccgcagcagcatgcgagcgcgcatatggactgcgcgcgtgtggggcccgaataattgcgttggatcgggaccgtgcgctctcctcggcccaccagattggacggcggggatcgtctcgcggtgggtggaacgatggtccgcgtcgaccgaataatggcggctgtgtggcgtggattaaagacggccgagatattttgagatacttcctcctgtccggtgtccggctgccgtgccagcctggattttcccatggatag

SEQ ID NO: 6462 - DNA, 135 bp, Oryza sativa
  Clone ID: PAT_MRT4530_1314C.1
gcggacccatacgaagaaatcgcgaaggaagtctaatcctacctgtagaaggacgcctacaggcatgccaagaatcccttagatcccatctctgccttagaaggagagcaacatgactggacaggtgcaccacac

SEQ ID NO: 6463 - DNA, 265 bp, Oryza sativa
  Clone ID: PAT_MRT4530_13150C.1
acgcgtcagactaagatgtgagaccctatcgtacctgcaccactcaccgtgaggatctctgaagcagacgagtcctgtcgatccagtggtccctcgcctcgagttcagcaaggttgaatccttctaccgggagaaccacaggtctcccgggtactacgatggcaggttttggaccttgtggaagctgcccatgttcggctgcaccgatgccacccaggtgctcaaggagctcgaggaggccaagaaggcctaccccgatgccttt

SEQ ID NO: 6464 - DNA, 3663 bp, Oryza sativa
  Clone ID: PAT_MRT4530_13151C.1
ttcggtttttaggaattaggcacgaggtttttagaaagggtagaggcctttcatgttaagaagagccactatatacaaaatgttcagaccagaatggagatatatccacaaaatcgaatgggcacatagtttcacacccattccatccccattcacaggtccgaacccttaaaacattggatcatttcccctaaaatgctagcaagtctccagggaacaaaatatgaactgtacaacatcctgcaaactcatgatcaagacttctcatgtaaacagcatcttcagttgctcgatacgagcggagcggacttcatcgtcggtcagcgccccagagatcatcctctgcttgcacgcttgcaccttctgcatccgctcctcgaccgtatccttgacgatgaagcgccttacttggaccgctctcttttgcccgatacggtgaattcgcatgatagcttgttcttccactgcaggattccaccatgggtccattaggaacacattggaggcagcagtcaaattaagtccaacacctccagccttgagtgacataagtagcaccagcttgtccttgctttcactgaactccttcagaaccttttctctgtgtttctggctgagcttcccatcaaacctcaagaatttgatccctttctgattgaagggaacctcaagaagatcgaagaaggaagtgaactgactgaacacaatgctcttctccctcttctcctgaaggccctccaggatcttgatgagttttatcaccttacatgagtccttccagttattctcagggtcaacctggaatcgacactgactaggcaatgtgatcagctcagatttggtaatggggcttcggcaaagtgggcatggtcctccagaaggcgtcctccagctagagagcaggcactcacggcacatccggtgcgcgcatggtgtgagcactggatcatcagaagctgattcaaggcagattggacactcagtagttgcgccctggcggatttcttcaacaacctcttctacatacgcctgtgaaggtggcgcactgcgtctcgcggaatcacgttgcaccccatcaaggaacctctgtgctagctcatcgaggtcagtatacttctgagtatcagctcgactgatcactagaaaagggtggtcgcagcactgccttagccgaaggagtaactcaagaatattagcgtagttgttaagaacactgccttgtgctacaaatttatcaaattgaacctttgatctcctgaaaagcgcttcatagaaatcgcgttcatcttcagattgttcgcactccacaatctcaatattagctggtgggaggactagtatgggatttcccattttgtcttttgtttccttcgttctcctcagcatgagtggcctcagaatagctctgacaagtttcaatcccctctcatcaccattctcataaggtctttgaatcagcttattccaccaacttgcgtcaccccatggttctacatgtaggaagcaaagaagactgaaaaggtcctccaaattattctgcaatggtgtacccgtaaggcaccatctgcaatgagaagttaattcataagctgctcgtgctgctttggttctgggagatttgatcgtatgtgcttcatcgagcacaactctataccaatctatcctgtgaaagatactgctgccatcattcttgtgagctgattgaagaacaccataggttgtcaagacaacactatgctgagccatgaatctcaggtcagtggttctgtcgccaccatagtagacaaacacagaaagagctcctggtgttgaatgtgcctccaattcatccttccactggcctagcaatgccattggacagattataagtgtgcctcctcttacagaggatctcgaagtttgtgccttggtgtcacgatctctagtacccctcttatcttgttctaactccccccttgggtttgatagtattagagcaatagtcatgacagttttaccaagacccattgcatccgctagtatccctcctcttgctgactgagttacactttgaaactgggttgttgcctcgccagtgaaaacattgacatacactgcaggagctctcttgtcgacgattttgtaggcactccaacagggatgaagggtttttttggcttgatcaccatcaatacccttctccaattgagacatccagaacagagcttccttctggtatggttttagaacggagacaagagtgcttgggggctctgcttcctccaagtcatatgtttcagcagtgccaacaattttgtttaatgcagcctctgaaatagcttgctcatcagtgccttgctcaggaaatgtttggccagctgtgcgtcggttttccaatccaactatagccatgggttcatcttcatcattgtcatcaccccttagattccgcggtctctttcctgcagcaagctcctcaggagtgatatcagccttggtgaatgcccttagcttgagcaatctgaacagcctgtaaagagggttagtggaataatcaacatttgcaggagcaagcaggtcccatgatgagttgttgccgcttgcggtgaatacagaacggtggatgtagaagctaacatacaacaaaatctcctgcatcaatctcaattccaccgtgggaaacacaatcttcccctgaatcttcaccttggatgagcttaccagtggcacgaggcacttggtccattctgtagatagcttcccaatctctccagctcgattggtggagaagcgcacgatctccgccaaagcagccgccttcttgttcgacaccttgatcccaccataggtcctctccaatgaggggaacgagaaatggacgagctcgccggcgtccagcctccgcctcccgcggttggtggacaggccggtgacgtacgacctgccgacgaggaaccagtcgcgctcctcggggaactcgccgaactcggcatcaggcggcgccaccaccatcctcagatcactcgacggcggaggcggcctggcacgcacacgccgcgactcgagcatctccatggcctccggtggcggcaccgcccggatcggcctcgggttcaggtacggcaccgggtgggtcgccgtgaggtcgatggtgtccgcctcgtcgtgcacgcgagacctcttcttcggcctcggcaccaggcttatgccggcggcgttcgccgtcgccgcgcctcgcttggccgcgacgccgtcttcctccttgacccgatccggcatcggaggcggcgctttgacgagcagctcgtcctcccgctccttcttgaccctcgcggagcagccgttcgattcttggctccccaggggctcgtcgtcgaggacctcaaccttcaccggaggcggcggcggcttcggggcggcgccaccagcgtcgcgttccgccttcaccggaggagcagccgtcttggcacctttacccttcttgggctcgggtttgtcctcgacgccggcggtggcgtcatcgaggagcgcgttgatggcgcgctcggcgttgcctccgcagcgggagattgcggcgacgacgcgggcctcggggaggcccgcgccaagaaccgcgcggacggcggcgatctcgtcggcgtagagcacctcctgggacggcgactccggccagtcgccgtgcat

SEQ ID NO: 6465 - DNA, 625 bp, Oryza sativa
  Clone ID: PAT_MRT4530_13152C.1
atcccaaactcatctatagcctctagttgtagcagtagtcagatcgaagagaggtgttggatcgatcatggtggcgagtaggcggaagatggagagcgaggaggcacggaaggtgtgcttctccaagcgccgtgcggacctcttcaagatggcgagcgagctgtccgttcatttcaacgccgacgtggcggctgtcgtcttctcccccgccggcaacagggcctactccatcggcgacccgtcggtcatggaccgcttcctgtcgtcgttgccggcgccggcgccgccggcggagaccgagccagagccagaggtggattggtcggtgatggaggagctgagcaggctgtgtggccagctgcaggccatggtggacgcgcacaaggcgcgcctggagaaggcggaggagaagcttcgcgagagcggcgcggcggcgtggatgatggatctggaggcggaggtgggtcgcatggcgccggaggatgtgctggccctggtgactaagctggcggtgctgcgggacggcgtggcggagcgcgcccacgagatgctgcgcgaggcgctgctcgctgtcgctgccccgaccccgaccacccccaccaccccgccgcccgcgggcttctga

SEQ ID NO: 6466 - DNA, 426 bp, Oryza sativa
  Clone ID: PAT_MRT4530_13153C.1
cgagattgatctgccggtctaaccgagtagatgccgccaatctaaccggtgttgaacctccggtctgaccgccaaagttgcctgcctcgcctgtcgccgccgccggtttgaccacccatatgccaccggtctgaccgccggtgcaccgccggttagaccgacgaaacccggtgaaacacaaatcaaagaactctaaagtggatgacgactttattacttctctcgtgggctggccggtcagaccgtgggctggccggtccgaccgctcgatcaccgctgatctgaccggcatacacagcccggtctgaccggtcacataaaatgatagaatcctacgatcacctgtgaaatccaatcatctccaaaatcatttcgtgaataaattctaaataacaaaaccaataatctccaatgcccaattgatca

SEQ ID NO: 6467 - DNA, 359 bp, Oryza sativa
  unsure (1)..(359): unsure at all n locations
  Clone ID: PAT_MRT4530_13154C.1
aaaaaatatatatagaaaactatgataacatcttatcttgtgttgaaaaagaaagccaccttatgttagttccttttcagtttaatcattatcaacagtaaatggtactgtaggtaaacctcttgttattgaaatttttaattcatttataaaaaaaggaaaaaaaagagaaaagatttgcctgcaagctaaaaaggatagaagtgaaaaaaatgataattttttacttgcaacttacaatngcactccactattttcagatagttcgaaatgattactgattagttatttatcgaatggattactgattagttatttatctgtgcatagatactgatgtaacaaataactgtacccaa

SEQ ID NO: 6468 - DNA, 310 bp, Oryza sativa
  Clone ID: PAT_MRT4530_13155C.1
gccttgcaaattaactaggatccatttctggaaaatgggcgttctacagcttgtacaaaacttttaaatttttgcgggtagcattcgtcacaaccaaggcgcgcaattacccaaaacatgacgaagaagaaactcaacctcatggtgctattggtgaagggatcttttcaaacaggaaaacctggcttggtgttacacaaatgttcacacatttgctggcgaaaccaatcacatcataaccaatggtggtagggaaggcttcccccaaaaaatatgaggaacttacactggtcggaacccttcccggtga

SEQ ID NO: 6469 - DNA, 171 bp, Oryza sativa
  Clone ID: PAT_MRT4530_13156C.1
atggaggaaggatgcagaggaggcgcctcgagggtggcagcttgctggcgattgggaggagcgtgcggtgcggaatcagcgaacgaactatgcgaaatcccagttttacccttccacttgttcgacgaaggggaggtacctagaggtaccaaaagtcctgatggactgtaa

SEQ ID NO: 6470 - DNA, 2001 bp, Oryza sativa
  Clone ID: PAT_MRT4530_13157C.1
atgcatcctgctttgctactgctccccctcgcctccttgctgcatgccgcggcagcaattggccacaacgagaccagcaccagtggcaacacaagctgcacgccggcgagatgcgggaacctgaccatcagttaccccttctcgctcagcggcgtgcagccggtgtcctgcggctacccggtgttggacctcacctgcgacaaccgaaccggccgcgcgttcctcagcaggacgttcagggaccacctgtttcgcgtggacagtattttctacgagaataactcgctggtggcggccgtagagaccaccttcgccggcgacgccgactgccccgtcccggatttcaacgtgacatccagcctcagtccctacccgttcatcatcagcaacaccaacaagtatctcgcattcatctatgactgctcgattcctgaacacgttgggcagctgcaacggccatgtggaaaccggacgatgggagcttacatctccgacaagtggaacagcacaccaccgtccggggttcgagggaactgcaactctgtcagcgtgccggtgcgtgggtactatgatggaatgaagccggtgagtggacactacgagcaattgatcaaagatgggttcgtcttggaatggatgaggtcggtaatgggagatcaagactgcgatgggtgcagaaggagaggcggggagtgcaggttcgaacagctttcgttccagtgcttctgccccgacgggttgctctgctccaattcaacccgtaccaacacaacgtcaagccatccatcaggcaaggttaatcgaggaatcaagattgccgcaggaaccgcagcggctgttgtatgtctcggtatacttggcgttggctccactgtgttgtatacccggaggaagaggaaaagatctgcatcctttgaaggtctcatccatggagggacgccattgccatcactcacgaaagaattcagcctcgccggcttggcatatacccacatcttcacctacgaggagctcgacgaggctaccgacggcttcagcgacgcccgggagctcggcgtcggcggcttcggcacagtgtacaaagggatactccggaatggggacacggtggcggtgaagcggctgtacaagaacagctacaagagcgtggagcaattccagaacgaggtgggcatcctgtcgcggctgcgccacccaaacctcgtcacgctcttcggctgcacgtcgcagaccaacagccgcgacctgctcctcgtctacgagttcgtccccaacggcacgctcgccgaccacctgcacggcggcgcggcggcgcggtcgtcctccctcgactggccgacgcggctcggcatcgccgtcgagacggccagcgcgctggagtacctccacacggtggagccgcaggtggtgcaccgcgacgtgaagacgaacaacatcctcctcgacgaagggttccacgtgaaggtggccgacttcggcctctcccggctgttcccggcggacgccacgcacgtgtccacggcgccgcagggcacgccggggtacctcgacccgatgtaccaccagtgctaccagctgacggacaagagcgacgtgtacagcttcggcgtggtgctcgtcgagctcatctcctccaagccggcggtggacatgaaccggcgcggcggcgacgtcaacctggccaacatggccgtgcacatgatccagagctacgagatggagcagctggtggacccgcagctcgggtacgcgtcggacggcgagacgaggaggacggtcgatctcgtcgccgaggtggcgttccggtgcttgcagccggagcaggacgtgaggccgccgatcggtgaggtgttggacgcgctgagagaagctcagcggatggacaaggtaggctacgtcaaggacgacgccgggctggtcaagaagagccgagacggctctccggactgcgtcatgtaccagtggattagcccatccaccacttccaataacagcagctga

SEQ ID NO: 6471 - DNA, 415 bp, Oryza sativa
  Clone ID: PAT_MRT4530_13158C.1
cggacgcgtgatggaggacccttcttctggattcctctctacccccaacaatggcctgacaccgctgccctgcatgcaacccatgcagtgttctcactacttctcagcttcgccggtggtgttgaagatgatgcctcaacggccgatgcagcgaaggtatccactaggcaggtgctaggccatgtagggcaactaaacaactttggcaggtcttccttctccatctcgacaagaagatggtaatggagtgtctatatccccggagctctcttgatagaattcgtcatcatgtatcagttgttctattacaatagtaataatcagaactagtgctcttgttgtggagactactgtatcttttgtggtgaactagtatttgtcatggcatcaaaaaaaaaaaaaaaaaaaaaaaaaa

SEQ ID NO: 6472 - DNA, 998 bp, Oryza sativa
  Clone ID: PAT_MRT4530_13159C.1
ctggcacgcgcgacgtgccactgccacgcattcggctaagtgagctagccactgatcagaagaacacctcgatctccgagagttttttttcagctttagcttaagcaggatggagcaccaggggcagcacggccacgtgaccagccgcgtcgacgagtacggcaacccggtcggcaccggcgccggacacggccagatgggcaccgccggcatggggacgcacggcaccaccggcggcatgggaacgcacggcaccaccggcggcatggggacgcacggcaccaccggcaccggcggcggccagttccagccgatgagggaggagcacaagaccggcggcgtcctgcaacgctccggcagctccagctcaagctcgtctgaggatgatggaatgggagggaggaggaagaaggggatcaaggagaagatcaaggagaagctccccggcggcaacaagggcgagcagcagcatgccatgggcggcaccggcggcgcctacgggcagcagggccacggcaccgggatgaccaccggcaccaccggcgcacacggcaccaccaccaccgacaccggcgagaagaagggcatcatggacaagatcaaggagaagctgcccggccagcactgagctcgacacaccaccacaccatgtgtctgcgccgccggcgacggccgccacgtcaccttcctgaataataagatgagctagccgagcgcaataaaaggaaaaaaaaaatgttactgtcgtgtgatgagtgtgaatgtgtgatggcgttctccagtacggaccgtgtctgcgtgttgtttgtactgtgaaagtacgctgtgtatgtacgtcgtatgtgtacaattccgctttgttgaaatacgtataaatatatactgtgtgtacattatacggtgtatatctcatcgtgcatatgtacacaacgttttggtgtcaaaaaaaaaaaaaaaaaaaaaaaaaaagaaaaaaaaaaaaaaaaaaaaaaaaaaaa

SEQ ID NO: 6473 - DNA, 285 bp, Oryza sativa
  Clone ID: PAT_MRT4530_1315C.1
acgtcggcgcagccgcccggccggaagaattcgttcagcctgaagtccagtggcccgccggccttcgcggcaatcataaggctgacccctgacctcgtcgacaagatccggcgtgccgaggaatcgggcagcggcgctcgcatcaagttcaaccctaacatgtacaactcctcggagaacgaatggcatataaagctcattcgggaaacctgtcgtgccagctgcattaatgaatcgggcaacgcgaaccccttgcggtcggccgggccgtcgaccaattctcat

SEQ ID NO: 6474 - DNA, 297 bp, Oryza sativa
  Clone ID: PAT_MRT4530_13160C.1
atggcgatacagtcagcaaaaacaaataaaaaccagtggggcccacttgtgagcgctgctttttctctctcccccttctttgcatctctcggcgttcctcccatgtcagcgtgcggctcggcctcctcctatgctggcaacgtcctcgcctctcctcggggtgttgttggtcgtcgtcaacacgggcggccaatgcttgacctggccaagttagagaggttgttgcggcatgggaaggccgtcacggagttgtgcactggcaaggacggcgcgccaatgcccttgtcttggatttga

SEQ ID NO: 6475 - DNA, 1448 bp, Oryza sativa
  Clone ID: PAT_MRT4530_13161C.1
acagtaccaaattaaagtttattttccctttactgcatcattcttgagatattccagtagcaatattgattggtcgtaaaaagaaggatacacacagagcaggcaggaaatgatgccaattgtatctaaaaactagccctttttcagagtcagttgaagtatacaggacgcggtgtcaaggtggcctggggaaaaaacagcctaaaactcgccgattgtcaaccactaaaccaaacaacataagctaacacggagcatttatgaagtggaacaggcttcgagctttgggaggacgcctcgccatgcatcagcaatatctttagctaactttgcttggccaatagcaaattcttggaaaaagaagcaaacacaaggtgtcagccaggataggaagccaattgtatctaaatacattcccttttttagagtcagttgacttttacaggcctcggtactgtcggttgccaactgaaattatagttcaaaacttttctaatgttacacaaaaatcaattttaagagattataacatttataatccttctgctgaaataaatcttgatgctgcctgaaagcattcgctctacccaccatagttgctttaattgacttcacagtacccacttagcttgtgttaaggatttcaaactataagagtgagatgtattcccctctttgcaccctgatagttcaattatctctttgtgaaaccagatttttacaacagcattcttctctggaaggggaggtataaaaatgcctttgtacttctcagcaagacgatcatgcaaccactcaaagtcactatagcgccggataacaattttctcttgcccctcaaagtcaggcaggttggtcttggtgatgacgcgataggagatgtaggcctggactccggtacccatcttcacaggatctgtgacggagatcgacaggaacggcaccccagccgccgacgccggcgaccgggggctctgcgactggctcctctcctgcgacatgggggctcagttgaacctcccaaaccaggatgcggcggaaacagcaggacgacggcgtccccctgctcgccggatagagaatcggagatcggcgcatattctattgacaaatagatccagggcttgacgccgtaattcaatgaactctttgctaaaccggaatttttcaacagcattcttctctggaaggggaggtataaaaatgcctttgtacttctcagcaagacgatcatgcaaccactcaaagtcactatagcgccggataacaattttctcttgcccctcaaagtcaggcaggttggtcttggtgatgacgcgataggagatgtaggcctggactccggtacccatcttcacaggatctgtgacggagatcgacaggaacggcaccccagccgccgacgccggcgaccgggggctctgcgactggctcctctcctgcgacat

SEQ ID NO: 6476 - DNA, 322 bp, Oryza sativa
  Clone ID: PAT_MRT4530_13162C.1
aaaaacccactttttttttttaaaactggggaccgggtgcccgggtccttgccttttccttccccttaattccccttcttttttgaagttccttgcaatttttcattggtttgggcccccttttgccttcaaaattcacttgattccgacaacaccccgggccgattttattttttttttttccccgggcccggaaaaaattttttgtttttaaacttggggttagcatcctttttcttaattaattacccccccaaaacgtcccccttaaacagcaaactttgcccagccttttgagctcaagggcgcttttttttttttt

SEQ ID NO: 6477 - DNA, 432 bp, Oryza sativa
  Clone ID: PAT_MRT4530_13163C.1
gagcaaacggttctggcgatgaactatatatatatatatatatatcaattgcaagccaagagaccaaaatacatacaacatatcaccgacaccaaagtcagcctgcccgacctgagccccatactctattcgtgcattacattacatgatccaacacacacacacacacctcccccaatatgttataatagcactaacatctgcatttgtgcacgcgcgccacatgacacaacttactatattagagcacgtactagtagtagctcgggcctcaatcccgagcggtgatcagcgatcaaagtgaaaaaggatcaaggtgtgggaaattaccgcgcgtacatcacagagcttgatccacgagaccagtctcattaccaggcggagcgtccgggccttatcggccggtgcctgttccagaccatgatgccccca

SEQ ID NO: 6478 - DNA, 933 bp, Oryza sativa
  Clone ID: PAT_MRT4530_13164C.1
gctgaaaaggagaaatccctgcaaatttttgtcttacaatttgtacaaacattcagagattggggaccataccataatattcatttggttgatcaagaacaaggatctgatgaaacagttgtaggatgctctcacgggcatccttctgaggtcattcttatcctgattcaggagatgtctataataacatcaactattgcagaaagtggcaacagtccagaatcttctccgaactattcagagcaaccaggagatctgggattaagtactgaacggctacatgttttggagtgcttgacaattttgactcgttccatgcataactgtagagtatttagctattatggtggtgtaaagaaggttacttctctactaaaagctgcagttgctcagctcaaaatccagaacagtttgcttgctgcagataaccacgtctcatgccaagctgtagaaaatataaaaatgatgctaaatatgctcaaatacatagttacaataatttccaacttcatgaaattggagccaactatcctgaggattccccattttctcaattccactaagtgtgcctcatcaaaaaatcatttggccacagttactccaagcacttcagaaagtggtatttttgatacacttcaacgttggcaacaaagggctattgttcttgtgatgggagctggtggtgtcaattcgttagtagagcaacaaatgaagtcattgagtagactgaattcggagcagtggacagatctttcacttcattttatcacattatgcactttgcgatcaactatatctggaacccgtgcccagaatcatgttagaagcattggtggtttggaaattctacttgatgggctaggactcccttcaagtaaattttcagttttgaagaattcatctatcccaaaagatgaaaggtgcaaattttag

SEQ ID NO: 6479 - DNA, 1878 bp, Oryza sativa
  Clone ID: PAT_MRT4530_13165C.1
atgaccactgcgagcttggcgcaccctttagcgagctcgagctcgagctctactcgtgtggaggtggaggtcatgggcgatgtttttgtcagtagcgacgacatcgcacggaacctcatcattgactatggctctggcaagatcgcgctcaccgccgcgtgcatccacttccgtatccctagcgctgccctcaactcccccttccaccactgcgtcgcttcggtcctcccaacaattgctttgctgtcactaccaccgaagaagaagccacttccgccgctgtcaccgacggcggttgctaagaggagcccacaaccccctcagcctttcgtgcttcggccaggttctcaccatagtttatttccaacggttttccctgaggagaaaggagaagacttggaatatacaaataagacagcattggctgcagagggttcaaatgagaaagctgcggtagatgcaaatgaagtttcattgcctctttctaatctaagcaacactcgacaacattctgatagagaaaacaacatgcctggaaaacatggcaacgatggcatgtcaaaagacatgggacgtgctactagattgaagagactgcaaacgccaatcaacttatttgaagatgaatgcgttttctgccattcatttagaacacctcctcagtttcatggtccaatggcgcattatcaaaagggaaagcttgtgtccagtgacaatggcagtccatgcccaacagatatcatttatgttcataagaaatgcctggagtgggccccgcaagtattttacgaaggtgataccattgtgaacttggagttggaaataaaacgtgccgcgaaattgaagtgcaaaagatgcaagcttcctggagcagctcttgggtgttattatacaaagtgcaataggagctatcatgttccatgtgcaatgatgactttgaattgccgctgggatgttgataacggttgtgttatgtgccctgaacatgcaacgatgccactaccatgtgataagataagctcgccaagaaatgagagtggcaattcttcttccttccctcagagccaatcgtcaattgaacaaagcgattccgctgattgcgaatgggaatatcctataatagatcaatggaacacatcaagttctttgtctcaaggccaatacttggacaaagaaggaatttccactgacgaatacaggaaagaaaagcaaacagatcacctttacacagaaagagattgcccctcggatctgtgggttttgcttggttcagctttaagtgaatccgagaaggattccttgcaagagtttgcgtcttggacagatgcaactgtggtcaacgagtggactgaaaatgtgacccatgttatcgttggaaaaagtgctggtagtgcatggagccgatcttatgaggtcctgatggctctactgtttgggaaatgggttgtcacggttggatggattatggattgcttggtaaagtttattccaagtccagaagcttcctttgagttaagatttagccatgactcacgtgcatcaattggtggaaacaagaaaagaagaaatcaagcttctgaagggagcctgattgcagctgctggagggcagatactggagacaaacggcggctcgcatttgctgcgtgaaaacctggagaaagttgctgtgaagccatgctacttcgtctacgacgggggcgctccaagggatttcacccaaggattgcttgatgatctccctaaggagatggaagagggcagagagtatgctgcctgtggagctcaggtgatcagccatttgagggtgtttgatgccattgcggcttatgatgcacagattctcagccacaaggatcacttcaccccggatgtgtaa

SEQ ID NO: 6480 - DNA, 1389 bp, Oryza sativa
  Clone ID: PAT_MRT4530_13166C.1
atggggaggtcggtgctggagatggtggtggcggcggcgcagggcggcggcggcgcggcgggggagtcggtgttgggcatgttcaggtacgccgtgctgcccatcgccaaggtgttcgtcgtctgcttcatggggttcctcatggcgtccaagcgcgtcggcgtgctcaagcccagcggccgcaagcttctcaatgcgcttgtgttctctctgctccttccttgcctaatatttgcgcagctcgggagatcaatcacaattgacaagatcatggagtggtggttcattccagcaaacattgctctgggtgcagtctctgcatctttggttggacttatagtggcattgattgtacggccgccttatccatacttcaagttcaccatcactcacattggaatagggaacattggaaatataccacttgtccttatctcggcattatgtcgcgaccaattaaatccgtttggtgactcgaacaaatgtactcaagatggaaatgcatacttatcatttggtcaatgggttggtgccattattgtttacacatatgtgttcaagatgcttgctccaccccccgggcagacctttgacagctgcgatgaggagagagataaacttccaattaaggctcctaataccatgtcaagtgtagcgaaatatccatcaagtgctcatggcaatacacatgaggaagagcccctgctatctatagaggaggaggaggaggaggaggggcaggacgttcattctttaggttcaaaaataatgattcctatcaagggcatggttagattcctacaaaagaagcagctcctccaaccaccaatcattgcatctgttcttgcaattactctcggtgttgtgccattcttgaagaatttgatcctcacagatgacgcgcctctattctttttaacagatagctgtctcattcttggggaagctatgattccgtgcattttgcttgccgttggtggcaatcttgttgacggccctggtgaaggaagtaggagacttggggttcggaccaccgtcgcgattatatttgcacgcttgatattggttccaattgctggtattggcatcgtctcatttgctgacaagcttggatttattccaaaaggagacaagatgttcaagttcgtcctgttactgcagcactctatgcccacatcggtactatcaggagtatacctattactatcttcgagctcgcttgcttctttctcgatgtcaaatcttgatgactggcagccagctgagtgtatataccataatgctcaagctgaccttgtgaactatgccagatatagcgaccagtcgactctttatttgcctagcacgctcaagattgagcatgctgacttcagaggtgagctcatctaa

SEQ ID NO: 6481 - DNA, 1821 bp, Oryza sativa
  Clone ID: PAT_MRT4530_13167C.1
atgaccactgcgagcttggcgcaccctttagcgagctcgagctcgagctctactcgtgtggaggtggaggtcatgggcgatgtttttgtcagtagcgacgacatcgcacggaacctcatcattgactatggctctggcaagatcgcgctcaccgccgcgtgcatccacttccgtatccctagcgctgccctcaactcccccttccaccactgcgtcgcttcggtcctcccaacaattgctttgctgtcactaccaccgaagaagaagccacttccgccgctgtcaccgacggcggttgctaagaggagcccacaaccccctcagcctttcgtgcttcggccaggttctcaccatagtttatttccaacggttttccctgaggagaaaggagaagacttggaatatacaaataagacagcattggctgcagagggttcaaatgagaaagctgcggtagatgcaaatgaagtttcattgcctctttctaatctaagcaacactcgacaacattctgatagagaaaacaacatgcctggaaaacatggcaacgatggcatgtcaaaagacatgggacgtgctactagattgaagagactgcaaacgccaatcaacttatttgaagatgaatgcgttttctgccattcatttagaacacctcctcagtttcatggtccaatggcgcattatcaaaagggaaagcttgtgtccagtgacaatggcagtccatgcccaacagatatcatttatgttcataagaaatgcctggagtgggccccgcaagtattttacgaaggtgataccattgtgaacttggagttggaaataaaacgtgccgcgaaattgaagtgcaaaagatgcaagcttcctggagcagctcttgggtgttattatacaaagtgcaataggagctatcatgttccatgtgcaatgatgactttgaattgccgctgggatgttgataacggttgtgttatgtgccctgaacatgcaacgatgccactaccatgtgataagataagctcgccaagaaatgagagtggcaattcttcttccttccctcagagccaatcgtcaattgaacaaagcgattccgctgattgcgaatgggaatatcctataatagatcaatggaacacatcaagttctttgtctcaaggccaatacttggacaaagaaggaatttccactgacgaatacaggaaagaaaagcaaacagatcacctttacacagaaagagattgcccctcggatctgtgggttttgcttggttcagctttaagtgaatccgagaaggattccttgcaagagtttgcgtcttggacagatgcaactgtggtcaacgagtggactgaaaatgtgacccatgttatcgttggaaaaagtgctggtagtgcatggagccgatcttatgaggtcctgatggctcgactgtttggaaaatgggttgtcacggcacagaagttgttctcgggactgaacttttgcctcagtgcctacataaaccctgacgacagacaacacatacagagcctgattgcagctgctggagggcagatactggagacaaacggcggctcgcatttgctgcgtgaaaacctggagaaagttgctgtgaagccatgctacttcgtctacgacgggggcgctccaagggatttcacccaaggattgcttgatgatctccctaaggagatggaagagggcagagagtatgctgcctgtggagctcaggtgatcagccatttgagggtgtttgatgccattgcggcttatgatgcacagattctcagccacaaggatcacttcaccccggatgtgtaa

SEQ ID NO: 6482 - DNA, 1953 bp, Oryza sativa
  Clone ID: PAT_MRT4530_13168C.1
atgaccactgcgagcttggcgcaccctttagcgagctcgagctcgagctctactcgtgtggaggtggaggtcatgggcgatgtttttgtcagtagcgacgacatcgcacggaacctcatcattgactatggctctggcaagatcgcgctcaccgccgcgtgcatccacttccgtatccctagcgctgccctcaactcccccttccaccactgcgtcgcttcggtcctcccaacaattgctttgctgtcactaccaccgaagaagaagccacttccgccgctgtcaccgacggcggttgctaagaggagcccacaaccccctcagcctttcgtgcttcggccaggttctcaccatagtttatttccaacggttttccctgaggagaaaggagaagacttggaatatacaaataagacagcattggctgcagagggttcaaatgagaaagctgcggtagatgcaaatgaagtttcattgcctctttctaatctaagcaacactcgacaacattctgatagagaaaacaacatgcctggaaaacatggcaacgatggcatgtcaaaagacatgggacgtgctactagattgaagagactgcaaacgccaatcaacttatttgaagatgaatgcgttttctgccattcatttagaacacctcctcagtttcatggtccaatggcgcattatcaaaagggaaagcttgtgtccagtgacaatggcagtccatgcccaacagatatcatttatgttcataagaaatgcctggagtgggccccgcaagtattttacgaaggtgataccattgtgaacttggagttggaaataaaacgtgccgcgaaattgaagtgcaaaagatgcaagcttcctggagcagctcttgggtgttattatacaaagtgcaataggagctatcatgttccatgtgcaatgatgactttgaattgccgctgggatgttgataacggttgtgttatgtgccctgaacatgcaacgatgccactaccatgtgataagataagctcgccaagaaatgagagtggcaattcttcttccttccctcagagccaatcgtcaattgaacaaagcgattccgctgattgcgaatgggaatatcctataatagatcaatggaacacatcaagttctttgtctcaaggccaatacttggacaaagaaggaatttccactgacgaatacaggaaagaaaagcaaacagatcacctttacacagaaagagattgcccctcggatctgtgggttttgcttggttcagctttaagtgaatccgagaaggattccttgcaagagtttgcgtcttggacagatgcaactgtggtcaacgagtggactgaaaatgtgacccatgttatcgttggaaaaagtgctggtagtgcatggagccgatcttatgaggtcctgatggctctactgtttgggaaatgggttgtcacggttggatggattatggattgcttggtaaagtttattccaagtccagaagcttcctttgagttaagatttagccatgactcacgtgcatcaattggtggaaacaagaaaagaagaaatcaagcttctgaaggggcacagaagttgttctcgggactgaacttttgcctcagtgcctacataaaccctgacgacagacaacacatacagagcctgattgcagctgctggagggcagatactggagacaaacggcggctcgcatttgctgcgtgaaaacctggagaaagttgctgtgaagccatgctacttcgtctacgacgggggcgctccaagggatttcacccaaggattgcttgatgatctccctaaggagatggaagagggcagagagtatgctgcctgtggagctcaggtgatcagccatttgagggtgtttgatgccattgcggcttatgatgcacagattctcagccacaaggatcacttcaccccggatgtgtaa

SEQ ID NO: 6483 - DNA, 246 bp, Oryza sativa
  Clone ID: PAT_MRT4530_13169C.1
gtcgccacctcgacataaagaacaggctgctttgggagattacccggagctgaagaatactgggccatatcgggaggacaggccacccagagtatatacggaccgaagctctgcggggagcagatgcctggtagcatctgtgacaccgcgctgccgtgtttccttttagatgaaccctaggagtcggtctaatcagcagatggactgcagttggttttctggttcgacggtaggccaaaaagttgg

SEQ ID NO: 6484 - DNA, 1572 bp, Oryza sativa
  Clone ID: PAT_MRT4530_1316C.1
atgggaagaaggggcgcgggcgcgggcgctgcggtggtggtggtcgcggccttcgtggcggcggccgtggcgtcgggggacacgctcgccgatctcggcggcgccgccaaggggatcgacagcgtgccagaagtgaataacttgggaccatgggcgaaggggcttctgaaagggatgccggactcggcggcagggccagcagagggccccatcgcaaagtatccgctggttctggcagaggagaggacgcggcggccggatgttcttgaccaccttaggatgtatggaggagggtggaacatcactaacaagcactattgggcgtctgtttcattcacaggaattgctgggtttgttcttgctgctgggtggtttatttcgtttggaattgctttagcagcaagcagcttttggtaatcagtagtagacaaagaatttgtttttcaagcagttttactgctctttaacagtgctgcaaaggatacctgtgaagcaatggatgaatgggcacaacatcctcaagcagagacagctctcagcaacatccttccatgtgtagatgaaagcacaaccaatcaaaccttgtaccagagtaaacatgttgtggtaattcttgtaggcatagttaatagggctatatctgctctttcaaatcgaaggccacatcataaacatcctgggcagttcatgccttacctgtgttctccctatgatgcgaacctgactgatcggcagtgcaagtctagggaggtcaccttcgataatgcaaccacagaatggttagtcgctttgatttgaatagctgcgttaatgcctgttcttgcattcttgggatatgttttggagctgtatggacaaagaagtacagtttatgtatttgttaccttatgctggacagtagtggcaactctcttcattcttctagggattttcctgatattgaacagtgctgcaaaggatacctgtgaagcaatggatgaatgggcacaacatcctcaagcagagacagctctcagcaacatccttccatgtgtagatgaaagcacaaccaatcaaaccttgtaccagagtaaacatgttgtggtaattcttgtaggcatagttaatagggctatatctgctctttcaaatcgaaggccacatcataaacatcctgggcagttcatgccttacctgtgttctccctatgatgcgaacctgactgatcggcagtgcaagtctagggaggtcaccttcgataatgcaaccacagcatggctgaactatacatgcacagttcctgactcagatttgtgctctggccccagaaccataactccagagatatacagtcagcttgttttagctgccaatgactgcaagttcgtccgcaacacattcagctccatcgcttcgcagtactgccctcctatatggcgcgacctcagcttggtctcagcaggcctggctctcattgcctctggcttaacacttggcctcctcttgatgctttttgcggaccgcccccaaagggaggaggtgtccgagctgccatcagggtcaaggatcaccccagtagactgctctccatga

SEQ ID NO: 6485 - DNA, 314 bp, Oryza sativa
  Clone ID: PAT_MRT4530_13170C.1
gcgggccctaattgggtgaaaaatttttttttttctttcgggcccacttgtattttggccttcccaggggcaaaatttcttgttttccttaaaacccaagagttttgaaacccccctttaggggacctttgcgggaaattcttttttggcgcctcccgctgggggggtgcttccctggaaattgataaaacaggggttgctttttacctgggactttgcaacacacatttttcttttctttaaagtttggttccatggttcatttggcctttatgaccttcccaaactcctttttgtttttttgcccttcccct

SEQ ID NO: 6486 - DNA, 300 bp, Oryza sativa
  Clone ID: PAT_MRT4530_13171C.1
atggccgcagctgctctccggtgtcgcttggcagccgctgcgtcgcccggccgccgattcctctgccgccgcgcctcaggcgatcagcagcaggaaagggatgcgctactgaggtgttgcgtggaatccaaattgcacagctacaaggcgactatggaatatgctgatgaatttaacggcagtctaaggcgtgcaatgttcggcatgaccgcgctctccgttttgtgcccttttgttggactagtcagtggattatgggcatcctcgattgcccttacagacgacgacgacgatgattag

SEQ ID NO: 6487 - DNA, 300 bp, Oryza sativa
  unsure (1)..(300): unsure at all n locations
  Clone ID: PAT_MRT4530_13172C.1
cgnnccttttgaaaaangnaagtcggnccccngggaaagggtaacctcggcagagagcgcgaccacncncgtgccccgaaacggaatcgggtaaagatttcccganccgggacntggnggttgaccgcgacnttaggaantccggacacgccggcgggggcctcgggaanagtnatctntcctgcttttctgcccgccaaccccgnaancngttcntccggaggtnnggtccncccgccngancancacccnccctcgcgcggcgtccggtgcgccccnggctggtccctnaanntcccg

SEQ ID NO: 6488 - DNA, 492 bp, Oryza sativa
  Clone ID: PAT_MRT4530_13173C.1
atggggcagcagaggcaggcggcggcggatcaggccgggcgggcggcgggcggcgcgtgcgtgtgggcggtggcggcggcgctcttcctcgccgtgctcgccggcggcgggtgcctggtgttctacctggcgctgccgccggcggaggtgccggaatggctgcccgtcgccggcctctcgctcgtcgcgctcccgtgggcgttctggatcgccacgtgcgcgtaccggctctgctgctgctgcttctcgtcgtcgtcggcgccggagaaggcgaacgcggcggcggcggcggcggggcacgtggagcggcagccgtcgtcggcggcggtggcgccgctgccgagcagcacgaacctcaagagcgcggtgaggtcggccatggggtcttacagccacagcggcacgcggcgggtgcacttcggggactccaccgtgctcggcgagaaggccgccggcgccggcgcggcgagcccgccgtggtggaggaggtag

SEQ ID NO: 6489 - DNA, 1784 bp, Oryza sativa
  Clone ID: PAT_MRT4530_13174C.1
ggctcctcgtcactcgcgccggcccacacccctcctcccgcctggcggcgatccggcgggagcccgccatggcctcctggctcaaggtcgccgaagacttgcttgaagttgtcgaccggagggcgaagattgtggctaccgagttgtcagatgagcagtctagccctcagccttcaggttcaagcagtcaagaaggtcaagcgaagaagggaaagctgagggagaagggtccattgaagcttgcaactggggatgctggtagcaggacggctgctcagaaagagaggaagagtaggcaaccaccgcgggaacggattaagattgagaagatcaggccttcgccacctgttgattcatcaagcgtcgacgctagtgccagtaaacctgatgtctcctcaagtgatgttaagggactggatgatgatggtggagcagagaaagaagagaaggtcgtcgttgatcgtaagaatgatataggtgcagaggttgttgatactgaggttgaagtccaatcaacagagagaagtgctgaggatgcagccattgttgtggatggtgctgcagattctggaaattcagagggtgctgctgaaagctctgctccttccgttccagatgaaagatgtgagccaagcatcagtaaccaggatgctgagatcgtttcagctgttaatttggaggagaaagactcagctatggaagttatccatgagaaaaatatcaaggaagtaccagacacacaagtttctggaaaatcccaagattccaaacgagagggtttgtctgactcaccggagagtacggaaaatcagcaggaacataagcttgattctggttctgtgaaagaccaagaccaacttgaggaggctcggggtttgttaaagaatgttgtgaaaactggccaatcaaaagaagctaggttagctcgggtctgcgctggactttcatcccgcctccaggagtataaatctgagaatgcacagctggaggaacttcttgttcaggagagagagaaatgtagctcatatgaagctcatatgaagcaactacagcaagaactgtcaatgtcgagagtagaaggttcacgagctgaatctaacatggttgatgctttgactgcaaaaaacgctgagattgagtctctagttaagtcactggactcttggaagaaaaaggcagcagcttcagaagaaaagcttgcagctttacaggaagatatggatggtctcaagaggaaccgtgaacttactgaaactagggtcatccaggctttacgagaggaacttgctacggtagagcgcagggctgaggaggagcgtattgcacataatgctacaaagatggcagctgttgagagagaagtcgaattagagcatcgagctgttgaagcatcaaatgctcttgctagaatccagagagctgctgatcaaagctcatctagagcaatggaattggaacacaaggtggctgtgcttgaggttgaatgtgcatcgctgcaacaagaactacaggagatggaagctcgtaatcgccgtgctcagaaaaagccttctgaagaagctaatcaagttattcagatgcaagcatggcaggaggaggttgagcgtgcacgccaaagccaaagagaggcagaaaccaagatatcatctttggaggtcaaggctgagttacagaagatgagagttgaaatggctggaatgaaacgagatgcagagcattattccagacaggtatacacaaagctcaatacaaatatgcagaaagcaccctcaagaagggagtaa

SEQ ID NO: 6490 - DNA, 1757 bp, Oryza sativa
  Clone ID: PAT_MRT4530_13175C.1
tggatcccccgggctgcagggctgagcgaccgtcccccgacgccgacgccgacccccgtctcgtgagggagggagggtcatcgccatcgaatcccaaaaaatcacccgccgccgccgccgccgcatcctcgaatccaatcattcaatcaaggaggaggaggaggatttggatttggatttggatttggatttggaattagggttagtgctcccccatttttttgagggcagtcgatcgagcttagctagggttggatgcgatgacggcggcggcgtcgtggtcccggtcggtgacggagacggtgcgggggtctcaccagtacacggtgaaggggttctcgatggcgaagggcgtaggggccgggcggtacgtgagcagcgacaccttcgcggtgggcggctaccactgggctgtctacctctaccccgacggcaagaaccccgaggacaacgccaactacgtctccgtcttcgtcgccctcgcctccgacggcgccgacgtccgcgccctcttcgagctcaccctcctcgaccagtccggccgcggccgccacaaggtccactcccacttcgaccgatccctccaggccggaccctacaccctcaagtaccgaggctccatgtggggctacaagcgcttctaccgaagatcactcttagaatcatccgactttctcaaggacgactgcctcgttatgaactgcactgtaggcgtcgtcaagaaccgtctcgaaacaccaaagaacatccacatcaatattcctccatccgacatgggccgttgcttcaacaacctcctcaatctccgcatcggctgtgacgtatcttttgaggtgggtgatgaaagagtccaggcgcacaagtggattcttgctgcccgctcccctgtattcaaagcccaattctttggtcctattgggaatcctgacctacacacagtcattgtcgaggatgtagaacctcttgtcttcaaggcaatggtgaatttcatatactctgatgaacttcctagtattcatgaactagctggatctgtctcaacttggacatcgacagtagtagtacagcatttgttggcggctgctgacagatatggactagatcggctacgtctgctatgcgaggaaaagttatgtgatgaactcactgctgaaacagttgcaacaaccttagccctagctgaacaacatcattgtactcagctgaaatctgcttgtctgaagttcactgctgttcgggaaaatctgggagctgtgatggagacagaaggatttaattacttggaggagacatgcccgtccctgctatctgacttgttagctactgtcgcagtagtggatgatgatgctgcgtcattcaaccggaagaggggagtcggtggtaacgaaggagcgaatcctgtggagagcgtggaggctagtgataggcgcatccgcaggagggtttagccgggttagaactaatgtaggctttcttcttggttcctcctctctatgcttgccatcaactgtacactatgatcgtagtttgtgtgatgtgctgtcatgttattagtggtgaaagtttaatttggacaccgttaaccaacctcttgccgtgtgaataatttcctattttgactacgccgtttcgcagcagagattttaaaaaaaacagtggattggatgttatgattggtatctgctgattataagatccggctagcatttccaaaaaaaaaaaaaaaaaaactcgagactagttctctctctctctcc

SEQ ID NO: 6491 - DNA, 360 bp, Oryza sativa
  Clone ID: PAT_MRT4530_13176C.1
ccacgcgtccggcaacattttaaacaaaaacataaatctcgcctcaaagcgaacagtgaaagcgactatctaaagatgcatatctttgggaagaccctcagcggcaagacacattaccctcgagggtgagtgcttggacaccatagacaatgtgaaggccaacatccaggactaggagggcatactcccggaccagcagcggcctagtcctgatggcaagcagctagaggatgggcgcaccctggccgactacagcattcagaaggagctcaccctccaccttgtgctgatgcatatggcaggcatgcggatctgtttgaaaacactgactggggagagcatcacctcttgagttgagtt

SEQ ID NO: 6492 - DNA, 269 bp, Oryza sativa
  unsure (1)..(269): unsure at all n locations
  Clone ID: PAT_MRT4530_13177C.1
cccggttcgncccagcgttcgcccagcgtccggttgattcacacaattggtcatcgcgcttggttgaaaaccatggcgcgaagctaccgtgtgccgggttatgtccnatcacgccaggnaaccatgtgaaatgcaaatttgcatgtgtatcggctgtacctgtaaatatagaagaaagcagaatcttttgctttgtgatttttcttttctttttgtgtacagaccacagatacaagcaacagagtatcagaactacttggtttctggtg

SEQ ID NO: 6493 - DNA, 444 bp, Oryza sativa
  Clone ID: PAT_MRT4530_13178C.1
atgacgacgcccctcaaagctacgcggcggcacgacaacaggtctcctcgagcagctgcggtgcaaatccagcccgccgctgtcccctcctcatcattggattggggcaaggagctcgatggccgcgcgcgaggatgggtgaggagctgggcggcactgagccagcgacgagctccgacgaacgggaggcaatctcctcccacgcgcaggcgtgccgccatctccgccgccgtacccccggcggactggttgtatcagccctcgctgaagttgcagcagcagcggcggcagcggcggcgttgctgggcgcgcggcctcttgccgcgagctagtgagccgaggcgcatattctcctccaagcttcagcgacatcggttggccctcttggacggcgtcaatgcccctgacctccttcacatttgtgtgctgtcctcaatgacctag

SEQ ID NO: 6494 - DNA, 435 bp, Oryza sativa
  Clone ID: PAT_MRT4530_13179C.1
atgtcgctgaagcttggaggagaatatgcgcctcggctcactagctcgcggcaagaggccgcgcgcccagcaacgccgccgctgccgccgctgctgctgcaacttcagctgcctatcaaccgcaacggtaggcaccattgtcaccacgcgcggggagcggcgaaccgagcggattcgtgctcgtgtgcaccgagggctgatacaaccagtccgccgggggtacggcggcggagatggcggcacgcctgcgcgtgggaggagattgcctcccgttcgtcggagctcgtcgctggctcagtgccgcccagctcctcacccatcctcgcgcgcggccatcgagctccttgccccaatccaatgatgaggaggggacagcggcgggctggatttgcaccgcagctgctcgaggagacctgttgtcgtgccgccgcgtag

SEQ ID NO: 6495 - DNA, 758 bp, Oryza sativa
  Clone ID: PAT_MRT4530_1317C.1
gttaatagggctatatctgctctttcaaatcgaaggccacatcataaacatcctgggcagttcactgccttacctgtgttctccctatgatgcgaacctgactgatcggcagtgcaagtctagggaggtcaccttcgataatgcaaccacagcatggctgaactatacatgcacagttcctgactcagatttgtgctctggccccagaaccataactccagagatatacagtcagcttgttttagctgccaatgtaagctatgctctgtaccattatgcccctctcatgctcaatctccaggactgcaagttcgtccgcaacacattcagctccatcgcttcgcagtactgccctcctatatggcgcgacctcagcttggtctcagcaggcctggctctcattgcctctggcttaacacttggcctcctcttgatgctttttgcggaccgcccccaaagggaggaggtgtccgagctgccatcagggtcaaggatcaccccagtagactgctctccatgacgagctcagtctctatggtcattcagactagtatagcaattgcctgtaatagttaggaaaagaagaaggtgaagcactggggcaaagccccattttgcagtggagatgatctaggtggatgagtgcttccttccgtggtatacatggtatgtttcagggaatagttgtaaaggctaatgcctaatggcaaacaaaatttgggcaaaaccccactatgatatgaagagcaatgttctgt

SEQ ID NO: 6496 - DNA, 315 bp, Oryza sativa
  Clone ID: PAT_MRT4530_13181C.1
atggcgccgatgacttccaagatcgctggtgccctcacgttggtgctgctcctggtgctcaccgccgtgacggaaggccaagtcctgccgactccctgctgccgcatcgactgctgcgacggcaagcccgagtgctgcgatcccggcttcgccgccaccgtcgtcgccatggctgtcaccacgcctgcggcggctgtgacgacctccaaagcacgaccagcggcaacgactgccggcaccaccatggctcgtaagctggtgctgctgctgatgtgctgtattgtcgaggccacaatcaggagtctgcgagcgtga

SEQ ID NO: 6497 - DNA, 393 bp, Oryza sativa
  Clone ID: PAT_MRT4530_13182C.1
atggcaaatcagggcgatgacctcaatgacaacacgcgtgggtggctacgtggatctggagtggccgaggtgagttcatcgcatggtcttcctctcctgagcacttcttctctggccgccagagcttggggagacaccggggtgtggggtgtgggagttgcgggggcacaaggaggcgtgggcatgacctccccaacgcgatttcgagtcgtcacccggtcgacgcactatgaatggccccgtgagaagagtgagagccaagtagacaaagtatcctcgtcaattgtattcaaagataggaggacagacacagcacaatggacagaactaaaagctatcagagctatagcttctgcatcaaccatccaggctgtgcttgcactgacactgtag

SEQ ID NO: 6498 - DNA, 2435 bp, Oryza sativa
  Clone ID: PAT_MRT4530_13183C.1
atggcgggcggcgggcggggcgccgggctgccggcggcgggcgaggccgcgaaggccgggcgggtgggcgtggggacgacgaagagggccagggacccgtcgcccaactccaaggatcccaacggtgttgttgctaacttgctatggcgtcgctatagtggtaaggtggtagcagaggtcaaggcatccattctgccttatgttgcctccaccttagaggcgaagcaagtggagaaagggaaagaagaaggccttacaggcaaaactagtagagaaagggaaagaagaaaagggggttttgttggagtgattgctgctgagaagaaaccagcactgcagcttcatggcgatgaaaaatatcagaagaaagctgggaatgatcctgtacctcctaccattgatgatacatccaaaactggaggtcttcatttgcatggtggtcatgtatcacaaagcccacctgattctaatgctttgagttcgcaacgatttgggagttcatctcctggtggagatatgaagaacaaaaccagaaagcgtacctgtaccttttatgctcaagggcgatgcaagaatgggaagagttgcacttttcttcatgaaggggaggtatctggttctgataaccaggtttatggaaatcatggaggcactggagaaggatctgaaatacaacatccatccagctcaaaagagcaccagttcaaaaattcagcggggtcatcccaacatgagatatataggacccttgttcatgcatatggtgaagataatagggggttgacacatcccgttgttaaacatagttgtcacatgctaaaggcttcgcatggtttcaaaattggtggttcattgactgcaaatcctactaatgaggtggttcagcttccagtagttcaagagaagaatcatgaaccttatttcatgggacatcaaattagtttgggcactaacaactgtttgaatgacatgggtgcctattctagattgcgcctagatggaggaaagctgcagtttgaagtggccaagggtgacagtccaagggattcacatctatcaagatcttaccttgaaaagaaccccttaaagcctgattatcggtatcaaccgtttgactcaactatttcattagatcctcaccaatatagcaagaagttgtcagcttatggtggagcaacagagaatcttcctcacaaacatcaggaagaaaaaagttcaagccatgtctcatacagtttgaatagttatacaggattcagaaagcaaggtcatgacagctctgattttttcttggttaatcagtctctccgagcaacttctcaccatggaaccctgcctcttcatcaattaacacctgataaggatgccagtcaccataaaggtgctgattttgacaagggtggtacctctaggtctacattacatgtgagcagttcatctcaacctgtggtagcatcggctgggaaactttccccaatcaaggatgaggtttggataacttcagtgccttttgtaccttcttttaattttcctgattttcctggcagtacatcaccttcaaaaagtcagtatgacccacttgtcgacagtatcgaccctcccaaagttgaaagtttaaataatctgaagacctcaaacatatcctgcagcatttcaagccaacatgtagatacgaatgttataagagggggaagtcttgaaaaaccattgacttttgctgacaagttggcaaggaatgtatctgctaaaggatcaaatgattttggtttgatttcatatgataggggacacagctctagcctggatggtgataatagggtgaaaacctgtgaaaggaaaaatgatgcatcacttaacaatgagaaatcagactttcgttttcatttggtggagcatgtaaaggagctggtgaaaccaatctggaaggaaggcaatttgagtaaagaggctcataaactgattgtgaaaaaatctgttgataagatttttgcttcacttgagccaaatcagatgccagagactgagaaggcgataactacttatataacagcctctgcaccaaagatagaaaaacttgtgaaggcatatgttgatcgttatcgcacatcatgagatccaggcttctaattatgagctacaacattgaagagatggggtttgagcctgctggcctaccaatgcgttttgttgctgtgctagatgttttgagtaaggtactctgttacatgaacctgtttggttttgtagacttcagtctgggctccctagcagcatcttaacatggtggatgtttaatttaatatgtttttgcatgtgagctgagaggagatctaatgcaaccaagacagaatctttattgcatgtgtggttaatctactgggttaaggaatgatgcttcgtaatgcaaaaaaaaaaaaaaaaaaaaaaaaaaaaaa

SEQ ID NO: 6499 - DNA, 379 bp, Oryza sativa
  Clone ID: PAT_MRT4530_13184C.1
ggacggcgttccgctttagtcctacaacaccatggcttccttaaatcgccccatagttttcttaacagaaggttggttcctctggggcaatggctccttagcccaccacctattaggccagacccctagtcaatggcaaacttttctttttggaaggccgggaggatgtaaattggataggttgcaagcattttagccaattcggagtgggaggcctcaagctggcccaactgattcttacgatgtttttaataagtggtttcaaggaaccggattatttgttgtctccacaggttattaaaccaaaaggcctactcctaccccattacactaatggggctttcttagaatttattatccaaggggggaggttaccagg

SEQ ID NO: 6500 - DNA, 254 bp, Oryza sativa
  Clone ID: PAT_MRT4530_13185C.1
ggacaggattcagacaccggcgaccgatgagaaggtagcttcagaggcgcgtcgttctgctgtgccgtctgtgctgtcgctgctttgtgagctggcacggaccctaggtggcttgaggctctagacggatgacgacgagcacgctggggcgcaggtggtggttggtagcttggattctgacttaaaagcgttcagtcataatccggcacacggtagcttcgcgccactggctttttcacccagcgcgatgacca

SEQ ID NO: 6501 - DNA, 348 bp, Oryza sativa
  Clone ID: PAT_MRT4530_13186C.1
atgaggaccacgcgacgcgacgggtccgtggcggtggcgaggccgtcgcgctgcggttcccgatttcgggggggacccagcgagctctcgctctctctcgcgcatgggacggggcgctgggcgaacgtgcgcagcggcctcgggctccggcgaccgcatcatttggaacctgagctccgtctgtgccaccacgagctcgtcggccactgggctgctacggccaccgctcgggagagaggagaccacggccggcgggaccccgagctctctcgtcgcgaaagagggccaagcctagcggcgacagtcctcttgctccagttcctcgtcatctttgtcgtgggagcctga

SEQ ID NO: 6502 - DNA, 816 bp, Oryza sativa
  Clone ID: PAT_MRT4530_13187C.1
atggcggcggacggcggcgcgctgaggcggctgttcgagaagccgctgccggtgccggagaacccgacgctgctggaggcgctgtcggcgtgcaaccatgtgcaccaccgcaagaagctcgtcgacacggcctccttcaccgagatcttcggcgagctccacttccaggagaagccggtggacgtcgccgccgccgcccggttcctgccgccgccgccgccgcctgttcgcgcggcgtcgtggatcgacgtcgccgacgacaagagcaaggacggctcgtccctggacgcgctgctccggccgaagtcgtccgccgtcaagaggagcgccagcttctgcctcaagagctccgagtcgtcgctgctgctctgcaccgaggggctcgggacggaaagcacggtggacgccgacgacatggtcaaggacggcgacggcgacggcgaggccatcccccgtggcgaggaggagacggacggcgtggaggaggacgacggcgcggggagggagaagcggggcacgccgacgctggcaccgacgccgccgacgttcccgccgccgatacggtcgatcgggcgcggcgggaagccgtgcgtgtgcttccggtcgttccgggcggaggggaggttcgtgctgatggaggtggtgatcccgggaaggagctcctgcaggcgacgcgcgagggcggtcgcctcacgctgcgcttcgccaacgccgcggccgtgggcggcggcggcgaagcagacgacgatgtcaacgacgacgacgtcgatggcggcgagaccaagaatgcatgcgcagcaagagatgatatgctag

SEQ ID NO: 6503 - DNA, 2202 bp, Oryza sativa
  Clone ID: PAT_MRT4530_13188C.1
tttctttcccctctcctcctctcctctaccttctctctaaaagactggatacagaacaaaaaaaagggaaaaaacagaaagaaaggaaagaaagaagaacacctaccaagcaagtcttggtctttgagttcatgggctgtggaattgttcccaggaatcccctctggctctgaaaagattcacaccgagcaacagttctttgatttttttccccctttgttttgctgaagaattgcttgtacagaactgcttctttcctgtttccgcttggttttccggtgtttattttgttggaattttcttgggccctttcttcttcgcttgtggaggcgaggggagaagagaggcatgggaaagcaaggaccttgccgtcattgcggagtcaccagtactcctctctggagaaatgggccaccagataagccagtgctctgcaatgcatgtggctcaagatggagaactaagggttcgctgacgaattacacaccaatgcatgctcgggatgatattgatgctgaggaacctagagctagcaagctgaaacctccaacattgaagctgaaggaacagaagcaactgaagaaaaatccaagccacatcacaatggagaatggaccattttctgatcaaaacttccgtaagatgggagatcctgacctaagtaatcgatctggttctggatcagcactatcatactcagagagttgtgccccctatggcactgctgatgcaagtgaaatgactgcttcagcacaatcacatgcttgggaatcacttgtgccatcaaagagaaggagttgtgtcactcggcctaagccttcacaaatggaaaaacttgcaaaggatcttaattccataatgcatgaagagcagctactttacctttcaggatcctcagaggaggatctaatttaccatagtgcaactcctgtggattcctttgagatgggatatggaagtatgcttctcagaccaaattcaaaatcactggaggaagaatcagaagcaagctctattcctgctgataataagtcatatattactagtgaatcttactcagggtcggtctcatttgtatatagtgaaagcaaggcaacaagcaaccaaaatgttataactgaacagccaaagaagtttctggtgcaaacatcagataatgctagaagggctaatctccatactgaaaatcaggatactctggagaatgcaaactcacctttagtttccctacatatggagggaaaagacagtgaagaaacaagagtaaagaccagtgcttcaaatcgccttacaaagtccaccatgaatcctctgaaaaggcctcatgacacccacttccaaagctccgtagaactaagaggaaccatgaggagtcctaaaagagtttctaaatatggtgatgctatgggtctaaagtgccaagcgtcgtttatgccgaaaccaggcaatggcaaagatttagcctgcagtgacagagcacttaacttattcatgttacccccggataaactatccatgctggttcctcctcagtatgccaacactgattctgatcaagacctgttgctggatgttcctcttaatgctcggcacccagaggccgagcttctttgccagccatctcaactgagctcagtagcccacagctccacctcagaggctgggaatgccggaggagaggggcgccttaagcagccctagttccagttccagttaacaagcaacttaggaacaggaagtagctgtagtttactttagtttccctggatcatggttccctttatttaccggccactgatggggcgttctgcggtttgttcatgctcttatcgtcgtcgccctggtttactaggcaatgtgcgtctgccaagttggcaaaaattgtgtgttcagctaacacttctagctgtgcttttggagtagacttgtgcttgtttgtagcatatggcttttggagaaggtatataactcaacatggctgtatggaaaagaggtaatctccttatgggtaaaatgaaaaaggaaagaaagatggaagttattaggagttcatgtttgtgttgcaatcagtgttggggtttgctcacttctttttacaattgagcaccatggtgtcttgatggcaggtcatcttgaacaagaaatttgagattggtgatatcattgatgaatggtatgtacagttgtacataaacttggttc

SEQ ID NO: 6504 - DNA, 531 bp, Oryza sativa
  Clone ID: PAT_MRT4530_13189C.1
atggggcgcggtggcggtgacgggagagatgaggagctgctgcccaggcgcagcgacaacctcccctccgcttctttcttccatgccagggaggaggccgagccgcatgacgctgctggaggctgtggacacagagctctcctcgtctcatccaccggcgtctgctctcgttctccgccgcgatcactgccatcttgccctgccagcacccacactctgccaccgccgccaccaggcccaccaccaccatcaacaccacccaccacgacggcgtggatctggtggtggacaacctcgagctcttctctggtgacgcggatccggcggttggccggcggctacaaggggaaatcgacagtcgatggccggcggcgcggtggagttgatgtctctcccctcctcccttcaccgatgttgacgccggcgtgcctaaggtcgtcgccccgcggccctgcacctctctgctccagcgacgggagctccgactccaatggcggggataggagctccgactttggtgtggaaaggtga

SEQ ID NO: 6505 - DNA, 546 bp, Oryza sativa
  Clone ID: PAT_MRT4530_1318C.1
tggtgttcgtccactcgcgctcgcactcccgtcgttacgcgcgcgcgcgccgccgccgccccgacctcgccgcgcgcgccgactaacctagatgcggtgatgggaagaaggggcgcgggcgcgggcgctgcggtggtggtggtcgcggccttcgtggcggcggccgtggcgtcgggggacacgctcgccgatctcggcggcgccgccaaggggatcgacagcgtgccagaagtgaataacttgggaccatgggcgaaggggcttctgaaagggatgccggactcggcggcagggccagcagagggccccatcgcaaagtatccgctggttctggcagaggagaggacgcggcggccggatgttcttgaccaccttaggatgtatggaggagggtggaacatcacttacaagcactattgggcgtatagatcagtacaggctatatatgaactacaaattcagtctggacaatttatttctacttgtccaaatacagtagccagttacaggacaacttatagaccattcatggataaacttacttga

SEQ ID NO: 6506 - DNA, 305 bp, Oryza sativa
  Clone ID: PAT_MRT4530_13190C.1
tgttatagctgactcaaaacttcagccacaggggctgcgcagggtgccgaagggcgcggaagggctatgcccaggactactctatgtatggacacgatgctaaactagctgaagagatcaagaagggtgctgcatctaacgaaggagctgaggctaaaacagggcagggtcctgcagctgttcatgaggaagtactagggaaggaggtcgcgcctcctaagccagaggcgctagctaccacaccacatgaacttactgtggctgatggaaaactgcttgctgtccctacaagggtcggcatgaag

SEQ ID NO: 6507 - DNA, 542 bp, Oryza sativa
  unsure (1)..(542): unsure at all n locations
  Clone ID: PAT_MRT4530_13191C.1
aaccttcatagagggcaatcatattgcggtctatgaatttttgtttccatagaccagaatttgattgtgttcagtagatatgctacatagcatgtccagtcggtgttgtctaaacaatgagatatggtcattgtctgcacatatatgttaacatatgtccatatctatcttgtgctttcaattgatcccccaaatgataatgtaccatatatatcctctacaaaaacactgcctagtccattagatcaccaaaagtagacagtcagaagtcaccatcaatctgaagcacatgccttcattaatcttcatacaacacggcgaggttttcagaacaaaggatgaagactagcaacatgatgatcttcacgtcttcagccttgtccttctggtgctatcttcaggtaattaaaccagttagaatacactggngttacgtgcacttgattaagtagagcagttggtatgaccgggaatgaagcttgatgtatcgatcgatccaactcaagctggcatgccacacattgacttcaatattttggata

SEQ ID NO: 6508 - DNA, 319 bp, Oryza sativa
  Clone ID: PAT_MRT4530_13192C.1
tcgtccacgcgtgcggatcacacagatcaaggaactatattcgacacgcacggtctagaggattcatacattgcattgcgatatgcgctgctaatgctaaggctgtgaactttgtccgagattttgacatgatgaatcataacagcaccatattcatgcaggaactagacactattctagatatgctgatcacggtaagcacagaacatgctcagattgatcacacatgtagagaacaaggagcctggccacaggagcatctcgggagctgctgtactgcacagctggagcttcagcatccaggttgattgtgccgcac

SEQ ID NO: 6509 - DNA, 746 bp, Oryza sativa
  unsure (1)..(746): unsure at all n locations
  Clone ID: PAT_MRT4530_13193C.1
ngcgntgccgcgtgttgttgggggngagggntggggtncgcggccgtgcnccngggttgccnggtgnccggggangttgcccccggggtgcggagcccccagcngctgntccggagttgtttggtgggagtgtgcncaactggctggtgatgccccctctcgagtgggtgtcgagtcgtgccctagttgctggttaggaggagttctgtgggagagcctgggactctgtgccgagggagcgngtggtgtgggacggtgttgggggcggccaggtgtggacgtgcactgagcttgccagtagatgggtgagtttgtccagctgcccggcgcgtcagcgcggttggcgggtgcgacgtgtgagtgcgaggggggggagcactcactgccctgagtgctttcctggagagcacccccgtattctactccaattagaccctgatgaatcgtcccccctctttggttcgaggccaccacggtctatctgtataatttgctttgtggagaatccacgcttttcccgctttctatggggaagttcgtgccanccncacccaccgctaaggttttttcttgnccagccttgtggtgtaaatttattggtggccttgacgcccgctttgcctgtacccggatgcccaataaataatttnttntgtcccnaaaaaaaaaaaaaaaaaaaaaaaaaaaaaaaaaaaaaaaaaaaaaaannnaaaaaaaaaaaaaaagaaaaaaaaaaaaaaaaaaaa

SEQ ID NO: 6510 - DNA, 563 bp, Oryza sativa
  Clone ID: PAT_MRT4530_13194C.1
gctgcaggaattcggcacgaggagacaccatcacctccggttcgccctacttactagcccaggccccctcgaccttcaactcctgtctttgaatcaagtgaaaacactccatcggctctagaaagtcatcatgtggaggaagaagaagtagcagcaccagctcctactatccctgttctagccgatatgttttcctttgacatcaagccattcttagatgaagaggaaggaaacaacaagccaagctttggtgcccctagctgatgacatcaagacaactctaatggacatctcaaaaaggcttgaaggttctgcggatccatccgagatagacttaatgaaattccatccgagataggcttgaaaaagctcaaaggaggattgccgatcggcgtgagagatgagatcttgagacaaccatccaagccaacagattgtctatcaatgaagaaaaagctaagctggatgaattggaagccggcccaagtgcaactcaagctaacatcgatcggctaaataaccggaagatacatagccacactggaacaatgcaatgcacaact

SEQ ID NO: 6511 - DNA, 1377 bp, Oryza sativa
  Clone ID: PAT_MRT4530_13195C.1
atggcgctcgccaccacctcctctcacgcgctcagctgctacctgcatccccgacggcgccgccgcggcaatgtcgccgtgtcgccgcggtctgagggcggcggtgcccggaggaaggaggaggtggagatcgtcatcgtgggcgccggcgtggcgggcctcgccacggcagcctcgctgcgccggctcggcgtgggcgccaccgtgcttgagcagggcgcgtcgctgcgcgccgggggcacgtcgctgacgcttttcaagaacgggtggcgcgtgctcgacgccatcggcgtcgccgacgagctccgcgccaagcacctccgcatccaagggatgaagatgcggtcggcgtcgtctccggcgtcggcggcgggcggcgtcctccgcgagttctccttcgaggaggaggccccgggtcaggaggtccgcgcggtggagcggcgcgcgctcctcgaggcgctggcgtccaagctgccgccgggcgccatctccttctcgtcgaaggtgcggcgcgtcgccgtcgccgggcagcagcaggggcccggcggcgccaccgagctggagctcgaggacgggaggcggatcgtcgccaaggtggtggtcggctgcgacggcgtgaactcgccgatcgcgcggtggatgggcttctccgagccgaggtacgtcggccacatggcgttccgcgggctcgcgcgctacgacggcgacggcgggcagccgttcgaggcgaaggtgaactacatctacggccgcggcatgcgcgccggtttcgtccccgtctcacccacccgtgtctactggttcatctgcttcaatcgaccaagcccagggccaaagatcacggacccggcggcgctcaagagggaggcgctggagctcgtccgcgggtggccggaggacctcctcgccgtgatgcgcgacaccccggacgacgccgtggtgaggacgccgctggtggaccggtggctgtggccggtccttgccccaccggcgtcgaggggcggcgtggtgctggccggagacgcgtggcaccccatgacgcccaacctcggccagggcgcctgttgcgcgctcgaggacgccgtcgtcctggcgcgccgcctcgccaccgccgccgcgagcgagggcggcgaggcgagctcgtacggcgaggctatgcgggcgtacgagcgagagcggtgggggcgggtgttcccgctgacggcgagggcggggctcgtcggcgcgctggtgcagtgggggaacccggcggtgtgcgcggcgcgcgacggcgtggtgatcccgaggctggtcaggctcggccccttcctcgagcacaccaacttcgactgtggcctgctcgagccgtcggcggcggcggcggcaccgtcgccatga

SEQ ID NO: 6512 - DNA, 127 bp, Oryza sativa
  Clone ID: PAT_MRT4530_13196C.1
atgtggtgaattaaaagacaatcggggaataccagcagtggcagggaagcaaagggatatgacaaaaaacactggcccgttctacacggaaaggcactgacctggtcaagcccggcacacactcaca

SEQ ID NO: 6513 - DNA, 248 bp, Oryza sativa
  Clone ID: PAT_MRT4530_13197C.1
atgtttttcgtgattagtctcacccttctcaccatagtaaatgatgctttaattggtaataatttgattagctcctggtttggaatggtatattcctggtttggagatagaactgtgcagccgggatggttgttctgaatggttgggcctatataacagggtatgttgtatagcgttggattaatattgtttattacttaattgttttattaaattctcaaatatttgctaaatgctgtttttgcaaa

SEQ ID NO: 6514 - DNA, 1463 bp, Oryza sativa
  Clone ID: PAT_MRT4530_13198C.1
gtggacattaggacaatactgaacaagaagaatagtatccaacattgcttctctcggtgtatggaattaatttcaaattccaaattactaacatagccacattttactgctaatacaaacaccatgtagtcacattattgctaatacaaacttcatgtagtaatagaggtagtagtctaatgatgcaatgtctaaagaacaggaatacatatttctctagatgttgtttcttctctaaattcttggcagggaaccttcagctggggaatgcaatatgctgggagaaagacccatggacgccagatagtgcaagtgccacacatcaatgtcgagcccacgcggtgttgcagattccttaatcttccccgccaacatttatccatcaaccatgcccagttgtgattattcaggtagctaagtttaggcatgttcccaaactccaggtgaatttcttacagtaagttgactcactgttggaaccaaaagaattgatacagggagaagcgctgcgttgctctgctcccatctgaccacctaggcgcccggcgcgtttgcccctgcccggctgcccccataagcccagctccttgccgctccctgcatgccgcagcgcccctcgcaaatcgcgacctcgctgcttgccgccatcgcggggatagatctgaaggtgaggaattagctgccaaacaagcgtggacgatggtggcgatctggcggccgcgagcggacgaaggcggaacggcggccgccgacgaggacgaaggacgttggctcctccgtatagctcgccaacgcggagcagatcggcaagggccagtcgggaaggtgtggggaggagctcgaggcggcagcggaagggaagccggtggaggccgtgggcgaaaaaggcaggctcccgtcttctcctggtctccgcctttgccttaggaggagccagatgcgggcgaacgcgaggagggcagccagaacacgccggcgcctcgaccatcgtcgccaccccaaatccttcgcagccgatgcttggttcgcctcaccaagccggcggcgatgcttggatctggagctgctggtgccctcccctggcccctcgggactcgaccgagatcgtccccgtcaatgggcttcttggtcgaggtggcaaatgcgcccgtctggaggatcctccaccgccacaagccgtcgtcaaatccgccactaggctctcttcccaccgccactggtggatccgtgcgagcgctgctggatccgagcgggggacggccccgccgagcccgtcgcacgttatccgccaccacgcctgcgcgcccgccaccgctcggaggtggaggaggtggagccgtggcgcatcccgcccaccgacgccgcgctcgcagttgctcgtcgcccccgaaccgccgccgccgcttctcctcgccgcacgagaaactgcatgcctccgccggatccgtaaaaaatggagaggg

SEQ ID NO: 6515 - DNA, 489 bp, Oryza sativa
  Clone ID: PAT_MRT4530_13199C.1
ggtacccattcctattcctattcctacctaccttccttctcttttcttttttccactaatataatggagtactatgcatatgtactgcgaaattatatataattgatcacagaaaaaaattaaaattaaattggctgcagggggtttggggtggcatgctctgtggagttgcacttcaaacactcattctactctttgtagtctggagaacagactggaaggcagaggctgcgcaagcttcagctcgtgtgcacaagtggggaggcacagatgaaaccaaacctctcttacaaggagatcattcagacagagattagcatatgcataccctgtttctctttttcttttccccctgcgcagagcagatacgaagttggactccaaattcaattcttatcctgcatgtaccaggcagctctgtattcttcaattgtacgatttttgtatacgctactgggtcacaatttattaacattgtacgctattggg

SEQ ID NO: 6516 - DNA, 240 bp, Oryza sativa
  Clone ID: PAT_MRT4530_1319C.1
tggagtgggcgcacgtgctggctgagcagggcccaggtggcttccgcggcccagaagccgcgtggccccttcactggctggggggcgcacccgaagacggcgccaagccatcggcggtccggcaaagcaccgagccgacgggggagggggggaggtgccaaaagtggcagcccaagccgatgcttcccgtctccggtgaggcggcgacggtggggaagctccaagacggcgcgagcggtg

SEQ ID NO: 6517 - DNA, 394 bp, Oryza sativa
  Clone ID: PAT_MRT4530_131C.1
tcaacgcgttggggtacggtggtccacggctactgtgcatgcacctccgtcgctctctttcgcgcgtttcttttttgtgttcaccaatgcaagcttgtgcatgcggcagtgtcctgtctcgatcttgtgcaacggccggacctgaggcgtttcctgctcgagtttatttggatcagaggcaacaggctcgatcagctccacccacattccgacgctgcttgtggtcagatcggatggaggagcctcttcggcactacgccagatcctcacacctctgacgggataccggtgagccatccggccgcggaccgtcacaggtatcccctcacctgtgacgggccgatacattagaagccgtcagaggtgatgggccgccacctgtgacggctttcat

SEQ ID NO: 6518 - DNA, 2253 bp, Oryza sativa
  Clone ID: PAT_MRT4530_13200C.1
atgccagccgccgaccccgccaccgcgctggcgccggcgccgaccccgccgccggcgcgcgggacggcggcggggccgcggctgctgctgctgcagtcgccgccgcccgccttcccgctcggctccaacgacgaccagctcgagcgcgcccgggcccgcgccgccgcccgcgcggcctccgtccgccgccgctccctcgccgcgtccctcgcccccagggcggcggcgcagcagcagcacgacctcctcaaccgcgaccaggtcatggacctcttccacaactgcatcaagctcgcctccgagaacaaaattaaccagaagaacacgtgggagctggggctcatcgaccacctcagcgagatcatccaggccggggaggaggacgacgacgagaccaatttccagaaggctagctgcacgctcgaggcgggcgtgaagatttactctttgcgtgtagattcagtgcactctgaggcgtacaaggtgcttggaggcatcaaccgtgctggaagaggcgatgaggctggaactaaagacacccttaagattcagaagaaggtagcaatccaaagcattcacaagaagatatcacccacatcaactttggagtcctcatttgattcgcttaatgtaaagaagtttgatgttgccttcacggttgatcctttgtaccatcaaactaccgcgcaatttgatgagggtggggcaaagggtctcttgtcatataacctcggagtatatgacagttgccgtgtgctctttgattcgtttgaagcacctgacaagtgcatcttaagtgatatgcaaactgagatggctgagttgattggtctttcatttgctaaagagcaaatcgagcagatgataattcatatgcccctctgcaatgatatttctcctaccttgagcaatatagtttatcagtttgatgatgaaaaccgaagaccacctcatgaagcaatttctaggcaaattccagtgatggaagatcaggtggttgacggtaatgatgtggcgaatgatgacatcacacaaaatgatatgcaaaatgattgtggaacttgggattttggaggttgtgatgatcaagagagcgtgtatgatgaacactgtgacccaatggatcatagctccatgaacggtcaagaggaaactgatgagtacacttttgagtctgctgaaggtcttgatgtaaatgaaagaattgacaaaattgcagatttcttgtcatttggcatgggattctctgcaaaaacaaatgcctgggcaggacctgagcattggaaatatcgaaaagctaaagatttggaccctgtcccaactaaacctgatgattcagacgccccaaaaaagacaaagaagaaaagaggcaaggatgaacctgacattgatttcagcaaagcattggaacatgatatgccaaatatctttgcacctcctaagaattcaaaatcattgctgctgccggcaaatagggctaccagcaataacaaacttccagaggattgccattatagacctgaaagccttgttaaattattccttcttccggatgttttgtgtctggctcggagaaggaaaaaaccacttggtggttcaagggagaatactgatgacttcatcccatctgaaccttgggatggtgatgatttttgtaatgatcatgtcgatgaaggaaatggtgataccgatgtagaggatgcagtagatcttattaccaaaccaagacaggtcaacaagattgatatacaatatgacaaggtatcaaaacaagtcgatgttcatgccttgaaagaagtgctctggaatcacatcaatacatctgctgacactgatgacctgcaggaagacaaggacacagaatcacccctgtgcctatcgaaagtattgcaagatcttccaagctgcaaccctgatgctgcagcaacagaaatttcaccgcacctatatttcatttgcctcttgcatttggcaaatgagcacagcttgaccttacgtgatcgtccaacattggatgaaattgacatatacattcctgcttcatctctcgtgaagtaatcctgtagttcaatatgttgtgcatgtttgttttattttttgttggttagggacttctcgttctcggtgtattattagattgccttgtatgttgaagattatgtattatgtaatgagcagcatattattggattgcgctaagctaatatataggtaacctatcatttactctagttgacctaatgaactatatat

SEQ ID NO: 6519 - DNA, 214 bp, Oryza sativa
  Clone ID: PAT_MRT4530_13201C.1
aatcttgtattacatttttttttaaatttgtatcagggggacggaacaaaacggacattacgaataagcatgaatcatgaaaaaaaggtgcccttctgtacggcaacacaatcaaacgatacagcacagtaggggggagtgcaacagcgaccaatgcttccgccaacgtatacacggactattagacacaacgcttaaagccaacaccgtaagg

SEQ ID NO: 6520 - DNA, 358 bp, Oryza sativa
  Clone ID: PAT_MRT4530_13202C.1
cgaatgctcaccagcccaggccgggaggctctttaatggacacactagttcgctgttaagaagcctgaatccactgtgtgacttcatactctgaccagatgcctatttgccagaacggatctactcgcaccacctttcccaccgggtaccggtctggcacgtcacaaatggcaaaaacctgccgtaaatctcagcacggtgcaaagggaaccaacacaccactttcctgtaggacctcaaacccacataggtgggcttgacagacgggggctgtttgttctcacacgctggcacaataggtagcccacctcacataccaagacgctgttgacacactcctttctcaggaacagataca

SEQ ID NO: 6521 - DNA, 577 bp, Oryza sativa
  Clone ID: PAT_MRT4530_13203C.1
aaaaaaacgaccgatttattggactggtgtttttttgaacacccaaattgccctaggggtttttggggcattgatcaagtacatatacggggccagcgcgacaacaattggccgatttgatcgaaatcgataaaacgataaccgaaacacagccgacacacgaaacaaaatgatcctcccccaaaaacccatgatcagggacacatgccctaacgatgcatgtttgcatacatgaagcttgggggggttaatttgtttttttttgcccccccccatttgattttttttttttttggggaaaaccaccgatcgatcccgattgatgaccacccaaaacaacaacgtgatccattgatcgattaggccccaaaggcaaaacacttgttgggggggaaaaccccggcaaaaaaacagggggggaaccctttgattcccttggggaagcacttgaccccgcagggggcgatgcccgttttgcacttgggggggctgaaagaacaaccggttccaacggggttgccggcccctttttaaaggagggcgaactccttggggggggccagggcctcctcctcct

SEQ ID NO: 6522 - DNA, 1243 bp, Oryza sativa
  Clone ID: PAT_MRT4530_13204C.1
ttttttggtactacacaactacacatccaaattggcacagatcaaattattcagggttcttgcctgcaaatcatgctacacatacatacatactgcagactaattcctcacactattgcccacacctcctgatgatcatgcatccacaattcccaatttctacccaaactgttttgcttacttacagagcgaagcaagaatgcggcgaggaggctcgaacgatcgccgggagtgaagcaccgcccagttgtcgatgagcaggatgtcgccctgccgccacgggacggcgacgcactcctcctccaggatctcgccgcagccggcgatgacgtcggccggcagcggcgagccgtcgccgaaggtgacggccctgacggggtcgttccgggcgtccttccacccggtgtacgcggccaccatgctgttgaaccatatcttcctccccctgctctcgtcccatttgaccgctggtatcgggcccatgatcgtcttcaccccgtcttcagtccattccagcttcatcccgagcttcgcagccctttcctctgcaatgctcttatctttggtgagaaatgtagagtgccatccacggccaataggagaagacggatcatcaccctctcctaacaccctcgtgtatatcagcccatccttctccaatttctcaacaaattctggatacttttccttcatcctcttgtaaacgtagtggctcaacactatcggtgtctcaccaccaatcttcggttccacctcgcagaagaagaacagcttcgccggaaatgtcggaacctgcgccatctcgtggtggaaggggatcttctggtcgggcggcgactcgttggcggtgaagacacgccccaccacgttgctccgcggggcggcgccgccgacgtaggggagctccgcgtacccgaaggcgtccacggcgcggtcgaagtccgccgcggcgcgcgccgggaacccgcggagcagcaccgcgccggcgccccgcagcagcggctccaccgtggacgccctctccgaccgcacggcgtccaggaacgcgtcgaggccgccaccggccgcggcggcggcggcgctcgggacgagcaccgccgggaaggcgacgccctcgacgagccgctgctccgggagggcggcctcctggaagaagctccccgccggcgccaccatgttaatccgttgggtggtgactcgtgggcggacgcgtggagcgacacgaggtggatgacaaagagca

SEQ ID NO: 6523 - DNA, 240 bp, Oryza sativa
  Clone ID: PAT_MRT4530_13205C.1
aagctggcacgcctgcggtgccggtccgctatagagcggtcgacctacgctttcgaaaacatatacactcatagtgattgtttgatcgatcataactgctttgcagggtcgaatacttcgcatgagcgctcatggcggccatggagtacatctccggatcccacataagcgagtcgtaaaccaagtacatgtacaggcagcgccatcagcatgtgcctgacagcccgctgaacacctgcc

SEQ ID NO: 6524 - DNA, 135 bp, Oryza sativa
  Clone ID: PAT_MRT4530_13206C.1
atcatctctcacatgcattgctcgcagatggacaagatgacgcggagacagtgagggggcatggtctgcgcagagtaccagaactactaccatgggggtaccggagacggcggtcttgtcgaccacgagacggtc

SEQ ID NO: 6525 - DNA, 2100 bp, Oryza sativa
  unsure (1)..(2100): unsure at all n locations
  Clone ID: PAT_MRT4530_13207C.1
gcacgagggcacatcagatgatctgaccacgaggagaagaagaagagagaggatcccaaccccaccacctctcctcctcctcctctctctctctccgatctgcctcgccgccgccgcggctgctcttctcctctcgcctcgcctcgtgcgcgcggcgagttcgacctcctcctcctcctctccgagcccccgcctcccctggctgcgggcggggggtttcgagggggtggacgcggcctccgtgtcggcttcggctcggatcgaattcaaagaagaggttggaaaccttggtggtgtagttagtgccaccgcccctgtctggagtggcatgtagttttcgcaaggctttgtttatgattttgtcgatggcgaggagatgaaggcatcgcaggtgtggcaacggggcagcaaggacatgacagccatgccccctccgcgccaacgaggcgccgccaagaagcccatgtggataatcgtgctgctgtcgctggtgtgcgtcgcgctcatcggggcctacgcgtaccctccgcgccgctactccgcgtgctacttcttcgcttcgagcgtctgcactcctttcaaggattggctccctactgtgacccgacgggagcgaacagacgaagagatcgtctcgtctgttgttatgagggatctccttgcaatgcccatgcctgtctcgaagaatccaaagattgccttgatgttcttaacaccaggttcattgccctttgagaaactatgggagaaatttctacagggtcatgaggatcgatattccatttatatccatgcatcgcgtgaaagacctgtacattctagttctttgtttgttggccgagagattcatagtgaaaaggttgtatgggggaggatttcaatggttgatgcggagaagaggctgctagcaaatgcattggaagatgttgataatcaatttttcgtcttgctatcggacagctgtgttccactacatacatttgattacatatataattttttgatgggaacaaacgtcagcttcattgattgcttccttgatcctggaccacatggaagcggaaggtattctgtggaaatgctccctgaaatagaacagagggacttcaggaagggtgcccagtggtttgctgtaacacgaaggcatgctttactgattttagcagaccacctttactacaataagttcgagctgtattgcaagccagtaacaggcatcacagtaggtaccagggtaccaggatttatcccaaagagggaaaatgataccctgccagcagagggacgcaactgtattgctgatgagcattatttgccaaccctcttcaatatggtagatcctggtggaatctctaattggtcagtgacacatgttgattggtctgaaggaaaatggcatccaaggtcgtatagagctattgatgttacctatgcactcttgaagaacataacggctatcaaagagaacttccgtattacaagtgatgataagaaagttgtgacaatgacaccctgtatgtggaacggaacaaagagaccatgctacctttttgctagaaagttttacccagaagctctcaacaacctactgaagcactccagctacacgtccacttgagctctacacgattctttgcttttggcctaggaattccctaggatttatttcttcttctattttatgtaaattgtgaaattgatatttagctgcgtaacacagattcagggccagagacatatcaacgttgctgcggcaatggcgatgtcttgcaaattttgagtccctaggtagggctgaggcgatatttatttagttttgatacagcccccattgtaacatgttgggcttttttgtatgttgctatgagctgctcttcacgcccacattttctctcttttctttctagtttcctagcccctcccatctgttgaggaataggggtttttgtcagattggaactgttattatatgatccattctttgtagacatgaagagattattatgaccccagcccaccctttcagttaatctgccctcttgagttttgtttacaaaaaaaaaaaaaaaaaaaaaanaaaaannnnnnnnnnnnnnnnnn

SEQ ID NO: 6526 - DNA, 135 bp, Oryza sativa
  Clone ID: PAT_MRT4530_13208C.1
atggcgacggcggcggcgaccgctactcccatgccagcccggcgcaatggcaacgccatgggcaccagtgatgtgtatggaggaatacgagcgaggaagaagtccaggggtaaaaatggtctaaggcctgtttag

SEQ ID NO: 6527 - DNA, 2073 bp, Oryza sativa
  Clone ID: PAT_MRT4530_13209C.1
atggcggccaggtcgttcagctcggcgagcacgacgaccatcctgctgagaagcgggaggtggaggaggacaatgagggcggcggcgttcccgttccgcgtgtcgtgctccgcggcggcggcggcggcggcgggcgggacggtggtgatcgggctggctgccgactccgggtgcgggaagaccacgttcgtgcgtcgcctgacgagcgtgctcggcgccggcaccgcggcggcggcggcgcctccgtggggcggcaacccgggctccaacacgctcctcggcgacgccgccacggtgatctgcctcgacgactaccactcgctggaccgcgcggggcggaaggagaggggcgtgacggcgctggacccgcgcgccaacgacttcgacctcatgtaccggcagctgaaggccatcaaggagggccgcgccgtcgcgaagcccatctacaaccacgccacgggcctcctcgacccgccagagctcatcactccccccaagatcctcgtcgtcgagggcctgcacccaatgtatgatgagcgtgtcaggggcctgctggacttcagcatctacctggacatcagcagcgacatcaagtttgcatggaaaattcagagagacatggcagagcgtgggcacagcctggagagcatcaaggccagcattgaagcccggaagcccgacttcgatgcgtatattgacccgcagaagcagtacgccgatgccgtgatcgaggtcctgccgacgcggctgatcgccgccgcggacgacgacggcgacgaaggcaaggtgctgcgcgtgaagctgatcatgaaggaaggcgtcgagcacttcgcgccggcctacctcttcgacgaaggatcgaccatcagctggatcccctgcggcaggaagctctcctgctcctaccctggcatcaaattctcgtacttcccggacacctacttcggccacgaggtttcggtgctggagatggacgggaagttcgacaagctggacgagctgatctacgtggagagtcacctcagcaacctgtcgaccaagtactacggagaggtgacgcagcagatgctgaagcacgccgacttccccgggagcaacaacggcacggggctcttccagaccatcgtcgggctcaagatcagggacctctacgagcagccggaggacgagctgctgagcttgctgcagagcctggcagacatggacatcacgtacaaggcgctccaggagacagacatcggacggcatgtgaacggtctgcgcaaacatccctccggtgaagtccggctactcgccatctcatcctcgtcttcctcatcggcctcgccatggaccggctcctcagcggccgcgacggcggcatcgtggcgcgagtccggatctggctccgcgatggggagcaccacggtggtcgccgttgccggctcgacgggcatctcggccaccagctgcttctcgttgccatggaatccctccccacggtggtagaagccgccgtaccggttttgatagttggaggagtcgatatacctgttgaaggagtcaaagtatactttttccatcttcatctcctatggactcttattccaatatactatatattttattctggttttcagtaatttataatttgtatttctacttgaactctttagaaattgtagtggaatctaattttgggatttattttatttttactcaacactacaaggaataatatatatatatatatatatatatgtatatatatatatatatatatatatgtatatatatatatgtatatatgtatatatatatgtatatatatgtgtgtatatatatatatgtgtgtatatatgtatatacacacatatatgtatatacacacatatatatatatatatatatacatatacatatacatatatatatatacatatacatatacatatatacatatacatatacatatacatatacatatacatatacatatacatatacatatacatatacatatacatatacatatatatatatatatatatatatacacgcgcgcgcaaatatgcccgtgcgttgcactgggtg

SEQ ID NO: 6528 - DNA, 348 bp, Oryza sativa
  Clone ID: PAT_MRT4530_1320C.1
atgggcggctggctggtcgcgttggctcggtcgtcgggcggcgtcggcgttggcggcggcggtgggaaggatggcggaggggggtggcgatggtctcgtcacgtgaagtgcgcgtgcgtggaatggaagtggacgggttcttcttctggttctggttctcaaggtgggcctccgtcggcgggacccatcgccggagtcgtcgtcgtcatcaggttccctgaggtggcagagctcttggatgtgtgctggctggagatcatcggcaagctgcagctctcgctcctctctccagcgacgacctacgccgctgtcacgcccagaaattcccgaatagaattccaagcataa

SEQ ID NO: 6529 - DNA, 270 bp, Oryza sativa
  Clone ID: PAT_MRT4530_13210C.1
agcgatgatgtcaagatgatgagatcgtcagcgtgcgtcgctgtaaattcttcttggctttctagtttggttggaacttggaaaagtagatttgttgatgcggttttctctttggttgttttggttcatttctttgtttgattttggtctatcctgtacaggccggtttgaagcaaaatgacagtgatcgacattctttggttaaaaaaaaaaaaaaaaaaaaaaaaaaaaaaaaaaaaaaaaaaaaaaaaaaaaaaaaaaaaaaaaaaa

SEQ ID NO: 6530 - DNA, 558 bp, Oryza sativa
  Clone ID: PAT_MRT4530_13211C.1
atgacgtcgacggcggtggcgacaacggtctcggtgtctggatccatcaacgacgaaaggacattggtttcatcatgtggggtgccaatgtggcattacaagtacatgagaaaaaacaatgttcttcctacagtggatacgagcccccatgaagatgccataggcgacaaagttgttgagcgagcagcggcggcagtcggcaaaggcgagctaggcaggataaaaccaccattcaaagccctcgcccgccgcctctaccaccgagcaccgtccttctccgatcccgacgatgaccctccgttcacacgggtcacggagtgcccgcctcgacctgcctctaagcctgcacatgcgacgaagaagaagaaccagggcggcagtatcaagcaaccggagctggtgcgctccgacctcccgttcaacttccggtactcctactcaaagacggacccggcgtggaggcccatcgggttccaacgagaccttgttgatctagatggagctaatgctttggccatggaaggaatgcttgcattactgcatatgtatatcgtgtga

SEQ ID NO: 6531 - DNA, 261 bp, Oryza sativa
  Clone ID: PAT_MRT4530_13212C.1
tcggctcctcgtctcgcgctgcctggtatcgcgctggggctcacatcggcgatgtcagtggattttgttcaggatcggtgtgttctcgctgtggggtctccttggcgtggcctaactcagtttccggtgcggtcccggtgggtgttgatctggttgtgctgtcccgtgtctggggttggggcgggggagggtgtcttttggtggggggggtgtgctctgggctgttcctcctaggtgttttggggggggcttgccgtgctt

SEQ ID NO: 6532 - DNA, 2037 bp, Oryza sativa
  Clone ID: PAT_MRT4530_13213C.1
gcctaagtataatcataaatttctattatacaaaagcagcaatttctgttattacattctcgttttcttgctttagctcatcagcctaatactagcagcaccagcatcgcattacaaactcaacaaaaagcacctctctcattcctgaacctcatagctgaaataacagggtagagcaccaatactcataactgaatacaggggatccaagaatatcatcaaacaagatctcgatctcatgctacatcaatgggaattccggaaaagcctttctcagtgagcagagctcctcggctggctgaaggatccaccagcatagagcatctgatatactggtcggattctcactgtcaaaacaatgctcagcaatgtacccaagctagccactccagctagaacgcaaaatgtaagtctgaaacaattagggccatggcatgcaatgtcagtgtccattgttgtggcatgctgtctctccacttcctggtcgtaaacataccccgcgagactgttaaacaagagtgcgccaagtgggttccccaaggagatgaaattgaaaatctttccgaagtgcttcaatccaaacaactcagatgaagttgacaccatcactgagaactgggcaccataacaaataccaagtaaagcaacagagacatgaagtgtggcatggtggcccaatgcaaagagcaggtatataattatcatcatgacttgggtgcatgtaatcaatgttgtccgtggaagggtccttgacctgacaagatactcagaaacagcaccacctcctaaacggccaaagaaattgccgaaactgaagagggcgagtgatatggttgtatccgcaacacctgctgcaattccaacttgtgctagattattaagaacagtgactccagatccaaccccaataaaatacactgcaaataaaagccagaaatcagccttcagcagtgcttcacgaaatctaaagtcctctcccctttttggtcttcttctcttctgctttatagccccttctccctcagctaagagaatatcaatatccatggaatcatcatcttctatattaccaagatttgatgctgatgaagaaggaagtaatgattctgtatgatcatgatcagcagaagaagaagagcactctgatgaatcggattgcccttttcttcggttgcttggaaacaatgtcattttcaagggtactgtaagtggaacaaagaggacaaggaccatgatgacaagcagaacatagttcacagcatcagtaagagttacgaaatggtccaatatcgtggctgcaacaagataaacccctagaagaacactggagagttgtgtgaacagaaaatgcacttgctccgaagagttctccacaagggagggttcacaaggccgcacgaagtacattgtcacaaggcacacaacaggaactcccagggtgacaaaaagcagaaagtttgaagctgaatcatgaagtactccggtgtatattacagtgtacacagcagcacttaaaccagcgtaccctttaaggatgccagcgacggcacctctactgagtgggaaattcctcatattggttaccaaaacagcggtccccaaccatgcaccactgtttgcagcaaggcataaggcaaaccatatcagccagtaggggagcgcggggccggaggcggagacggcgagccaggtggagccgtagccgaggaggcatgcggcggcgccgacgaggagcagcagggcggggtggaggcggttgcagaggacgcccgggaggaggccgaggttctccccgacgtcgcaggcgaccccgagcagcgcgaggcggcgctggtcggcggcgagcgcgaccttgagggcgtgggagtagagcgcgaaggtggagctggctccgcccgccacctgcacccacaccgccgcccctagccccacccacggcggcctgctccccgccttcaccgccaccgcccccctcatctcccctcctccttccctggtcggatcgagaagcggggtttgatcagcagcagcgaagcg

SEQ ID NO: 6533 - DNA, 161 bp, Oryza sativa
  unsure (1)..(161): unsure at all n locations
  Clone ID: PAT_MRT4530_13214C.1
cagaaccagtactttaatttcaccttgcaaattcagttgaattcggctcgttcaggttcagtcgtttgatcatcatggccagtatcaagtcgctcttgtgcatctcnctcatcnccatcctgctcctcgtcgagactactgctccacatggacaancttac

SEQ ID NO: 6534 - DNA, 719 bp, Oryza sativa
  Clone ID: PAT_MRT4530_13215C.1
ccggccgggcgctccacccccgctctctctctcgagtcgccgccggagacgacgacggcggcggcggcggcgaaggcccggagagctcgccgtctgattgcgccgtatgcttgtttcgcagatggagatggggatgaattctgtgcagccgaatgctcagtttcctgtgccgcacaagtccctctctttggatatcaatggcaataagacagatattgttatcagcaagtatgaggataactttatggtgatggtgacacaaataggatgcatgggaaccatactagctgccaggaaagatgaaagtgttttttctgatccaacctacaatgtatctgttctttttggaaagagagatgagccattactactagcttgtgcacgccaacttattgaacacataagtggtagtggctcagcacggtcattgatgatatctcttggtctgaaggatcattcccaggcaacaatgaaatatattgtttccaccataattgagaaccgcctatggtaatagttttgcataccgagctgggattggaatggctgggcacatatatattcacttcatcaacatagatgttgacatgattagtgctgagcaattaacactcaccaatctagaaatttgtaactatgatttctttggagtcgatgtatcacaaagtagttatataacccaaagttatagcggagaattgcactactaacctttgatg

SEQ ID NO: 6535 - DNA, 276 bp, Oryza sativa
  Clone ID: PAT_MRT4530_13216C.1
ggcctaaagggaggcactgtcttgacttttgagtcgactaaagcaagatccattttgtaacatatatttaggtttacatacacatgaaacacggcggcactactagccccacaagcgggctttatttgggggagcaaacaaacacacaaccaggggcttttttttcgttgcctttcaaactattaaacaaagaaaccaaagtcccactatcttcctttcgaagctgaacacttacggataatttacggattgagaacactctacatccccaaaaag

SEQ ID NO: 6536 - DNA, 477 bp, Oryza sativa
  Clone ID: PAT_MRT4530_13217C.1
atgaccttctttgtggtctctctgattactcgcagtatgcttgtttcgcagatggagatggggatgaattctgtgcagccgaatgctcagtttcctgtgccgcacaagtccctctctttggatatcaatggcaataagacagatattgttatcagcaagtatgaggataactttatggtgatggtgacacaaataggatgcatgggaaccatactagctgccagtatttctgatcatgttttcttcctcattaataggaaagatgaaagtgttttttctgatccaacctacaatgtatctgttctttttggaaagagagatgagccattactactagcttgtgcacgccaacttattgaacacataagtggtagtggctcagcacggtcattgatgatatctcttggtctgaaggatcattcccaggcaacaatgaaatatattgtttccaccataattgagaaccgcctatggtaa

SEQ ID NO: 6537 - DNA, 190 bp, Oryza sativa
  Clone ID: PAT_MRT4530_13218C.1
ggaccgtggaggagtacaagctcaagcacaccagggcacaagcaacgatgaatgccaaccaaggtcacaatgggcttgccgccaagaatggcacccggcgtaagagcacccagcggcgagccccaggagccgggaatatacctttggaaactttggaataggtggggagaacaagtttcatacagggatt

SEQ ID NO: 6538 - DNA, 198 bp, Oryza sativa
  Clone ID: PAT_MRT4530_13219C.1
atggcgaaggcgctcacccgtggaacggtaaaggcaaaggcactagccggctgcggtgaagacaaagatgcccatcagcagtggcataatctcacaaccgtgggggcgaaggcaccagtcgacggtgatgaaggcaagctggcggtgaagacgaagacgaccatcagcggtggcataatcgcacagccgtggaggtga

SEQ ID NO: 6539 - DNA, 699 bp, Oryza sativa
  Clone ID: PAT_MRT4530_1321C.1
atgactagcaggaaggagctaggcgacgacgacctcgagcggaggctgtggatccgctcgccgcccttcacccctcttcctcctggcatccttcgtccctccccgagctccatggcttgccgggaagcaccacgtcctgttgcggagtggctcccccatgacaaggtgttagatgcacacggcgagctcagcgcagaggctcccctccccccccacccccagcggggctcccccttctccatgcgcaccccgctccgcgcccctccgtacgacccccgtctccggagctcccgcctccctccgctcccatgggcgccgcgccgcgtcggcgtcggtctcaaactccagcatcttattccgatggaagggagaggagccgcgccgcgaagaacagaggaagaagagcagcagcagccgcaggggattgaggatggcatgttcaagtttgacctggtgcctagagaggagagttgttctactcaggcacaaattgaagggcactatgaccatggatggtttggtgacagtaccagcgcgtgggagcttggtctgcttgatgccgaaattggtgatgattgtgggctccacactctccctagaggcgatgtcacgatggactcagattgggatccaggcgtcgcattggaagcccccggctccatgtggggcccaactatcggccccgtcttcttcctctag

SEQ ID NO: 6540 - DNA, 528 bp, Oryza sativa
  Clone ID: PAT_MRT4530_13220C.1
tctttatgggaggcaccatcataattatatgatccagcattatgaagtaaccatcaactgatctaagctgggagagtactgtaagctgtggcaccggggatggccaacctcattggctactgctgcgacagcgacgagcggcttctcatcgccgagttcatgcccaacgacaccctcgccaagcacctcttccactgagtttcctccctccctccagtcccctgcaatttaactccgggtctctatattcccctcccatttgatgatcctaccaacgattggatccttttggtcataatggatgttgctgtgcttcgtgtgctacctcttcagttctgtagttacgcagccaatggtgcagcgagcttggatttttatgatgaaatggctagcttcggtagctgatttagaattttgcagcggcaaaataaaaagtgatagctgaaggaaaatcttggattcatggtagtattcatgcacatcaactggcattagacaatctcacatttttgctgcttatttacacac

SEQ ID NO: 6541 - DNA, 219 bp, Oryza sativa
  Clone ID: PAT_MRT4530_13221C.1
atggcgcgcattttcccccactcctcacacccactcctatcccctctcctcgtgacgacggactccggcggcaaaggcagcgggctcgggctccggtggtggcaagctccggcgacggtggcggcaggcgaggttggcacgagagcaacggcggtgggcttgggcaagagggatcccgccctcgggagatacagatccaccgtcctcagccctcgttga

SEQ ID NO: 6542 - DNA, 276 bp, Oryza sativa
  Clone ID: PAT_MRT4530_13222C.1
atggcatggcaggcatgtcaccgtgcaagactcggtcgagcgtgcgccgtgccgtacgtcgcagaggcgccgtgcgggtggcggggggaggggggcggatggagggcggcagagtacacaccaccaggcacaccagtgcgcgcttgtccggccgtgtgtcttggcgaggagcagccgagcagccggccgtgcgcgcgcgcccaccgcaaggggcgtgccgccagcccgtgccatcgatcacttgggcgcaacggctccgtgttgcaccgaccacgc

SEQ ID NO: 6543 - DNA, 295 bp, Oryza sativa
  unsure (1)..(295): unsure at all n locations
  Clone ID: PAT_MRT4530_13223C.1
ccggtccggaaggcccgggccagaccgacccgaggtgatgaactccgaggaggagaagccaaatcataggcgataaacgaccatgtaaatctgctccatgattatatatgctcatccttatgcgtgtnaaaaaaaaaaaggtggtgagagccgacccaaatgcggtggcacatgaaaaaggaatgggggccggataatatggagccgaggttacttacgcctgcatggcacgccaaagctcttttaaactggtaggtaatgtacttcccatgaacaaaatataaagaatggacat

SEQ ID NO: 6544 - DNA, 612 bp, Oryza sativa
  Clone ID: PAT_MRT4530_13224C.1
acaaaaccaatctttgagcagatcggccgatacagttgcaagccctattccatgacagttgataccaatgctaagctatcctccactgatggtaatcctgtgattgatctgaccgtctatcgtagtcttgatggtgccttggagtacctcacctccactcgatatattagatatctcttatgttgtccagcagattttataccgccataaagcgtattctatgctacctttgctgtactctggatcatggcctttacttccaaacattcctccacatttgacttagtggcatagtatgcagctgactaagctggttgtcccgacacgaagatgtttacttaaggctacgtcgtgtttttaggtgataaccttgtctctttgtcctccaaacgtcagaactatgtctcccgctccagttccaaggctgagtagagtgtcatggcaaatgctgtggccaaaatatgccgggtcaccgtgctctactgtgacaatgtcaccgtcgtctatctctccacaaaccgccgccgcctttcgagcccgcggccgccgctcttcctgccccacgccgtcggcctttcgagccccgtgggaccgccgccgccaacgcttcat

SEQ ID NO: 6545 - DNA, 459 bp, Oryza sativa
  Clone ID: PAT_MRT4530_13225C.1
gactagttctagatatgctatatagggttattttacaaaaaaaaaaaaaaaaaaaaaaaaaaaaaaaaaaaaaaaaaaaaaaaaaaaaaaaaaaaaaaaaaaaaaaaaaaaaaaaaaaaaaaaaaaaaaaaaaaaaaaaaaaaaaaaaaaaaaaaaaaaaaaaaggggggggccgttttaagggacccaggtttacgtccccgggcttgcaaggaaaaattttttttatggggcccccaaaatcaaatccccgggccggggtttaacaacggggggacgggaaaaccccgggggtaccccaattaaatcgcttgggagaaaatccccttttccccggggggggaaaaagcaaaggggcccgccccgatcgcctttccaaaaagttgcccaccctaaagggcaaaggggcccccccctgtaccggcccataaagcccgggggggggtgggggttcccccc

SEQ ID NO: 6546 - DNA, 179 bp, Oryza sativa
  Clone ID: PAT_MRT4530_13226C.1
ccctacgtccaaccatcgtggtgtgaatggcttcggcgtggcctttcctgcttgccggcacaacgtcggtgaggcgtcatgctgttgtctctcacggcctcgcggcatcgctgccaacgcccaactgtcttgctgaagagcatgtttctaatacacacatccccgtgcatttaatttag

SEQ ID NO: 6547 - DNA, 816 bp, Oryza sativa
  Clone ID: PAT_MRT4530_13227C.1
atggcgatggcgagcagcaacgatgagaacgagagacgagagcaagccgagaaggctctccagcgcgcggaggagctcttcgccgccggcaacgtccgcagcgcgcacctccaggccggcagggccaagcggctctgcccgtccctccccggcgtcgccagcgcggccgccgcgtacgaggtccacgccgccgcgcgcccgggcaagggcaacaactggcgcgctgtcctcggcatgcgctacggcgacgccgccacgctggacaccatcaaggaccagttccagcggctgtcgctcctcctcctccaccacccggacgacgacaacaacaacaacgccggccgccgcgccgccgtcgagggcgccgtcgagctgctgcgccgggcgtgcgaggacgccctctcggccgtcgccgccggctcctccatggaggacgacgacgacgacggcacgagccggcgcccgcacgcggcggcggcgccccacaactacaagatgcctccgccggcgatgcagctgcacgtgccgcgcgaggccatcgtcatctactgcccctcctgcaagagcgagtttgccggcaaggtggggcggctggagcagcaggtggggatgaagtgcgcccggtgcaccgagtggctgagcccgccgtggcagaagaagccgcaggcgaagaaggagccacccgccgggccggggcggccggcggtgttccagtgcccggcgaagtgcccggagtgcggggagcagtacgtccatggtgtgcgtcggccagtggtgcctccggtgcaaggcgtgcaccaagaaagccatggttga

SEQ ID NO: 6548 - DNA, 271 bp, Oryza sativa
  unsure (1)..(271): unsure at all n locations
  Clone ID: PAT_MRT4530_13228C.1
attacaacaacctgcataaacatggaccgggccatatacaaaatagaggttccaaanatcaacctcatcaaacaaaaatcatatatacctaatagactaatcctgcaaaacatacttaaggctgacaaaacataatattaatcttgccataagcttaatcactactctgatgctactcatattcaaaaaagaatgctagtatatcggaactacatagctactgatgttctcaactcccacgaacaactatgtactggtcttcactaccact

SEQ ID NO: 6549 - DNA, 1044 bp, Oryza sativa
  Clone ID: PAT_MRT4530_13229C.1
atggccggcgcgggtgccgggtgcgggccccaatccccgctcttctgcgcgccgcgcaagtgccgccggcgccgcgcgcgcgctcgattcggggcctcgccgcggcgcgcgggctccctcctctcgtccgcgccacggcggcggccatcgcgccgtcatcgttctgcccttacctcccgcgcctcagctctggtctgtaccaaggcagccgagccagggaatcggaacaggaggcgcaacacgtccatcctcctgcgccatgccacgccgtctggcacggcgaacatcctaattgacgctggcaaattgaggacaattgatgctgtgattattactcattctcatgcggatgcaatcggaggtttgcaaatacttttattgaagcaagcaactttattaatattgattgagacaacacaccatgctcgttttgctcttgagctttctaaaagaaataagaactcctttggtacaggccttgattgtcttcgcgattggacgaacaatgtccagcccaccatcccgatttatgtagcagaacgtgattatgaggtgatgaagatgactcactactatttgattgacacaagtgtggttatacctggagctgcagtttcagcattgcaattcaacattattaaagaggaaccatttacagttcataaccttgaggcagacacctgtgaccatcgatttgttggccaaaagtatgtaaactataaggtcattcctttgcctgtctggcatggtcagggttaccgctctcttggttttcgttttggtcgtgtatgctacataaggatgctcttagacccgatcgttcttcttcaacacactttggattaccacgggcccttgaggaagttaggaaaatcaaaccaaagaaaacactgtttactgaatgcacagtttactatgagaaaaggaatgatgcatttaatggatcacgagaaagtaaacaatgaacttgccaagttgatggagacagaggggcttgacatccagctgagctatgatggtctcagggtacctgtatggctctaa

SEQ ID NO: 6550 - DNA, 1206 bp, Oryza sativa
  Clone ID: PAT_MRT4530_1322C.1
atggagaccgtcgccagtgactcgctggaccaacagaggaaggaggccatgtatggccgcattttggcgaagctcgatgagttaggggccagattggatcatgctatgggctctctatccccttcctcggtacctgctaccccggtggattccttggtatcagtttcaagtccaggggcaacctccagtgttgattcccagaaggtgttcgatgaaatgccaagtaacaaggagccaaccacagcaagtgtccttcacgtcacgatgagccatgtgctctatccagtgaccgcagaggttcttcttcaggtattcagtccatatggtgcagaggaagtgcgtgtgtataaccagggaacaattcaagttgaggctttcattctgttccggctgtgccaagatgcaacacgagctagagaagcactccatgggtgctgcatttacaatggctgttgcttcctggatgtcaagtacatgcaatcatgccccaatgacataatgtcggtggcgcctgtgaggtgtttgtcaatatgcaacggacatggtactagtttgctgatggctgtgtccacggcattgcctagctctgtgcccataacaacttctctggatgccagctctatctcaagtccaacatatgtaaatgatgttccatccagcaccaagcccatttcagcctcatttttcacagaaaggaagggcacaagccaacgtatcataaagtgggtgtcacgaattcgcgtcgctcatcgcccaatacgttgggccatgaagaaaaaagaggtgtatgtgctcactcatattggcggcgtttcattgtttgagatgaatgaaaatgatctagtacacgaaacgtcttacgaaagcaatgaatcatcagctcttgcatttgttgaaatgccacagaatatcaagctaccagtggagcatctcaccccttgggttcaaaatatggtgccaaactccatggtcaatgtggttgtgtgctgtgagaccagtgacattccaatgagcatatggtgtttgtgtaggccactatggcgggcttgttcatatagcaatcaaatgcttcaggaggtttttccatggagtagagatgggttatgtccctggaaatatgaaacaaaaggtgatcaattattgcttgacaagatatttccctggcaaagaaatggttttagtcctggaaacaagaaccaacaatag

SEQ ID NO: 6551 - DNA, 1355 bp, Oryza sativa
  Clone ID: PAT_MRT4530_13230C.1
atgccacgtaaattgaagtcagtggaactactggatgtctccattcaggaggaactctgtcgtgactataatatcaccagtggtttcattgtgagtcaggtgctcgttgattctactgctgaaaagcttggtattagacgaggggacgtgattgattttcaggatattgattgttctactttatcccagttagaagaccacctcctttctcttggttggggatacctgaaagggatgcatttgacagtcgatctgaaggttgaagttcataatctcttcgactcatatagggaaagtattactttccctgtacagttcactgatgcttctaagcaggtaaactagagttgaagaggtgctgcaagggattgaagttgcctagagtaatatgactgaccaaggggagggatgtctacttgtgccttttggataatctggcaacctcattgtgcttttgggacaatttggcacgtcttaccagcgatgcaacctcattcctctaaatggttgtgctgatatagttttggatgagattttgtaaagatagtgttactgcgcctcttacgctcttaacagaaaaccatgcccctccgtatatatagcaaggtcagattagcgccataaaataaaagtacaaaaaaatgcaaaaagataaaacaattataaaagtcataggaaactacaagttggaggtcccttcttttggatcgggcacaaactacggtcaggtcatatttgcattgggtaggggggaaaacatgtctttaatggttagccatggaacaatttcatggacagattaccctgtgttattgaggaaccacaatatgtttctgagctgtgatattcctgagggtggttcaggagggccggtggttgaccatggtggcaatatgattgggattgcatttgtagaaaatccgggtccggtctttatctctatcaagacaatcatgacttgcatggagatgtgggatcagtttagccgtgttgctcgccccttgcttggcatgcaattgaagtcagtggaactactggatgtctccattcaggaggaactctgtcgtgactataatatcaccagtggtttcattgtgagtcaggtgctcgttgattctactgctgaaaagcttggtattagacgaggggacgtgattgattttcaggatattgattgttctactttatcccagttagaagaccacctcctttctcttggttggggatacctgaaagggatgcatttgacagtcgatctgaaggttgaagttcataatctcttcgactcatatagggaaagtattactttccctgtacagttcactgatgcttctaagcagttagttgtatcatag

SEQ ID NO: 6552 - DNA, 1224 bp, Oryza sativa
  Clone ID: PAT_MRT4530_13231C.1
atggccggcgcgggtgcgggtgcgggcgcgatcgccgctctcctgcgcgccgcgcacgtgccgccggcgccgcgcgcgcgctcgattcggggcctcgccgcggcgcgcgggctccctcctctcgtccgcgccacggcggcggccatcgcgccgtcatcgttctgcccttacctcccgcgcctcagctctgctcgctccttctcctcctcaacatcgtgcagcgccggcgcgtccctcggtggcgcggtgtccacctcgccgtccgagcaggagaagcagcggcagcagtcggagctcatcttcctcggcacgggcaccagcgagggcatcccgcgtgtcagctgcctcaccaatccctccaagacctgcaccgtctgtaccaaggcagccgagccagggaatcggaacaggaggcgcaacacgtccatcctcctgcgccatgccacgccgtctggcacggcgaacatcctaattgacgctggcaaattgaggacaattgatgctgtgattattactcattctcatgcggatgcaatcggaggtttgcaaatacttttattgaagcaagcaactttattaatattgattgagacaacacaccatgctcgttttgctcttgagctttctaaaagaaataagaactcctttggtacaggccttgattgtcttcgcgattggacgaacaatgtccagcccaccatcccgatttatgtagcagaacgtgattatgaggtgatgaagatgactcactactatttgattgacacaagtgtggttatacctggagctgcagtttcagcattgcaattcaacattattaaagaggaaccatttacagttcataaccttgaggcagacacctgtgaccatcgatttgttggccaaaagtatgtaaactataaggtcattcctttgcctgtctggcatggtcagggttaccgctctcttggttttcgttttggtcgtgtatgctacataaggatgctcttagacccgatcgttcttcttcaacacactttggattaccacgggcccttgaggaagttaggaaaatcaaaccaaagaaaacactgtttactgaatgcacagtttactatgagaaaaggaatgatgcatttaatggatcacgagaaagtaaacaatgaacttgccaagttgatggagacagaggggcttgacatccagctgagctatgatggtctcagggtacctgtatggctctaa

SEQ ID NO: 6553 - DNA, 126 bp, Oryza sativa
  Clone ID: PAT_MRT4530_13232C.1
atggctggtgtggacctggagtggtcacacagcatggcacatgcgctggcactggacacacggacgtggccaagaggggacgttcctagcctacggttgatcgacgggggcgtcgatctctcttaa

SEQ ID NO: 6554 - DNA, 240 bp, Oryza sativa
  Clone ID: PAT_MRT4530_13233C.1
ggctgatcagcgagcactatcctggagattgaaaacaccaggccacaacaatagcctcttttctggcttgcatggtggagctgcacgttggagtgagctcttgctttcagcggcttcgaactgtgcaaagttgaagatgcttgctgctgtcgatcaggatctcacgcgttcaatcgcaatgatgccagcctgacacaattcacttagcagcagaacaccatgctagccagccagatcccc

SEQ ID NO: 6555 - DNA, 290 bp, Oryza sativa
  Clone ID: PAT_MRT4530_13234C.1
gtacaggttatcaacgtacttgcctgacgatagttagcttgaagcagatattacaccttaacctaggagctctatgatcatgggaacccaatggacgatcatgacctaccactgtatgcttggacagaagtcactacgactcgcgaggggcactggacactatctaaatttgtcctgatgaaccaagaaacctgacacggatggctttggacaactgtcaccgaggatgccccacaatcagttgttctgcgtgccccagcaggcgacgcggtactgactatctctgctgc

SEQ ID NO: 6556 - DNA, 1985 bp, Oryza sativa
  Clone ID: PAT_MRT4530_13235C.1
tagttagtgtcatccaggaattttttataagtaaatttcatccaacgcaataaatcatatttaatctttaactaggactataggagatgttacatcagatccagaataaacgtttttttttcatccatgggtgcaagcatgtcttttggttcccaataacatggtgaaacaaaaggtatcttccctaaggagtgtataagccactggcctctaatgtttgcgctaaattcttgggtgaagttgatgttttactctttcgatgtaatgaccagcaagcccagagcgccgatgagcaggtactttataaatggtttctcagtcatgatgattgtaacccacccgacatatggaagaaagcctacagcccgtcccataatgtgatgttggtgaagccaaagctgcccatgtgcataaagaagacggtcgtccccaaaattattatcacctgagaagcagtttactttcgtgaggatatcaacttcagcactttcctcgcgttcatggaccttaatcacacggtgaacaattggaatttcacggccatcaatgttgaaaacaactatctctcctgtgcggataggatctttgctcatgtgtagaaaaaggatatcgccccttttaaatccaggctccatgctaccagaaaggaccacaaccactggggactcgctccccgttgcaaccatcagtcccttccatatgatcagtgccgaggtaacaatcataccatctcctaccggcggcacgcgcatgctcattgacttatcctcctcgaagatattcctctcacttcgctgcaatggattcggatagtgccagtccattctgccgttctgggaagaatctagagtatcaagtaggagcagaggctgggccgcaccatggccggagtaggggaggtgctcacgtcgatagtcctcagggaggtggccaggaagctgggctccgccgccagggaccaggtcacggcgcagtggaacttcaccagggacctggacgggatgcggacgacgctggagtccgtcaacgcgctgctccggctgctccgagacgcggagcagcggtcggcgctggaggatgttaaacatctgttctgctccgccggcctcatcgacggggccctgccgtcgtcgtcgcctccactggccgacgatcgcgccccgatggacagacggatggcgcagctcggctccacctctggcaccggtctccccctgcaacccccgactcctccatctccagcaccaccgtcgaccggggggacaagctcccagcgctgcttctccgccgccggtcctcgcctaccacctcgcctgtcctgccggctgccgggaccatcctccgccggctcaccggacgtccgccgctcgggaggagcccgtgcggctttggctcaagcgcctcaagggcggcctacgatatctccgacatgctcgacgaattccagtccatcgagccggacgcaaggaaggattcacgttgccgccgacgccttccgtcagctggtcgccgccgacaccttccgcgcagatctcctccacgcctccctcaggtcgttgccgggacggcgatgtgccctgctcgtgctggtggcggagcatccgttctgctccgccggcctcaccgacggggccatgccgtcgtcgtcgcctccactggccgacgatcgcgccccgatggacagacggatggcgcagctcggctccacctctggcaccggtctccccctgcaacccccgactcctccgtctacagcaccaccgtcgaccgggggggacgagctcccggcgctgcttctccgccgccggtcctcgcctaccacctcgcctgtcttgccggctgccgggaccatcctccgccggctcaccggacgttcgccgctcgggaggagcctgtgcggctttggctcaagcgcctcaagggcggcctacgatatctccgatatgctcgacgaattccagtccaccgagccggacgcagggaag

SEQ ID NO: 6557 - DNA, 164 bp, Oryza sativa
  unsure (1)..(164): unsure at all n locations
  Clone ID: PAT_MRT4530_13236C.1
aattcggcacgagaagtattctgattgaatacttaaattcaagtattcaaaggtcttaccaacatgttatctgaaagagcactgaatctaaaccatagaactttatcatttgaaggttgttcaggttactatgagacctgccaagcaatctgcnctgggtgcta

SEQ ID NO: 6558 - DNA, 280 bp, Oryza sativa
  Clone ID: PAT_MRT4530_13237C.1
gcaagactaagatgtcattcatcataatatttgcacctaaaacttggcagggaattagagctctcagcatcgacaaagacaatgcccctaagtggagtcctgctacccttgaggaggtcaagaacgaggacatcgaccgtcttttcgaaccattcagttcagaaaaggagctccaagtcccatctgacgattccaacagcagcttcttggtctttcgggaactccaccgccatcttcttcaggttggggcaactctcaagcagcttcagaaggaagatga

SEQ ID NO: 6559 - DNA, 316 bp, Oryza sativa
  Clone ID: PAT_MRT4530_13238C.1
acgcctcatgaaatcgaattaattaagccaacacaaacacgttcgtacacgtggagaaaaaggtttatggaggtggactaccggttttttggagcatacaaaatttgaagccatgggttttatggtatacgtcacagtttcccaaagaagcagcttttttgatcagggccgtttgacggggtcaaagttggagacggggacaacggggcccacgatggggaaaagcacaacccccccggacgcgatgcttaacaggaagtttttgggggaaggggaaagggccggggccctttttgccactttgggcaccggcggg

SEQ ID NO: 6560 - DNA, 261 bp, Oryza sativa
  Clone ID: PAT_MRT4530_13239C.1
ctaaactgctgcatgggcctggtccatgcccataacactacacccctcgcggacagatagtcttcgagcactagcagatatcttctggtccggtggcttgatgcaatccaccacttctcttcctccataaattcgctgctcaacaaagaactgctcaatactctccaaccaaatttgcggatcatcctcaccattgaacgttgggagaggttcaaggtggcgaaatctccacatccaattgaaatccccgctgcacgccat

SEQ ID NO: 6561 - DNA, 110 bp, Oryza sativa
  Clone ID: PAT_MRT4530_1323C.1
cacttctaacctcccaaaccctagccatggcgtggggcggttttgactaccgcaccgtcctcgcggccgtacgacgaccggggacctcgtctaacaacaacgaggactca

SEQ ID NO: 6562 - DNA, 2186 bp, Oryza sativa
  Clone ID: PAT_MRT4530_13240C.1
cccacgcgtccggccgatgtgagcccggcccggccgccgcacccccctccccctacggcgacgacgtcacgcgcgcgcgagatgccattgttgcttctgtgaggggggctcaccggaacgcgtcggcattgacgacgacccggacgaacgcgcggcagcatgatgccgcgcgtcctcatggcgtctacggaggacacggccacggcccctgccggtgggccgccggagcccccgcgcagtcgtcgtcggcctcgccgtcgccttcccctccccgggccgaaccgacagtccgctcgcctcagcggcctcccccgccgccgccgccggccactccgcccccgcctcctccggcatctccaggcaaaaaccagagtcccgcgtcgccgtcccaagattcacctccgccagtggcgtccccgtcagtatcctcacctcctccggcaccgacgacaccgccctctccgcccccaccaagcaagtcccctccaccgccgtctccgcctcctactacgtcgtcgacaccgccatcgcatcaatcacctccggaagaaggaacctcgccgccaccttcgccatcatcaggggctacaacaccttcacctcccccaaatgcgcagtcgtcgtcgtcgtcttccacacctcctgccggcgcaggaacctcgccacctgcaccgcgcgaaatgccatcgcccgggacgccaccatcgccgccgacgacgcttattacgacacaggcgccgccgatccagccaccaccaccaccgggcggtaacagcatgatcatgccgagctccctaactacagccggcacgtctcagagcccgcctgacgccaccaccgccggcgcaccaccacctccggctccatcggtgggagcatggggcggcaacgtgccgagcgggttgctcatcggtgtcgccttcgccggtttcctcctggcgttggcgtccatgttcttgttcttgtgcatcaagaaccggtggaagaggaggcggcggccggcacaggtgatgaacctggcgcgcaggagaaccctcgtcgtgccggagcgtgtggcgtcgccggaagtgtaccagccgtcgaacggtccgacggcgtcgccgagcgggacgagctcgtacgagttctccgggacgacgtcgtggttcacgtacgatgagctggcggcggtgaccggcgggttcgcggaggagaaagtgatcggcgagggcgggttcgggaaggtgtacatgggggcgctgggcgacgggcggtgcgtggcggtgaagcagctcaaggtggggagcgggcagggggagaaggagttccgcgccgaggtggacaccatcagccgcgtccaccaccgccacctcgtcaccctcgtcggctactccgtcaccgagcaccaccacctcctcgtctacgagttcgtctccaacaagacgctcgaccatcacctgcacggaggaggcctccccgtcatggattggcccaagcggatgaagattgccatcggatcagcccgtggtttgacctacctgcacgaagactgccatcctaggatcatacatagggacatcaagtcggccaacatcctcctggatgacgccttcgaagcaaaggtcgcggatttcggtcttgccaaattcaccaacgattcggtgactcatgtctcgacgcgcgtgatgggcacattcgggtacctggcgccggagtacgcatcaagcgggaagctgacggacagatcggacgtgttttcgttcggggtggtgctgttggagctcatcaccgggcggaagcccgtggactcgtctcagcccctcggagaagagagcttagttgaatgggctcggcctctcctggtggacgcgttggagacggacgacttcagggagctcgctgaccccgcgctggagcgccgctactccaagtcggagatgcggaggatggtggaggccgcggccgcttgcattcgctactccgtcaccaagagaccaaggatggtgcaggtgtggcgatcgctggacgtggaggggagctcgccggacctgaccaacggagtgaagcttgggcagagcatggcgtacgactccaaccagtactcggcggacatcgagctcttccggcggatggcgtttgccaacgacctctccaccgctgagctcggctactccggcaaggacgacgtacgccgtccgccacgctag

SEQ ID NO: 6563 - DNA, 639 bp, Oryza sativa
  Clone ID: PAT_MRT4530_13241C.1
ggcctccaccatcctccgcatctccgacttggagtagcggcgctccagcgcggggtcagcgagctccctgaagtcgtccgtctccaacgcgtccaccaggagaggccgagcctgcatccaccggacacagatcaccagccatgtgaccatgtaacaagacagactgacaaaagctttcgcgtcggcgtctgtaattaacttgagaatcatcgcatgcatatatacttaattacccattcaactaagctctcttctccgaggggctgagacgagtccacgggcttccgcccggtgatgagctccaacagcaccaccccgaacgaaaacacgtccgatctgtccgtcagcttcccgcttgatgcgtactccggcgccaggtacccgaatgtgcccatcacgcgcgtggagacatgagtcaccgaatcgttggtgaatttggcaagaccgaaatccgcgacctttgcttcgaaggcgtcatgcaagaggatgttgggcgacttgatgtccctatgtatgatcctaggatggcagtcttcgtgcaggtaggtcaaaccacgggctgatccgatggcaatgttcatgcgcttggggcaatccatgacggggaggcctactacgagcaagtgatggtcaagcgtc

SEQ ID NO: 6564 - DNA, 306 bp, Oryza sativa
  Clone ID: PAT_MRT4530_13242C.1
aggtgaaaaccaaacatttttttagccgccggaaaaacccggcattttttgggggcgggcaaaccctggcgggagaatattacaggtttttttcccccccaagaattaaataaaacaccaatccgccaaaaaatgaatttgcaacaaatggggtcaacattatcacaagaagaaagccccatctgcatttgcaaagggaaaaggaaagctggaagcctagcctggtcttttcagggaagccatcacccccaggcctttaaaaagaggcgctcctgcaaacacagggctaaagggtggaacccacgc

SEQ ID NO: 6565 - DNA, 212 bp, Oryza sativa
  unsure (1)..(212): unsure at all n locations
  Clone ID: PAT_MRT4530_13243C.1
cggacgggtttnaatactcgcgcaggcgcccatggccgncaagcccgagctcctnntgcagcgtanccacctcaaggcaccgactccgcctccnacggcgctgctgcgttgcgnccgcgcggccttactnctcggcctcccagncgtcgacgtacggacttctataattggcggggncccgcggnctngncgttggcgatgnanggtgngtt

SEQ ID NO: 6566 - DNA, 537 bp, Oryza sativa
  Clone ID: PAT_MRT4530_13244C.1
ggcacggcgtccgatggccccgtgcccgctgtacgtcggatgcagtcacctgtacgcgttctgagactggtgcgctgacatgggcgtgccctgtgccgctctcggggtggacagggagcgggatcaactctcgtggaggcggcggagctggagcgccccggtgaggatccctgtatggacgatgcgctcggacggagggggaatgataggcgagggaggaaggccggcggagtatcaagcccgtgtgccggagcctccgtggcggccggggcggcggctcgtcgcacgccgcgctgcagaggctctccgaggcgctgcaccagggcgcggcgctcccgaagaaatgagcatacgtgaaaattgttgcaccgtcacgttttcgaagtcgaagtaacaagagatgatgccgcttgtactgtttgtgccatatgcgtgtcttgtttgcactacagtaaccctgaaatgcagtcttgtactcgggtcattattaatgatgattttctatggacttaaaaaaaaaaaaaaaaaaaaaaaaaa

SEQ ID NO: 6567 - DNA, 180 bp, Oryza sativa
  unsure (1)..(180): unsure at all n locations
  Clone ID: PAT_MRT4530_13245C.1
atgcaagcacatcgatcgntctnactctccttcccatcaaattctcgtctntataagctccaaccattcttcccgtttaaacacacatctcctatagctcatcacanctctacatacangtgaccagtgngagtantttggcggcatccatggaggcattaagccanctggttactagtt

SEQ ID NO: 6568 - DNA, 189 bp, Oryza sativa
  Clone ID: PAT_MRT4530_13246C.1
atacatcaccaagttccacatcatacgtgaagcatacccatgataatcctacgaaaatgaatatcattttcgcatatgctctccttgctattgctgcatgcaacgcttctgaacggtatgatgctcttagtccaagttatagacaatatcaactactatcgcatctcctgctacaggaacaagtgctca

SEQ ID NO: 6569 - DNA, 998 bp, Oryza sativa
  Clone ID: PAT_MRT4530_13247C.1
gaccacgcgtccgacaaaacctcatctagagcatcgagctgagaggtaaggaagagaagaaaacaatggcggggaaagacgacgacgtgaaggtgctcggcgtggtggtgagcccgttcgcgatccgcgtgcgcatcgcgctcaacatcaagggcgtgagctacgagtacgtcgaggaggacatcttcaacaagagcgagctcctcctcacctccaacccggtgcacaagaaggtccccgtgctcatccacggcggcaagcccatctccgagtcgctcgtcatcgtgcagtacgtcgacgaggtctgggccgcggcgccatccgtcctccccgccgacccctacgaccgcgccgtcgcccgcttctgggccgcctacgtcgacaacaacatgttccctggaatggctggcgttcttttcgcggcgacggaggaggagagggcggcgaaggccgaggagacgctggcggcgttggcgcagctggagaaggcgttcgcggagtgcgcgggcgggaaggcgttcttcggcggcgactccatcgggtacgtcgacctcgcgctcgggagcaacctgcactggttcgaggcgctccgcaggttgttcggcgtggcgctgctggacgccggcaagaccccgctcctggcggcgtgggcgaagcggttcgtggaggccgaggcggccaagggggtggtgccggacgctggtgtggcggtggagctcggcaagaagctgcaggctcgtgcagcagcggcttccaccgctgcctgagtggcttggaataattattcgtttcggatggatcaaatcgatgggttcatgtgaagataaaaccgtgcgttatattagagtgccatttgaagtcttgtttagttcatttgtggggctattatgtaaagtctaagcatgcgtgcgtgtgtatatatatgtatgctctctgattcatcgatcatttgcagatatacagtgctattgttgtgttaaaaaaaaaaaaaaaaaaaa

SEQ ID NO: 6570 - DNA, 795 bp, Oryza sativa
  Clone ID: PAT_MRT4530_13248C.1
atggcggggaaagacgacgacgtgaaggtgctcggcgtggtggtgagcccgttcgcgatccgcgtgcgcatcgcgctcaacatcaagggcgtgagctacgagtacgtcgaggaggacatcttcaacaagagcgagctcctcctcacctccaacccggtgcacaagaaggtccccgtgctcatccacggcggcaagcccatctccgagtcgctcgtcatcgtgcagtacgtcgacgaggtctgggccgcggcgccatccgtcctccccgccgacccctacgaccgcgccgtcgcccgcttctgggccgcctacgtcgacaacaacgtgagtactgtactgtacactgtactggccatggccatgtctccaaagctgttcgatgagcagctgctggtaataagcttggttgtcttgcagatgttccctggaatggctggcgttcttttcgcggcgacggaggaggagagggcggcgaaggccgaggagacgctggcggcgttggcgcagctggagaaggcgttcgcggagtgcgcgggcgggaaggcgttcttcggcggcgactccatcgggtacgtcgacctcgcgctcgggagcaacctgcactggttcgaggcgctccgcaggttgttcggcgtggcgctgctggacgccggcaagaccccgctcctggcggcgtgggcgaagcggttcgtggaggccgaggcggccaagggggtggtgccggacgctggtgtggcggtggagctcggcaagaagctgcaggctcgtgcagcagcggcttccaccgctgcctga

SEQ ID NO: 6571 - DNA, 1768 bp, Oryza sativa
  Clone ID: PAT_MRT4530_13249C.1
ctgcaggaattcggcacgaggccccttttttttttttttttttttttttttttttttttttttttttttttggatcataaaatttggttttttttttcgagcttcatgaccatgtgtttagtgtgaaaacacacacggtagattcacgagacaatgattttgtacagacatgcagaagctcttgaatgctaagtacacaactaagaacaaagagctctgatgattttattctattcctgccgcaaatggtcatggctggctttttctggttggataagggagggctttattccacctcagatgactaatccatctgcaattatcgagttctttaatacgatggtgatgcctgatcggatgtagaagccttcagaggtcctatctgcttcctgtacaccctcagagttggaaattgttacattcttccctatcctcgcattcttgtctattatgcagttctgaatctttgtattctccccgattccaataggaacctttccttcagccagcagttctcctctttccagatcagtctcatagaaatcagcaccaagcattactgtatccttgaggtgcacattggaacctatcctagaacggattccaacaacactgtgctctatcctgcagctatccaagaaacatccatgggaaatgattgaatcagtgatcttactattattgatcatagatggcggtaagtttctccgtgatgtgtacattggtttattagcatcataaaagctgaatctcggtggctgttcagcaagagaaagattggcttcaaagaatgattttatagttcctatgtcttcccagtaatcattgaaaagatatgcctttacattgatttcttttgctgaagcaggaatgatttcagatccaaagtcatttgctgtgggaaaacgccatctcaaaagatttagaagtatctctttcttaaatatataaacccccattgacgctatgtatggcttctcttttgcttcatcctgtggtaagcctagaacagtggtgtcaacttgcattgcctttaaatcatctccttttggtttttcactaaatgcgataactcttcctgtgtcgtctatcttcattagaccaaaatcagatgcccggctatcatcaataggcaagcaacagatgctgatgtctgcacctctttgccgatgactctgaacaaagtccatgtagtccatgcggtagagatgatcaccagaaagaatcagcacatcatcgatgtctttagctttggcatcatcaaaaagccagtcaaattgccgaacagcatcagctgtaccctgaaaccacctctttccctccgatccaggcgtctgagttgctgctaggacctcgacgaatccatctccaaacgcgacgccgttgctgaagttatacgcccgggaaaggtgccggttgagcgacgcggagttgaactgggtgagaatgtacaccttgttgatcccccgcttcggccgctgtctctgcggggactcgggacgacgtgctgccgccgctacgcgcgtccgtggtgcgcccctgcggtggggaggcgggagcagcgtcgtccccgcgccgccgccgaggatgaccgccaccaccgtcttcgagtcccgcgcctccagcgccgcgtcctccgacgcccgggcaggccacggcctcgccaggctcgtgccgcaccgcgccgccgcggccacggaggccggggcggccacccgcaggtccatccccggagcgcaaaggtggcgtggcggacacgacggcggcc

SEQ ID NO: 6572 - DNA, 1267 bp, Oryza sativa
  Clone ID: PAT_MRT4530_1324C.1
atgagccccaggagggagcaggcggaggagcagcagcagcaggggtggagggaggaggcggtgtcgggcgcatcgctgaggcaggtggacctggagaggggcgccaatgggtgggcctcgccgccgggggatttgttccacctgcgcgcgagggggtacttttccggcggcggcggcggcggcggtggcggtggtgggggtgggaggcgcgggaaggcgccctccgccgccgagtggctcctccgccccgccggcgtcgactggttaaggagccactcccgcctcgaccacgtcctcgcccgcgacgacatccccgtcgccgccgccttccgccgcgcccgcctccgcaaggacccctccgcccacttcctcctcgccgtcaatctccaggtgccggggcggccggacgcgtacagcgcggtgttctacttcgcggcggaggcggcgatcccggcggagtcgctgctggggcggttcgtccacggcgacgacgcgtaccggaacgcgcggttcaagatcgtgaaccggatcgtgaagggcccgtggctggtgcgcgccaccgtcggcaactacgccgcctgcctcctcggccgcgcgctcacctgccgctaccacggcggggacggctacctcgagatcgacgtcgacatcggcagctccgccatcgccagcgccatcctccacctcgcgctcggcgcggtcacctccgtcaccatcgacatggggttcctcgtcgagtcccagtccgaggaggagctccccgagaggctcttcggcgccgtgcgcatcgcgcagatggagatgggcgccgccaagtatgtcgagacggcgcccgacgatgtggtccccgacgccggcagggctggcgccggattcagggttcactcggcgaaggtggccaacgatagccgccaccaagaacgcgccgccggcaaggtcgggaggtcgatgagctgccaggaacgcgggagcggaggaggaggttagtaagatgcgaaggaaagagagatctttggatggagaaagaggggattgagatcgaactagccggaggagaaaggccggggcacataaaatggggaagcggcgaatactcccttgatcataatgtgcaagtcactgattaagctgtgatcagaactgaaacctgatcgatgagaatagtatattattcgtaattatgatgccattcttctcttccaaaaatacagaattcagcttctctctaaaaaaaaaaaaaaaaaaaaaactcgagactagttctctc

SEQ ID NO: 6573 - DNA, 260 bp, Oryza sativa
  Clone ID: PAT_MRT4530_13250C.1
tagagacagagagcccgagaggggtggaggtggcgatgaaccggagccaggagggcaccggtgactattcccctcttcctttcgtcctctctcctaggattggggtgccatggtcgtcagaagcaggaagggcgtggaaggcggtgggccggttgcgcacatctgcatatggggcggtgaagagggcggtggtcggtggacgctacggcggaaaaaaggttgctgcgagtgatggcctgatggaccaccactacgagtga

SEQ ID NO: 6574 - DNA, 528 bp, Oryza sativa
  Clone ID: PAT_MRT4530_13251C.1
gtcgactgcccggcaagcactgcggcacctgcgccggcctcggccaccaggagtccagcctccgctgcgccctcgaggaggctctcttcctcggcagaatatttgttatgccctcaagaatgtgccttagctcggtacataacacaaaaggaatcctccattcaaccaatgcaacttcggagcaaagatgggaagaaaattcttgctcaatggattctctatatgatatagaccttatctcaaaaatagtacctgttattctggacaattccaagacatggcatgagataatgtcaagaagtatgaaatcagatggaggcatggcacatgttcaaggaattggcagagctgaactcaaagataatcccctgtattctaaagctctcgtaataaaccgcactgcaagtcctcttgcttggtttatggagtgcaaggatcgcaaaagccgcagttccgtgatgctttcttataccttcttgccagtatgccagctaaaaaattgagggatgcagcaaataagatgaacaa

SEQ ID NO: 6575 - DNA, 383 bp, Oryza sativa
  Clone ID: PAT_MRT4530_13252C.1
cgcagcacagccggatcgggggctgcgtgggggtttagcgcggggcgcggggcacccggcgccgcgcgccgcctagatcatagctagctctccctctccctctccctttccctcctgcctgacctgacctgatcgccggcgacccccggctcgcgccgccgccgtttttctcttttccccgggaggttgatgcttatcgcttcttgacttcttctcgtgtttggctctttgggtgtagattgatcagcgtttggtttctagtttgttttttctttttcctctttttttttttcgcttgtagacacccagagtaccaatcatttgtgtgggtgctgcctgatattaactattgttcatagttccaaaaaaaaaaaaaaaaaaaa

SEQ ID NO: 6576 - DNA, 470 bp, Oryza sativa
  Clone ID: PAT_MRT4530_13253C.1
ctcgatcggcctaggttttgccggctaaaatcagatgggtgacatgcaaatcgtcctggccgcaggcaaaatcgaggcgcagtacgtggagatgaaggtgccactctactcctacggctgcgagaagaagatcaagaaggccctgtcgcatctgagagggatacactcggttcaggtggactaccagcagcagaaggtgacggtgtgggggatctgcaaccgcgacgacgtgctcgcggccgttcggaagaagcggcgagcggcgcggttctggggcgccgaccagcccgacctcggggaggactcgatgccggcagatgctcgtaagcactacctgcaagcgttcaccgcgtacaggtttaggaagtcttggaagaagctctttccactgatccggctgtgatccggaactcaaaagtttctgtcacgcgaacacgggccgccggctagtgcgattcaggagcggcacc

SEQ ID NO: 6577 - DNA, 1554 bp, Oryza sativa
  Clone ID: PAT_MRT4530_13254C.1
atggccatgaagaggacgatgaaggttgtgttctccctcgcgctcctgctgcttccgctcgcctcggtggcagaggaattcgacttcatgtaccttgcccagcagtggcctgactcgtactgtagcacgcacaagtgcctcgtgaagcccccgcccccgtcgcacttcaccatccatggcctgtggccgagctacaacaagctcatagacggcaaaatgtggctggaggactgcaacaaggaagacccgctcgacccgacgcagatccaggacctggagaagcagctcgaccagaaatggccgtcgctgaaacagaccaacctcgagttctggagcctcgagtggaagaagcacggcacctgctccaacctcggccagcacgcctacttcgaggccgcgctcgcgctggagaggctcaccaacctcacgaagatcctcgccgacggcggcgtcgggccgtccgacgtgaagacctacacgttccgcgagatcagtgacgccctcgccaggggcaccgggttcaggacctacttcaagtgtagcaagaacaaggccggcgatacgctgctgtccgaggtgaggcagtgcgtcgaccgctacggcgagaagctcatcaactgcacggcgttgtcgtttgactactgcgataacgctgacaagatcaagatgccccaatcggtgggtggtccgggtggtccccggaacacccaaaaaaattcaggcccgaggcccaatagacgtaccaagtggcggcgcgtgtggactagggttaggactcttcactccttcccatcccgatgtttcggcgatcaagcgcaaggcagcaagggcggcgtgctggcgcggcggcaggcggcggggtgcggtgacgcgaccggcgtcagcgtgcgggtgtggcgactgatggcagcagctgcgacctgtggcctgcgggcagcaagcaacgcaaccatgcaatctgcaaggaaaggaagactaagcaagagggccctagggcagggagtaccagctggaaggctcaaggggaggaacgacctgaagaggaagacggcaacaaggctgacgacgtacagtctgaagacgggcgattgtctcatctacatcgacgtcgttcaaggctgcatcagtacattcgacctcttggattgctctgatctcccaggcctcgtgtttttcatcaacacacaaattggcacgcccaatgggacccgtcagaagtcagaattacaactgcagtttttctccatggccgagaaaccaccagcatcaccatcctcggctggtcctggctctattaaagaaaagatccagaagctgggtttgtccgaggttgatgaagccaacattgtgcctgtcactctggataaattgacacctgagcagcaaaaggaccttgatacaatgatgcagcaagcacagaatcagttcttgagctcattcacggagacccgcaaggggacattggaaagtacaaaggtgttcaaggtgatggtgctcagggagttcaaggtgaaggccctaatcaagatggcaacgcggcacagttacagttaa

SEQ ID NO: 6578 - DNA, 896 bp, Oryza sativa
  Clone ID: PAT_MRT4530_13255C.1
ctcaccgggaggaggaagcagaggagagggcaggaggcgcaacaatggcggcctccctgtggctgcagctccctgctccacctgcttctgccgccgtccacaaccccgtcttcctcacaggcaacctcagctcttcactgctctgcaagaagcatccacaggcggccagagggagcattctgtgcagcagcagcagctcatccaactcttctgcttctgtggtgaccaaggagcaagaggcagttgctgctgcttcctcctctcaagaggaaggagtagcagtttctgagactgaatttgtcagctacagggatgaccccaacttcaggggatgcagagggtgcgggcgggaggaggtggagaggggttgcaacggcgaggggcggatccagggcggcatagccaccgtccccggcttcgggtggtggcctatcaaggcgtaccggccgtgccccggcttcgtcgcctccggcggccggtaccggaggcaggggcagagcatggacgatgtggcttccggcagagggaagaagcgagagctgagaggtgatccagtccaagaaatttcaagcctggaaatgctggacaaggatgttcaaaacttcaaccccagcctgcaaaactctgtagctgacgtaatatcccagtgcctcatggcattcatgggttgcatattgctaccaggtgtaatagcgaaattgtatcgaaactttgaaagtactactatcctatgataaaagtagcaatatcagattgttgatttactggcttgattactattgagccttgacactgcgacattattggtaatgctgttgctgaatgtattatgaacaacggcaaaaaacattagactggtactccctccgtcctaaaataaaatcatttttggcttc

SEQ ID NO: 6579 - DNA, 399 bp, Oryza sativa
  Clone ID: PAT_MRT4530_13256C.1
atgggttacactaatgtgataaaacagaagcagaagggttctgatagaatattgatgccaagtgttgaaggccagcaagctggaaagtggattgtcattgattctggaagtatcatcattcatgcacttgaagaaagagcaagagaatattatgatttggaaagcatttggacaaaagaagtgtctccaaacatttctgttcaggtcaacaaagatgataaagtggtgtcaagcatgtatttgcatccaatgaattttgaggatggtggtaggcgaagtacccgtcaacagcgagacgctcatggtgatttcgtcaatttcatgatatcccggcttagtcttttggatatgctcatagagggcaaggttttaaaacgtgacaaatttccatgcaaatga

SEQ ID NO: 6580 - DNA, 160 bp, Oryza sativa
  Clone ID: PAT_MRT4530_13257C.1
atggcggatcgaagcgacaacgagctcggcaccactggcggcttgctggatctcccctctctcccatgggatgagctcgacgatgacacggaggctaggaaaaacgacaatgtgctcactcactcatgcacgcgggagcgggagggcgagggcgagcgcg

SEQ ID NO: 6581 - DNA, 261 bp, Oryza sativa
  Clone ID: PAT_MRT4530_13258C.1
atgaatcggtcgctactcggccatctgctcaacgccgatgatgatgatgaggtgctcaccaacaagtctgggttgttttcatcgatgagtcctcgccgcacaaactacatcgagacagacacgacttcccttatactcggccgacaaatcgacgatcctaccggctgcgacatggcgcacgcacgggcttacacctcctatttcaccattcggctgtcgtcgtccccgactccaggacctcgccaacaccttaacctctag

SEQ ID NO: 6582 - DNA, 565 bp, Oryza sativa
  Clone ID: PAT_MRT4530_13259C.1
aaaaattaattaagcagcttcttccattcagacataggtcgatccatcgcgattcttccatggacgtcgacgagctgttgttgatagcaatcagccatggaaacaacgaagacggtagcgacggggttgtcgggatatcggacgaggtgtacgccgcggagctccagctccaagagttgatcatgtcgtccgccatggcgggcaccgctgcggcggcggcagatcagcttgacagcggtagcgccgtccacgcgtcgagcgaggacgcagcagctgcagctcatgcgaagacgtctccatcctccgctctcgtccccgccgccgagtgctcgtcctcctcggcagcggccatgacccttgtcgccagcgtcgtcaagtgctcctgctcctcgtcagctatggcaccgtcggccaccaccacgtcgttcctcttctgcaagatctgcatggacgacgtgccggcgtccgacgcgcaccgcggcagccacggctgcgcgcacgccttctgcgccgcctgcctcgccggccacatcgccgctaagctccactccggcggaggcgtcta

SEQ ID NO: 6583 - DNA, 2540 bp, Oryza sativa
  Clone ID: PAT_MRT4530_1325C.1
atggacagcgatgagaaggaaaaaaaaagagagaacaaggagactatcaccaaaaaaatggagatcaagaggatcaagcaaacaagagaaaacataccagggttaaagaatgagacacaaaaagacaaagacatcaataaacaaggaaaaatacaggcacagattcaagtaatgaaagaaattgctggtacaaggaagcgtgaaagtgaagaagggggaataaatgcaggggagacaatgagaagaaaatttcaaaaaactgggcttgaagaaatcaaaagagacatacaaatatcagaaaacaagggaaatttacagatggaggcaggaaagatgagctacactaatctcatgcaacaaataattcagagtccaagagtgaccatgcaaacaaatgaggaaggaatagaggcatatacaaatctacttcaaacacccgtcgcatttgataattctatgattttgacaacaagcaggttttctccacaagaaacagatcagcaagatgggttttatcaacaacagatttctacaacagaacgcatctatcaagaatttgatgcaatatacaataacaacaacatgactacatggagtgagagatcatcagaaagagatataaaagagttgtatgaatccaaaaacaaccatttcaaaagacaggtgaatgggacgacaatggcaatgcagagtaatgagcatccaaacgaagaggatatacaacaaaattcaagaaatgagaatggacagataaacagtggacaagtgaatgaagaaataacagaagttagaaatgacacagaaggtgcacaaaaagtccaaaataactgtgaacaaagtactataacagctagtaatgaagaaatcaatgaagtaattgacaaaaggcacatacctgaagttggaatggagttcagatcagataaggaggctcatggattcttcaacttttatgcatacctagttgggttctcaattgtaaatacacaccattacaagacaacaagcaagaaaatgaatggagatgaaactatggaaactttcaaatgggtttttgaggcattcctaacagctatgggaggaaaacatcctgagacaatcataactgaccaagacttggcaatgaaatcagcaatagaaaaagtatttccggatacaaaacacacgaattgcttgttccatattatgaagaagtggagagaaaggacaggaaacacattttcagaaaagaaaaataaagatctctacaatgaattttatgatattgttcacaactgcttgacaagagttgagtttgaaacattgtggcctcaaatgattgaaaagtatggtttgcaaaacatcaaatacctacagacaatgtggagaacaagggaaaactatataccattgtactttaaattagatttttgcccatttattcacagtacagcactaagtgaggtgacaaatgcaaggttcaaaaggggtgtgggcccaacacacagtgtaatgagtttccttaaagaatttgagataatcaatgacacaatctttgatacagaattttgcaaagatcatcagtccagaacaaagaagcctaagacactatggtcaagctacaagattgaactacaagcttcagagatgtacaacttgagaattttcaaaaaatttcaagatgagttgcaggaaacactgaatcaagaaattgcagttatagaacatgggaaaacatatgaagtatatgcagctgaaaacctaacaaaacaggaattcagacagagaaaatatgtgatcataacagacttagcacaatagaactatgtgtgcatatgtgcaaagccatatcctgaaagtgatgctatttctaaaaataagcaaaattcctgaaaagtacataattgaaaggtggaagaaaaaggagagaaaatgcatagcaagaatagagaaaccagctagtgatgaaaacagttcagttcttaggttcaatgtcctctctagaagaatggctgacatggcttcaaaagcatcaaagagtaaagacacttacctgtatatgctagatcagatggacaggttggatggaaatttggacttgttgattgaacaggcacctgaaaatctgcaacaaaataatcaaggcagtacaacaaaagagagtaatggggaataagaaacagaagaaacaatgaatgaacaagaagatatcgaagaccctaatttagcaaatacaaaaggcaaaaaaatcagctagaacaaaagcaattgtagagaagcttaaagagattccaaaaaggcattgcacacgatgtggaagaacaaatcatacaatagagacatgcccattgatggaagacacatacattatgcaaaaaaaaatgaaatttcaattttcaggaaagaggtcagctagtcaagacaatgaaagaaaaacaattgagaagaggacaagaagatgaagcaaagatgaacagatagatcaagggaaaaaaagagctgacgagtacgaggaaatttctcctacaggaagaaaaaaaaatgaaattttaaactaaata

SEQ ID NO: 6584 - DNA, 443 bp, Oryza sativa
  Clone ID: PAT_MRT4530_13260C.1
cccactcgttcggggaggatgagtatgcaaggattgggggagattgtgacaaggtcatacaatggaacggttatcgagttttcggtgttcttgcaatgtcgcgatcaattggtgacagatatctgaagccatggataattccagtcccagaggtaacaatagtttcgcgggctaaggatgacgagtgccttattcttgccagcgacggcctctgggatgtaatgtcaaatgaagaggtatgtgaaatcgctcgcaagcggatacttctgtggcacaaaaagaacagcacaagctcatcatcagccccacgggttggtgattccgcagactcagccgctcaagcggctgctgaatgcttgtcaaagcttgctcttcaaaaggggagcaaagacaacattactgtcgtggtagttgatctgaaagcacagcgcaagttcaagagc

SEQ ID NO: 6585 - DNA, 130 bp, Oryza sativa
  Clone ID: PAT_MRT4530_13261C.1
ttagcgcggagccgtcgccactccccgcgaggtttactctgcagaccattcggaaatcctacatccgagcctagccgcttgctatccaccggcggaggcgggcatggcgacaccgtcggggcctgacctt

SEQ ID NO: 6586 - DNA, 177 bp, Oryza sativa
  Clone ID: PAT_MRT4530_13262C.1
cacagtgcaacgagcttcttgcggtggacagataggtctaataggcatcggaggagcgggaggacactctggatccgaagcacagaacccatggtgccatgggaagccagcaccgagaacgactccgccacactacgccgactctgggcaagtgccaaaactgggcaaacccctgcc

SEQ ID NO: 6587 - DNA, 300 bp, Oryza sativa
  Clone ID: PAT_MRT4530_13263C.1
atgggcgagtggatctggggtggcgcagcatgcgacgaggagcaggacaggtgggaaatcacaaatcccagtcattgggagtggaggatgcgcggccagtgcccatataccaccatcaccgtcatcacggttgcatttgctgtggacgttggtggcagccggtacggagctgtgctggtgggtcgatggtgggctacaaaggtagagtacgtgcgagcggcggtgcggctaagcattgagccctacagtttgcggacgtccgcgcagcggtgcagtacctgcctctgcggctctacctag

SEQ ID NO: 6588 - DNA, 243 bp, Oryza sativa
  Clone ID: PAT_MRT4530_13264C.1
gacggatcgaaagcttgatatgaatgactcgacggccgcagcaagtacatgatattactcatgaggtactcacaaatgttgtcaacaacaaggaagtcggatacagtggctggagtacacagtgaacagcctaatgcacaaactcaattcttatgtaagtaaagaaatgctattatggttcctagaaatagacatactactgttgtctcgatcatagtgctcatgacactctcgtcagtgtcg

SEQ ID NO: 6589 - DNA, 460 bp, Oryza sativa
  Clone ID: PAT_MRT4530_13265C.1
ggagaaaattgcatagtgcgagctaagcgcaattgggcgaacgccgcgagccgccaccaagccaaaccagagcactccgccgccgcgccatggcttccccgtccccgtcctcctcacctctccacccgcagcatcaacaccagcacccgcttcccccgcacccgcagccccagtaccaatccctctcccgccccacctctccccgcacgatccgtcgctgctcctctccctcgatgtcttccactccaagccctccgattcgcccaagccgctcgtcggctccgcccgctcccctctccgtgacctcctcttctcaaccaaccctaaccctagccccgattcccccgcctccgcgctgatcaccctaccgctcctccgcccctccggccgcccacaggggaagctccgcatccgcctcgcccttcgcgagcgctccccgtctcctcccgagccgcagtat

SEQ ID NO: 6590 - DNA, 494 bp, Oryza sativa
  Clone ID: PAT_MRT4530_13266C.1
ggtggatccgtgcttgccgacggcgacggtctcggagtgcgcgtggtcgtggcacttgcgcttgtggcctgcgccggctgacatggcggcggaagcagaggacaggggtggatagaccaatatggtcgccggcggagggggaagcatcaagtaggacgacccggagcccaaagccaagtacaggctggcagcagcacataccaaagagaggaaggacaagctcaatgcagatatgacagacaccatgcacccggggaacaagacgcacccggacgccatgaacgtgaaccatagcatcataaagagagacatggaaccaagcgactacctaacggggaacgggtagtaacccttggacttgctcacaaactctactaacgggcctggccttgaacgaaactgataatctagtgacacgctgaagaagaccttctctagcatgcctacgaagagaccgaagcagtagaacgtactcagctgttgcatgtgacagt

SEQ ID NO: 6591 - DNA, 1365 bp, Oryza sativa
  Clone ID: PAT_MRT4530_13267C.1
tgtgaatattgcatagtgcgagctaagcgcaattgggcgaacgccgcgagccgccaccaagccaaaccagagcactccgccgccgcgccatggcttccccgtccccgtcctcctcacctctccacccgcagcatcaacaccagcacccgcttcccccgcacccgcagccccagtaccaatccccaccgcctccgatgccgccgccgccccccgcggcgccactcaaagctatcgatctggaggtgaccgtcgtctcgggcaagcacctgaagaacgtcaactggcgccgcggcgacctccgcgcctacgtcgtcgcctacctcgacccttcccgccgcgccgccacccgccccgacgacgtcggcggctgcaagccggcatggaacgagcgcgtcgtcctccctctcccgccccacctctccccgcacgatccgtcgctgctcctctccctcgatgtcttccactccaagccctccgattcgcccaagccgctcgtcggctccgcccgctcccctctccgtgacctcctcttctcaaccaaccctaaccctagccccgattcccccgcctccgcgctgatcaccctcccgctcctccgcccctccggccgcccacaggggaagctccgcatccgcctcgcccttcgcgagcgctccccgcctcctcccgagccgcagtatccgcctccttcctcctccccctactatttcccaccccctccgcctcccgcatactcggccccgcctccgcctcaatacggctcggagcagtactaccgttccggtgggtactactctgcaccaccgccaccgcctcagtatgagtacaccgcagggccctctgccccggtggaatacaacaggcaatatgatcctagagcggggagtgggagtggaaatgggaggtatggagtaggcactgggattgcagtgggaacggtgacgggggcccttggagggcttgcaattgatgaaggtgtgaaatacaaagaggagaagtcggcagatcgggttgaagataaggtagtgcctgctggaagagatgacgactcaagggggtaccgtgagtattgattataggagttcatgtgggtgaggatgcactgtgagttggtccttctccatccctgccaatgtgggaataaaattgcagtgtggtattatgcttcgctctcttgtatatattttcttcagtgttgtgaattatcatgttacttatgcttatggcttgcgtcttatgacaaatttggtgtgtgttatgaatgttctattatcatatttaaaactgtacatgtaacttaatgtcttgttctatagtttatctttcctgtatctggtgtttggccaaaaaaaaaaaaaaaaaaaa

SEQ ID NO: 6592 - DNA, 234 bp, Oryza sativa
  Clone ID: PAT_MRT4530_13268C.1
atgaggctataccaggagctaccgcaaaggttgagcgctgaggaggtggaggcggatacggcggtgttgaccttggcggaggacaagaacaccacatgcctctcccgggtgaaggctacggtgttggtagaggatggcgtccctagagagccccacgacatgctgctggagatgcgggaaaatgttgaaggccacgacgtcattggagaacaacgtcccaagagagctccatga

SEQ ID NO: 6593 - DNA, 4047 bp, Oryza sativa
  Clone ID: PAT_MRT4530_13269C.1
atgacgagctccggcaagcgagccgacggattcctgaggcggttccggcgccggcgactcctcgccttcctccggcgcgagcacctctacgccaccttggacgcgctgggcggcgagacgcggctgttcctcaacgcgcggaccctgcagaccatgctggcggactgccggtgggaggaggcgcggcgggattccgttgaatggcaattccttaggatccaggcagcattgatcgtcaaggaattggtcatcaacactccggagttcagtcatctgttgcggttgccacggtacccagtcaatccggaatgcatgatgcccgtctggtttgggtgttgccggaagcatcagagaaagatcataggtcggatgccggcatctcttctagcccactgttttcttccaaaggagaggaagttcacagcttttaactctttccttcatgcaggtgtccttcaccaaagaaacaaggtgctagctagggtgttggaggtcaaagaacattcggattcttgtaagaaaccatcatttgctccagtagaggtttatttcagctgcttttcacttctggcctcgttatttagtttattcagtagtcacatacaatctgggcccttctctgtttctgttcggctcgacaacacggcgccggggaggcgaggttatcggcctcgccctaccgtcacccattcctaccacttgcgcaatcgggggctgctcgccgtagctcctaacatcttggtatcagcttccagcgatccttcgtcatgtcgcgcttccacctccaccatggctgccaacaatggcgacagcgacgacatctggcgccagcgttttgaggaagtcttggcatgcctcgacgccgccatagtaggcgatcggccgccccgctaccacaagctggacttccccaagttcgacggccacggcgatccactcccgttccttaatcgttgcgagcaattcttccggggtcaacgcacaccagaagatgacaagttgtggctggcttcgtaccatcacctcgatggtgctcaacagtggtacacccgtctggaacaagatcatggcgcaccctcttggcgtcgtttctccgatctcctcaacctgagctatggaccgccattacggtcggcacctctcggcgagctggcggcctgccgccggacgacgaccgtcgacgactactccgagcgcttcctcgaccttctggcccgcgccggctatctctccgaggatccacaggtacagctgtacacggttggcttacaagaacccctcagtttggatgttcagatgcagaatccgaccacactggaggtggccatgagcttggcgcgatcatacgagcgtcgcgccatcagcgtccaccatgacaggctgcgggccgcggcatatccttctcctaccacaagtagcgcacccgccagctgttgccaggctcggcgcccgtggcggttcggccgtaccgccaccctgctcgccacaaagacgagctcgagtgccaatgtcgaacaaggcctcattcgccggagctcgtcggcgttctcatctccggtgttgctcgtcaagaaggccgacggctcgtggcggttctgcgtcgactaccgagcgctgaacgagcgcacgatcaaagacaagtacccgataccggtcgtcgacgagctgttagacgagatgcacggcgccaccatcttctccaagctcgacttacggtctgggtatcatcaagtgcgtatgcacccggatgacatcgacaagacggcattccggacgcacgatgggctctacgagtttctggtgatgccattcggcctgacgaacgcgccaaccacgttccaatccctgatgaacgatgtgctccggccgttcctccgccgtttcgtcctcgtcttcttcgacgacattctcatctacagcccgtcgtggacagcacatctacagcacgtccgtaccgtgttcatggcgctccgcgcggccaaactcttcgtcaagcgctccaagtgctcattcggggacgccagcgtcgcctacttgccacattgtgccgcgacacggcgtcgccatggatgcctccaaaattcaagccgtcgtggactggccgcgccctcactcacccaaggatcttcgcgggtttctcgggacgggttcacatggtcaccatccgccgacgatgcgttccagcggctcaagctcgcactgaccaccgctccggtcctcacccttccagacttcaccacggctttcacggtggagtgcgacgcgtctggcacggggtttggcgcggtcctacaccaaggcgccgggccgatcgcgtacttcagtcggccggtcgccgctcgataccaagcactggcggcatatgaacgggagctcatcggactagtgcaagctgttcgacactggagaccgtatttgtgggggcgccaatttctcgtgaagacggaccattacagcctcaaatacctgcttgatcagcggctttccacgattccacagcaccattgggtaagtaaattactgggatttgatttcaccgtggaatacaaaccagggaagcagaacgcggcggcagacgccctgtcacgccgcgcgccaccggagggccagcttcttgcattgtcgatgccaacattcgacctcctccacgagctgcgttcttcctcggcctccgacccggcactggtgaccctccgggatgaaatcaacgcaggaacatgcggtgcgccgtgggcactcgtggacggcttcgtcaccttcaagcgccgcatctacgtgcctcccgagtcaccgtggctatcggcgatcgtggcggccgctcacgacgaaggacacgaaggcatcaaaagactctgcatcgactccggcgtgacttccacacgcctcatgaccgccgcctcgtcagcgactttgttcgtggctgccttgtctgccagcgcaacaagacggagcacttacacccggcggggttgctgcttccgcttccggtgccggcggcggtgtggcaagaccgtcatactaacggtggtggacaagatctccaagtatgcccacttcatcgccctggcgcacctgtacacggcggagacggtggtgcgcgcgttcttcaccgacattgtccgtctccatggggtacccacgtccatcgtctccgaccgggacaccgtgttcccctcggcgttctggacagcgctcttcgcggcaacgggcaccaagttgcaccggagctcagcgttccacccccaatcggacggacagtcggaggcggccaacaagaccatttccatgtatcctcgctgcctcaccggtgaccgtccgcgccactggcttcgctggttgccatgggcggaatacgtctacaacacctccttccacgccgcactccgcacgacgccattcaagctcgtctatggcagggaccctccatctatccgcgcctacgacgccagtgagacgcgggtggtggctgtggcgcagtccatggaggaacgggacgcattcctcgccgacgttcgcgtccgtctggagcaggcccaacagtacgccaagcgctactatgacaagcatctatggcttcgcgttcgccaccgagtgccggcgtcgctgccggatgcaaccaagggcaagttgaggccccgtttctatggaccgtaccaggtcctcgccgtcatcaacaacgtcgcttatcgtttggcgcttccacccggcactcggctgcacgacgtattcatgggcccacctgtcaggctttcttttcctccttcctcccgttatcttcctcctcttccttcttctgccgagcaaactgacaggagggagaggaggggcgtcggtgctccagtggccggagggcggcgatactggcggcgggttgtgttcccgggtgtggcacacctagggagtgcggtggctggacaagggagtcggttcgccggaggaggacgaggaaggcacggcgacgacttcgtgaaggagaaggggacggcaccggcttccgttcgtgattggctggtgatggcggcagtgcacacgcggcgacgccagtga

SEQ ID NO: 6594 - DNA, 411 bp, Oryza sativa
  Clone ID: PAT_MRT4530_1326C.1
cccacgcgtccgcccacgcgtccggttcttttgtgctggccacaacgaccagctgctagtgaaaactcaactgtctgcaggggataagaagatgaagctctggacacatacaagataaaaaatgaaacttaatggtctgcaggggatcaaacatatcataggagcatggaaggaatgagtgaaaactcggatgtaaggtattatctctttaaacacagggaaggtttcaaagttttaatgaatagctttatctgatatttgtatataacttgattgattttttttcctttaaagttgcatcccactaggtagagtatatgtctggtattgtgatcaaaatgttatataatgccaaaagtaaaaaaaaaatgtttatataaaattcaacaaaaaaaaaaaaaaaaaacaaaa

SEQ ID NO: 6595 - DNA, 177 bp, Oryza sativa
  Clone ID: PAT_MRT4530_13270C.1
atggaggtcacactgccatctataacaaattctaagttcaaatctacaagagtagtacaaatcacaagctcactcagtataactggcgcgcagggatggccggcgaccgctgggtgcagcggcagtggtgaccatgtagggggcgtcggtgctggtgcaccagtgcagcggatctaa

SEQ ID NO: 6596 - DNA, 1825 bp, Oryza sativa
  Clone ID: PAT_MRT4530_13271C.1
cggcaggcaggagctgcgaggagtaggcgagcgcggtggcctacccccgcttctcctgcctgcttcgcctgccgccgccacgctcacccaccgtcgccccgcttgtctcggcccgtcgaagaagatgagagaagagaagaaaataaaggaggaaagagaagaaaggggaagaaagaagggatcggcgtgcgtgatgacgagctccggcaagcgagccgacggattcctgaggcggttccggcgccggcgactcctcgccttcctccggcgcgagcacctctacgccaccttggacgcgctgggcggcgagacgcggctgttcctcaacgcgcggaccctgcagaccatgctggcggactgccggtgggaggaggcgcggcggtacgtcggccgcttcctgccgcgccgccagattggggtggaggcgcgcgccgtcctcagactcatcgcctacctcagcgccgtcgacgacgtcgcccagggcagacgtccggggagcgaattcgccggcgaccatctcgagagggagttcgaagctgacgctacttcctccaataccatggtctgcgccgatttcgtccggaaattctcccgcaagcgctcctctttcccaggaagatgggattccgttgaatggcaattccttaggatccaggcagcattgatcgtcaaggaattggtcatcaacactccggagttcagtcatctgttgcggttgccacggtacccagtgttgccggaagcatcagagaaagatcataggtcggatgccggcatctcttctagcccactgttttcttccaaaggagaggtgtccttcaccaaagaaacaagtcacatacaatctgggcccttctctgtttctgttcggctcgacaacacggcgccggggaggcgaggttatcggcctcgccctaccgtcacccattcctaccacttgcgcaatcgggggctgctcgccgtagctcctaacatcttggtatcagcttccagcgatccttcgtcatgtcgcgcttccacctccaccatggctgccaacaatggcgacagcgacgacatctggcgccagcgttttgaggaagtcttggcatgcctcgacgccgccatagtaggcgatcggccgccccgctaccacaagctggacttccccaagttcgacggccacggcgatccactcccgttccttaatcgttgcgagcaattcttccggggtcaacgcacaccagaagatgacaagttgtggctggcttcgtaccatcacctcgatggtgctcaacagtggtacacccgtctggaacaagatcatggcgcaccctcttggcgtcgtttctccgatctcctcaacctgagctatggaccgccattacggtcggcacctctcggcgagctggcggcctgccgccggacgacgaccgtcgacgactactccgagcgcttcctcgaccttctggcccgcgccggctatctctccgaggatccacaggtacagctgtacacggttggcttacaagaacccctcagtttggatgttcagatgcagaatccgaccacactggaggtggccatgagcttggcgcgatcatacgagcgtcgcgccatcagcgtccaccatgacaggctgcgggccgcggcatatccttctcctaccacaagtagcgcacccgccaggtccggcatcggacatcgcagccaccgctgccaagccagcggccgcgccacctgcgccgggacgcgctgtccgccggctgtcgccagaagagatggacgaacgccgccgacaagggctctgcttcaattgcgacgagccgtactcacggggccataa

SEQ ID NO: 6597 - DNA, 769 bp, Oryza sativa
  Clone ID: PAT_MRT4530_13272C.1
acacaaaaccgagccgagctctgtctctgtctctcctggccatgtccggccatggccgccaccgatcgatctccatccatagagcatcccaaaccaaatccattcgccaccagccaccccgtacaccgaagaacccattttacccacttcccccttcacttcccctttgaatcgagcgtcaccggagctctctctctctctctctctctctctctccggttcatgcaattgtgctcgccgttccggcctcctctctcactcccttgtccagccaccgcactccctaggtgtgccacacccgggaacacaacccgccgccagtatcgccgccctccggccactggagcaccgacgcccctcctctccctcctgtcagtttgctcggcagaagaaggaagaggaggaagataacgggaggaaggaggaaaagaaagcctgacaggtgggcccatgaatacgtcgtgcagccgagtgccgggtggaagcgccaaacgataagcgacgttgttgatgacggcgaggacctggtacggtccatagaaacggggcctcaacttgcccttggttgcatccggcagcgacgccggcactcggtggcgaacgcgaagccatagatgcttgtcatagtagcgcttggcgtactgttgggcctgctccagacggacgcgaacgtcggcgaggaatgcgtcccgttcctccatggactgcgccacagccaccacccgcgtctcactggcgtcgtaggcgcggatagatggagggtccctgc

SEQ ID NO: 6598 - DNA, 246 bp, Oryza sativa
  Clone ID: PAT_MRT4530_13273C.1
atgggcctcgggatccgtgcccgcgaaggtgatcttggtgggtcccgcaaggaaaatatcgtctcgggagtgggccccgttgtcagggtcagcctagccgaggcgggaggacacgtgtacggcgacccaggcgaggtgggcccggtttggcattcacccacccgcgagggaggcagtagcagcaatgaggaggagcgagacacggggaatctggcaagcgggcccggctttacagctgggcaataa

SEQ ID NO: 6599 - DNA, 294 bp, Oryza sativa
  Clone ID: PAT_MRT4530_13274C.1
tgttttttttgaccttatagttactcgaggggggcggtttagttgagagatgggacaggcaatgccttacataaacgggctggcgcaaggctggcaatctcctgtcactcctactacacgctggtcataggaacagtcatgcacgttgatgaagccgacgccggcgtatacgacattcatacccgtcgacgtgacgagctagaactcttcttgaatggcatggaccgtctcgccatagctcatgtcgcgcttgctctggttgacacgcatatgcagctcgaccatttgatcacc

SEQ ID NO: 6600 - DNA, 1671 bp, Oryza sativa
  Clone ID: PAT_MRT4530_13275C.1
ggcgccacgccgagctcgctctcgccgcgccacgccgcgccgcgcgttcgaccggatcggattggcggcgagggagaggagaggggagggatggaggcggcggatctgagcgccgcggcggaggcgctggcgctgcaggtggacctgctgcagctgccgcctgagatcccggcgcccggggcgcccgcgctgagcgtggtgctcgaccggctgttcgcgcactggctgaccctcccggacaccgtcgcgctggtcgggtgcctggtgcagaaggcgaaggcgagcggcgggggcgggggcgggggcgggggcggcggcgcggcgggcgccgccgtcggccccgggtccgcgatgctgccgtcgatgatgatgcaggggggcgccgcggtgccgccgctctcgccgaggtcgccgcggctctccaggaggcccagcggcgtgggcaccggcggccagtccaaccgctccgcctccccgctccggccggccaccgcccgcgccgtcaaggaagtcataccccagttctactttcaagatgggcgcccacccacatacgagctgaagaagcaatgcatagcgattgttgatcagctcttcgctggacactccaatggtctccggattcaagagtttcggctggtcactagggaactctgcaaactgccatcattctttaccactgttctttttgggaagattgataaggaaaacacaggatttgtcacaagggatgccttcatcgatttctggttaaatagcaatatggtgactatggacgttgcaacccaagtattcataatcttaaagcaaaagaatcaagattttctcacaaagcattgtttgccagctgagactgtcgtatataggatattttattgcttgagtcgaattggaggtggccatcttatacttagggagctaaagcgtggaaatctgattgatgcgctgcgacatgcggatgatgaagaggatattaataaagttttaaagtatttctcatatgagcatttttatgtgatatattgcaagttctgggagctggacacagaccatgatttcttcattgataaagaaaatcttattaagtatggaaatcatgcattgacatataggattgtagatagaattttctcagaggttcctaggaaatttaccagcaaggttgaagggaagatgggatatgaagattttgttcatttcatattatctgaagaggataagtcatcagaaccaagccaggaatattggttcagatgtatagatgtggatggcaatggcattctcacacataatgaactacagttcttttttgaggagcaacttcatcgcatggaatgcatggcccaggaacctgtactgtttgaagacatcttgtgtcaactaattgatatgattggacctgagaatgagaccttttttacattaaaagacttccgaaggtgcaaactgtctgggcatttcttcaacattctcttcaacctgaacaaatttatggcctttgaagctagagatcccttcctcatccgccaaatgcgtgaagagccatcattgacagactgggatcgttttgctcggagagagtatataagattggccatggaagaagatggtgaagatgcttcaaacgcaagtggagatgtttgggatgagtcacttgaatctcctttctaa

SEQ ID NO: 6601 - DNA, 183 bp, Oryza sativa
  Clone ID: PAT_MRT4530_13276C.1
ggggcgaggtaagggagatcggggatgaacccaaaaacatgatgaagcgcataggtagaagagctggaagaagcaggagaccaatggaccaacacaaacggcatcgcagacactctggagcggggactacggacaacaacccaggcagctattgcccaaaacagaaagagacggggggaaacg

SEQ ID NO: 6602 - DNA, 2934 bp, Oryza sativa
  Clone ID: PAT_MRT4530_13277C.1
atggagacctgtaaaggaacaattgtccaaagatacaagatgaaactagttgctgatgttcctgggacatgtttttccaaggatggagaagtacaacaggttttagatggtacagctcaatcaggtggtaaaagtgctgcagatgtgtcaggtgataagggtgatggttctcagggagtgcaaggtgaggatctcagcccagatgctgactgctcagccaattgctcccaatgcgccatcagcttagccgatagctccagcatcggcttctgcacctgctgcaccatcatcggcaccaggacatccgacaagcagccgaggcagcacgctgcgaatcaagttgtcctagagcatttggttcataatgtgcaaccagatcaaacggtgatacctcaagttattgccgaacatttgggggtgcctcagcaaagaccatgggccgatatgattgcagatgtgatgagagagcagtttgggctcaagccgaaggacactggaaacttgtatcggcatccataccccgagtggtttgagatgccgggccccacacggcagccgcggggcgcgcccgaaggcggccacgccggcacagccgacgggaggcggcgcgcccgcgcccctatggtcgccggcggcggccataggtacggcggagcggcggccgagagaggggagggaagggggaaacgaatcggcggtccacggctcaccccgggtcgacggcgacgacgggaacggcgaccggagcggaggaaggcggcggcgcggctcgggtggacggggtcgacggagctccggcggtcggcgtgcgaaacggaggggtggacgaggtcggcgaggatgcggcgaagccgaaaggaggcggcgccgaggggagaggggcggagcgggcgggggatcgcggggcggggcgggctaggcgcgggcgggccggggaggaaggggatgacgggtgggccccacccgagaggcattatgaagaagatgatggcggttttgatcatcattggggttgtgagcactttagattatgctggaatgaaggaggttgagcaagaaatcaaccattggctgaagaaaacgaagccgaagcaggaatggcgtgttaagaatcaagttcctacagccgaggaagccacagttgatgaagcaaaaagattgactaaagggaaaagtgtcgtgactgcatcggttaacatggttttcacattacctgcagaatttggggctaagcaggccgatgttgatgaagttgaggaagcatcggctaagttggttttatcactagaacaagcggtctttgagaagccagaagggatagagaatcggcatgttaagccattgtatgtaaacggttatgtcaatgggaagccaatgtctaagatgatggtcaatggtggggctgcagtgaatttgatgccatatgccacgtttaggaagctaggcaggaatgctgaggatctcatcaagacaaacatggtgctcaaaaactttggtggcaatccatcagaaaccaaaggagttttgaatgtagagctgacagccggtagcaagactatccctacaacattttttgtcatcgatgggaagggttcctacaacttgttgcttggaagtgattggattcatgctaattgttgtattccttcaaccatgcatcaatgcttgattcaatggcaaggcgacaagattgaaattgtaccagccgacagccgattgaagacggagagcccaagttattattttgagggcatcctggaggttatcaagaaaaacggcaaagtcagggtgtgcattgatttcagagatttaaacaaagcaaccccaaaggacgagtatccaatgccagtaaccgatcagctggttgatgctgcttcaggcttgtttgaatgggttgtgatgactttcggcttgaaaagtgctggagctacatttcaacgggccatgaattatatataccatgatgtgatcggctggttggttgaggtctacattgatgatgtggttgttaagtctaaagagatagaggaccacatagccgatttggggaaggtttttgagaggactaggagatatggcctaaagatgaatccaatgaagtgtgctttcggtgtatcggctggccagtttttgggatttcttgttcatgaaagggggattgagataactcaaaggagtgttaatgccatcaagaatattcagcctccagaaaataagatagaattgcaggagatgatcggcaagataaattttgttggaagaaacaagatattccgctgtggagaagttgtgcttgtgcttgtatttttcctatacaagccttatgcaaccaataatcaagctgagtatgaggtggttgtcaaagggttgcaattactcaaggaggttgaagccgatgctattgagattatgggggattctttgctggtgatcagtcagttggcaggggagtatgagtgcaaaaataatacattgatagtttacaatgagaagtgccgagagttgatgaaggaatttcggctggtgactttgaagcatgtatctcgagaacagaatattgaagctaatgatttggcccaaggggcgtcgggatataagccgatgatcaaagatgtcaaggtccctccttataagcttgtctatggacatgaggctgttttaccatgggaagttagagtcggctcgagacgaacggagttgcaaaatgatttgacagctgatgagtattataatctcatggccaatgaaagggaagacttggttcaatcaagattaagagcccttgcaaaggttaccaaggataaggaacgggttgctcgacattacaacaagaaagtggtgcccaagtctttttcggaagaagaacttgagcttacatgttgcaaggactcgatggagaaatttatggacgagcacttaatggaaaatatttga

SEQ ID NO: 6603 - DNA, 2742 bp, Oryza sativa
  Clone ID: PAT_MRT4530_13278C.1
atggagaagtacaacaagtctcggatggtacgactcaatcaggtgataaaggtgcagcagatggttctcaaggggttcaaggtgatggttctcaaggaacttaaggtgatggttctcagggatttcaatagcagccacaacatagtggacaaaaatgtgaatcggctaatccaagaccaagttgcagctatgttcttgccagctcagcctactgttgacccaatccagcaacagccgattcaacagacgccaccgagttgggccgatttggagaagcattttcatagctatttctatagtggggttcatgagatgaaactgtcggatttaacggcgacagccgaatgggttagaagtaagaaggttataccatgccaatgggtgaagaattctggaaaagaagagagacagcagatccaagaggctattgaagggggcaaaatcaagtttgatgactccaagaggccgatgaaggttgatggcaatccttttcctgtcaatatggtgcacacagctggccgaacagccgacgaaggaagggctagaggttttcaggtgaattcggctaggattatcaataagtatcagaagaaatatgacaagcagcgggagaggcattatgaagaagacgatggtagctttaatcctcattggggttgtgagttctttagattttgctggaatgaaggtatgaggttgccgtctattgaagactgccctgggtgcagctatgttacagaaagttcaagccgatcgtataatagaggcaatcggctaaggcaaataagagttcctgttgatcaaagattgggtccagtgaaccaagatcgtggccaagaggacaatgaagacaggaagactcaatggtgtccttctggtatttttacaaagaatcagaagagaagggttcaaatgttgaggaacagggaacgctttcaggaggttgagcaagaaatcaaccattggctgaaggagacgaagccgaagcaggagtggcgcgttaagaatcaagttcctacagcagacgaagccacaaccgatgaagcaaaaagattggctaaagggaaaagtgtcgtgactgcatcggttaacatgatggagagcccaagcttttattttgagggtgtcgtggagggttcaaatgtctacaccaaggacacagtagatgatctcaatgacaagcaaggacagggtttcatgtcggctgatgatttggaagatattgatataggtccagttcctgttatcaagaaaaacggcaaggttagggtgtgcattgatttcagggatttaaacaaagctacccccaaggatgagtatccaatgccagtggccgatcagttggttgatgctgcttcagggcacaagatattgagttttatggatggaaatgcaggatataatcagattttcatggccgaagaagatatccataagacagattttcatggtgcaatcggcttatttgagtgggttgtaatgacttttggcttgaaaagtgctggagctacatatcaaagagccatgaattatatatatcatgatctgatcggctggttggttgaggtttacattgatgatgtggttgttaagtctaaagagatagaggaccacatagccgatttgaggaaggtttttgagagaactaggaaatatgacttgaagatgaacccgacaaagtgtgctttcggtgtatcggctggccagtttttgggatttcttgttcatgagagggggattgaggtaactcaaaggagtgttaatgcaatcaagaaaattcagcctccagagaataagacagaattgttaaggcattatctattgtccaacgaatgcactgtcatatgcaaagccgatgtcgttaagtacatgttatcggctccatttttgaaaggaagggttgaaaagtggatattttccttaacggaatttgatcttcggtatgagtcaccgaaggcagtcagggggcaagctatagccgattttatcgttgatcatcgtgatgattcaatcggctcggttgaggttgtgctgtggacattgttttttgatggatcagtatgcactcatggttgtggtatcggcttggttataatttctcctcggggggcaagttttgagtttgcttatactattaaaccttatgcaactaacaatcaggctgagtatgaggcagttctcaaagggttgcagttactcaaggaagttgaagccaatgctattgaaattatgggagattctttgctagtgatcagtcaattggtaggggagtatgagtgcaaaaatgatatattaatgatttataatgagaagtgccgagaactgatgaaagagtttcggttggtgactttgagacatgtatctcgagaacataatattgaagctaatgatttggcccaaggggcgtcgggatataagccgatgatcaaagatgtcaaaatagaggttgccgcattaacattcgatgattggagatatgatgtgcatcattatttgcagaatccatctcaatcggcttctcagaaattgcgatataaagcgttgaagtatactttattggacgacgagctctattatcgtacgattgatggggtgttgcttaaatgtttgagtgccgatcaggctaaggttgcaatcagtgaggttcatgaagaaatttgtggcactcatcaatcagctcataagatgaagtggttacttcgacgtgcaggatatttttggccgacaattgtcacaccctga

SEQ ID NO: 6604 - DNA, 885 bp, Oryza sativa
  Clone ID: PAT_MRT4530_13279C.1
atggtcgccggcggcgactggagctcgccgcccgccgaacagccaaaatgttccccatttttccttcttcaggagccaatctgcttccaccatggcaacgcccttgaggtctttgtttttttaggtcccccttcctcggatcaacacctcatctatataatgctgaaaccagcgttggctgagctggctggcctggacgtcatcacgcttgtcaaggtaatcaagagtcgcgtcgagacagtccgccagaacaaggaggactgcgagctgctcgccgaacgcgcggacatgatccttgatctgctacggcgggttcaggcatccaaggtcatcgaggaccctgacatgtggaagcccacagaagggctcaagtcgacactttgcagggcaggtgcaatcgttaaatcctgtcaggaggagtggagctatgcgtaccgtttctgcaagggcggacgcatcgccagagagctgcgcaaggtactcaaggatctcaagttttacatcctccacctgataggaatgatcaccatcatcaaccacgatcaaaacactcgttactattatatcccggagactgatgttgttaagccgcaggatgctacagcttccaacgctggaaagcctgttgctctagaagaaacaggccttaaaaagttcactttgtctgagttggaggttgctacagataatttctctctggaaaaacaaatcggtataggtgctttcagcatcgtgtacaaggcgtgggaattgtggagaggaggaaacctgatggagttcatcgacccttcgctgcgcggagagactcattctgcagccgagatacaggggtgggttcagatagcgctgctgtgcgttcagcgtgttgaaattataagcacataa

SEQ ID NO: 6605 - DNA, 1299 bp, Oryza sativa
  Clone ID: PAT_MRT4530_1327C.1
atggcgagggggaggcggcggcgccgtcgccagcgcaggaagagggcgtcgacgaagcagctcacggcggcggcgaccgtgcaggacgtccccgaccacgtcctcgagatgatcctcctccgcgtcgactcctcggcctgcctcgtccgcgccgcggcgtcgtgcaggcggtggcgccgcgtcgtcgcggacgccgcgttcctccactccttccgcacgctccacggcgcgcaccgcgtcgccggggtgtaccgcaccgtcgaccccgcctacgggcgcccgctgcccggcggcaacttcgtcttcgtcccgtccacgccgctcgccgccggtgacagctgttgcttcgccctcgacttcctcccttacggcggccgcaactcctgggagctgctcgactgccgcggcggcctcctcctcctctccaagaagcgaccacgattcggcggcgtggcgacgtcccgtcgattcaccgatctcgtcgtctgcgagccattgacgcgacggtaccaggtgatccgttgtccggccaacctaaagttcttcatgtgcctcggggtcttcttgctcgacgacgacgccgcgaccggcggcgtgtcgaatttcagggtcatcgccgtgctcttcgatcaccacaggtggctcgactaccgtggcatgccaatgtccatgatgttctcctcctccggctccggcggcgacggcacatggcaggtggtgcagtgggagaccatcgacgacgtcgatctacctcattggatcgaacacatcaccttcgtggggcgcgccaatggccgcatatactggggaatcgacaacgaagacggcgccacgctcgtcctcgacgagagcaccaccgaattcgccatcacgatgttcccggagaacgtctgggcgccctatgacaagtacaccttccgtgtcatcggcgacggcgacgacggtgctctgcgtgtcgtccgcgtgataaacaacgatctcaaggtcttcacgcagctcgccggcggcggcgagtgggtgctggagaagacggtgagcttgccggaggcgacacgtgggctgccggggcgcgaggagggactcttcttccagcacggcgaggcgatgatcgtcgcggcgagcgcggcgtacgtcctcgtgacgccgcgggagaaggcgtggatgttctccgtcgagctggacacgatggaggtggaacgcgagcacgacaggaattggtatcccgggccggcttatcagtacgagtcgttgccatggccacccgcattgcaggggacatatctggtgaaaacgagctaa

SEQ ID NO: 6606 - DNA, 1302 bp, Oryza sativa
  Clone ID: PAT_MRT4530_13280C.1
atggatatctctaggacaaatgaaggctacacgagttgcggcccggtagtcgagatgtcatggcacagggccggtgtcctgctgctaggggctcaaccttggttacctgtctcgggaatcctggccgtagccagggttgggtttgtactcttgtctatggctaggatgggttgggaactatgtcacgtcttctgtccgtatgccgtggtgaggagtgttaatgcgatcaagaagattcaacctccgaagaacaagacggcattgcaggagatgatcggcaagataaattttgttagaaggtttatctctaatttatctggaagattagagccttttacaccattgttaagattgaaagccgatcagaagtttacttggggggcagagcagcagaaggctttggatagtattaaggaatatcttagctctcctccagttttgattcctccacaaaagttaaggcactatctattgtccaatgaatgcactgttatatgcaaggccgatgtggttaagtatatgttatcggctccgatttcgaaaggaagggttggaaagtggatattttccttaacggaatttgatcttcggtatgagtcaccgaaggcaatcaaggggcaagctatagccgattttattgttgatcatcgtgataattcaattggctcggttgagattgtgccctggactttgttttttgatgggtcagtgtgcactcatggatgtggcattggcttggttataatttctgctcggggggcaagttttgagtttgcttatactattaaaccttatacaactaacaatcaggctgagtatgaagcggttctcaaagggttgcaattactcaaggaagttgaagccgatgttgtggagatcatggatgattccttgctggtgatcagccaattggcaggagagtatgagtgcaaaaatgatacattaatggtttacaacgagaaatgtcgagaattgttgagaggatttcagctagtgatttcgaagcatgtatctagagaacaaaatgttgaagctaatgatttggctcaaggggcatcgagatataagccaatgatcaaggatgttagagtggaggttgctacattatctgccaatgattggaggtatgatgtgcatcattatctgcaaaatccatcccaatcggcttctcggaaattgcgctataaagctttgaggcatacattgttagatgatgagctatattatcggacgattgatgggtttttgcttaaatgtttgagtgccgatcaaactcaggttgcaatcggtgacggtacatga

SEQ ID NO: 6607 - DNA, 295 bp, Oryza sativa
  Clone ID: PAT_MRT4530_13281C.1
gagatagaaagagctcaaagttttgatatctcatagatgctaaaactagacaggtaactcacagcaaaatgttgtcctatactggcaatatctccacctccgcaaaatggataatctgaaggtgccaaggcactgccctacagaacaacgcagacataagcacaaaaaactgaagaaaatttgaatcgtcctccaggctagccgagcctgacaagcttgatgctgaccactatgtcctaggtgacaatgcgctcaacgatcttcttgagctggcgggtggaggctttgttagcaa

SEQ ID NO: 6608 - DNA, 4056 bp, Oryza sativa
  Clone ID: PAT_MRT4530_13282C.1
atggcgaccgatctatcccaatcacttgatttaagaaacttgtattggcatccataccctgagtggtttgagagggttccattgcctaaccgattcaaggttctagatttttcaaaattctcagcgcaggacagtgtctcaacctatgaacatgtcagccgatttttagctcagtgtgatgaagcatcggctgttgacgccttgagggtcaggctgtttcccttgtctttgtccggatcggcttttacttggttctcttctttgtcgtatggttcgatcaacagttgggccgatttggagaagcaattccatagttacttttatagcggagttcatgagatgaaattgtctgatttaacagcgattaggcaaaggcatgatgagcctgtgcaagattatattcagagattcagggagatgaggaataagtgctacagtttgagcttgactgatgcccagttagccgatttggtttttcagggtatgatagctctgatcaaggagaaattctcgtcccaggactttgatagtttatcacatcttgcacagaaggtaaccttgcatgaacagaggtttgcagaagcaaggaagaactttaaaaaggtcagtcatatctgtccctacatatatggatctgatgatgatgatgatgatgattccacggtagcagcagccgagtgggttaggagcaagaaggttataccatgccaatgggtaaagagttctggaaaagaagagagacaacagatccaggcggctattgaagacggtaaaataaagtttgactactccaagaagccgatgagggtcgatggaaatccttttcctgtcaatatggtacatacagctggccgaacagccgatggaggaaaagctcggggttttcaagtgaattcggctaagattattaacaagtatcagaggaagtatggcaagcagcagcaggagaagtattatggagaagatgatggcggttttgatcctcattggggctgtgagtttttcagattctgctggaatgagggtatgaggctgccgtctatcgaggattgtcctgggtgcagtaatgttgcagagagttcaaacagatcttacaatagaaataatcggctgaggcaaacaaggaaggcaaagccaaggcaggagtggcgtgttaagaaactagctgttgtagccgatgaacccgaagccgatgaagaaaaaagattggctaaggggaagagtgttgtaactgcatcaattaacatggttttcacgttacctgctaaatttggagccaaacaagccgatgttgatgaagttgaggaagcatcggctaggttggttttgtcaccagaacaggcggtttttgagaaaccagaagggacagagaatcggcatcttaaaccattgtatataaacggctatgtcaatgggaagccgatgtctaagatgatggttgatggtggggcttctgtgaatttgatgccatatgccacatttaggaagctaggcaggaatgttgaggatctcatcaagacaaacatggttctcaaagacttcagtggcaatccatcagaaaccaaagagatggatggtcttgattgcttgtctggaaaggtatgggaaggagattttctaaaggtgtctgattgtgatatacaaccattgaagatggagagcccaagttattattttgagggcgtcgtggagggttcaaacgtctacaccaaggacacggtagacgatcttgatgacaagaccaagttgatagagctcttaaaggaattcagagattgctttgtttgggagtattataagatgccaggactcagccgatcgattgttgaacatcggctacctatcaaaccaggggttagaccgcaccaacaacctccgaggagatgcaaagccaatatgctcgaacctgtaaaagctgagattaaacgtttatattatgcttgttttattcgtccttatcgatatgccgagtgggtttctagtatagttccagttatcaagaaaaatggcaaagtcagggtgtgcattggtttcagagatttaaacaaagctacccaaaaggatgagtatccaatgccagtagccgatcaactggttgatgctgcttcggggcacaagatattgagttttatggatgggaatgcagggtacaatcagatctttatggctgaagaagatatccataagacagcttttcggtgtcctggtgcaatcgtcttgtttgagtgggttgtgatgacttttggcttgaagagtgctggagctacatatcaaagggccatgaattacatataccatgatctaatcagctggttggttgaagtctacattgatgatgtggttgttaagtctaaagagatagaagaccacatagccgatttgaagaaggtttttgagagaactaggaaatacggcctgaagatgaacccaacaaagtgcgcttttggtgtatcggctggccagtttttgggatttcttgttcatgaaagggggattgagataactcaaaggagtgttaatgcaatcaagaaaattcagcctctagagaacaagacagaattgctaattttgttagaagagcatcagaaggctttggatagtattaaagaatatcttagctctcctccagttttgattcctccacagaagggaataccttttaggttatatctatcagccggaagggttggaaagtggatattttccttaacggaatttgatcttcggtatgaatcaccgaaggcggtcaaggggcaagctatagctgattttatcgttgatcatcgtgatgactcaatcggcttagttgaagttgtgccctggactttattcttcgatgggtcagtgtgcactcatggatgcggtatcggcttggttataatttcccctcggggggcaagttttgagtttgcttatactattaaaccttatgcaactaataatcaggctgagtatgaagcggttctcaaagggttgcaattactcaaggaagttgaagccgatgctgtggagatcatgggtgattccttgctagtggtcagtcaattggtaggagaatatgagtgcaaaaatgatacattaatggtttacaatgagaaatgccaagagttgatgaaagaatttcggctggtgactttgaagcatgtatctcgagaacagaatgttgaagctaatgatttggctaaaggggcatcgggttacaagccgatgatgaagtatgtcaaaatagaagttgccacattaacagccgatgattggaggtatgatgtgcatcattatctgcaaaatccatctcaatcggcttctcggaaattgcgctatagagctttgaagtataccctgttggatgatgagctatattatcggacgattgatggggtgttgcttaaatgtttgaatgccgatcaagctaaggttgcaatcggtgagtttgccgatagtatgggtatcaaattgttgaattcttcgccatattatgcacaagctaatgggcaagccgaggcatctaacaagagtttgatcaaattgattaagagaaagatttcagattatcctcggcagtggcatactcgattggccgaagcattgtggtcttatcggatggcttgtcatggttcgatccaagtccctccttataagcttgtttctggacatgaggctgttttaccatgggaagttagaattggttcaagaagaacggagttgcaaaatgatttgacagccgatgagtattataatctcatggccgatgaaagggaagacttggttcaattaagattgagagcccttgcaaaggctaccaaagataaggaacgtgttgtggtgcctaagtccttttctgaaggtgaacttgtttggaaattgattttgccgatagggactcgagataacaaattcagcaagtggtcaccaaattgggaggcaccgtttcaaatttataaggttgtatccaaaggagcgtacatgttgcaaggactcgatggagatgtttatggacgagcactcaatgggaaatatttgaagaagtattacccaagtgtttgggttaatgcatga

SEQ ID NO: 6609 - DNA, 354 bp, Oryza sativa
  Clone ID: PAT_MRT4530_13283C.1
atgccctctcgccggtgcacgcactcgcccaagggggagtgcgccgccgtcgagtggccttgccccggcgcccctcccccgtcgtctccccgcggcggcatcggctacggccggcggaggcagagtactacccgctcgcgtcggcaacggccggcggcagcggtagatcttcccgcgcgcgccggcgacggccagcggcgacggcggactcctgcgcttgtcggcgatggcggtggactcccgcgcgcgtcggcgttggcctgcggcggtggtagatcttcccgcgcgcgtcggcgacggccggcggcggcggcggactcccgcgcggtgtctgtgacaaccagctgtggggag

SEQ ID NO: 6610 - DNA, 398 bp, Oryza sativa
  Clone ID: PAT_MRT4530_13284C.1
tctcactcgtaacacgccactcatcaagactggggggggtggcagcatctcaaacctccaggcgcagcaacatcactatctggacattcacctatgctcactctatagaccttaacatacaacacgcgctatcggatgatctacaatttcatcggaatgtggatcaatcttaagctctgaatgttgctggggggcgagctatatatggtatcaaccctccgtactattgtgcactctaccctatgacctctcttgcacgcatctccataaccaccctaacaggatagtggttatgaggttaaacataatctcagatatcataatataagacatctgaaattttatgatatataacatgagaaactgtgggctatcatatttgtaaaaaagttgtcttt

SEQ ID NO: 6611 - DNA, 1035 bp, Oryza sativa
  Clone ID: PAT_MRT4530_13285C.1
atggcgggagccaccgccgccactccgatggacatcgacgccgccgcgccgccgccgggggcggccgccaagggcaaggcgcctctctcctccactcccggcggtagggccgcgccctgggtcgagaagtaccgcccccaatccctcggcgatgtcgccgcccaccgcgacatcgtcgacaccattgataggcttacaaatgagaacaggcttccacatttgttgctttatgggcctccgggcactgggaaaacatcgacaatactggccgttgcaaggaagttgtatgggtcacagtatggcaacatgattcttgaactcaatgcatcagatgagcgtggtattgatgttgtaaggcagcaaatccaagacttcgcaagtgcccgcagtctctctttcggagcaaagcaatctgttaagatggttctattggatgaagcagatgccatgaccaaggatgcacagtttgcattgcgaagagctacatcttctaatctcccccatcttacagtcattgagaagcatacaaggagcacaaggtttgcgctgatatgcaaccatgtgaacaaaatcattccagcactgcaatcaaggtgcaccaggtttagatttgcaccccttgatggcactcatgttagggaacgtcttaaacatataatacaatccgaggggcttgatgtagatgacggtggtttgacagcccttgtgcggttaagtaatggtgatatgaggaaggctttgaacatattgcagtcaacacacatggcatctaagcaaataacagaggaagctgtgtacctttgcacaggaaaccccatgccgaaagacattgaacagatagcatactggttgctgaatgaatcattttcaaccagcttcaaatgtatatctgatatgaagatgagaaaaggactggccttggttgatatcatacgggagatgccatctgatgtacgcataaagctgattaatgatctggctgatatcgagtacgtcctgttttcagctgtaaagttgattacttgtcaaatttag

SEQ ID NO: 6612 - DNA, 3018 bp, Oryza sativa
  Clone ID: PAT_MRT4530_13286C.1
atggagacccgcaagggaacagttgttcaaaagtataaggttgttccaaggatggggaggtacaacaaatcccggctggcacagctgaatcaggtggtaaaggtgctgcatatgggctcaggagataaaggtgatggttctcaaggggtgcaaggtgaggatcttggtccagatgatcaatcggtgatacctcaagttattcccgagcatttggtgcgcaacatacagccaaactttcagaattatcaagggggcaatttgaactaccaatatcaacctccttcaccacaggttcagtatcagcaaggaggatcggctcagtcccagtttgctcctcaatacaatcaatttgagcccatgccacagcaagcacaggggttgcctcagcaaagaccgtgggccgacatgattgcagatgtgatgagagagcagttcgggctcaagccaaaggacacgagaaacttgtattggcatccgtaccctgagtggttcgagagggttcagttacctaaacgatacaaagttccagatttttcaaaattctcagggcaagacaacgtctcaacctatggacatgttagccgattcttagctcagtgtggtgaggcatcggctgttgacgccttgaggaggtttgcagaagccagaaagagcttcaaaaagatcaatcacgtctatccttacatagatggatctgatgatgatgatgatgatgatcctgaagtagcagcagccgaatgggttagaagcaagaaagttatactatgccaatgggtgaaaagttttggaaaagaagagaggtatgactttgatgttactaaggccgataagattttcgatctgttactgcgggaaaaacagattcaattccctgctggtcacatcataccatcggccgaggaattgggcaagagaagaggaagtatgataagcaacaggagaggcattatgaagaagatgatggcggttttgatcctcaatggggctgtgagtttttcagattctgttggaatgaagaaggcaaagccaaggcaggagtggcgtgtcaagaatctagtcgctgtagccgacgaacccaaagctgatgaagcaaaaaggttggctaaggggaagagtgttgcggtttttgagaaaccagaggggacagagaatcggcatcttaaaccattatatataaacggctatgtcaatgggaagccgatgtccaagatgatggttgatggtggggctattgtgaatttgatgccatatgctacattcaggaagctgggcagaaatgctaaagacctcatcaagacaaacatggttctcaaagattttggtggcaatccatcagaaaccaaaggggttttaaatgtggagctgacagtcggcagtaaaaccatccctacaacattttttgtcatcaatgggaagggttcctacagcttgttgcatggaagggattggattcatgctaattgttgtattccttcaaccgtgcatcaatgcttgattcaatggcaaggcgacaagattgagatcgtgccagccgataggtcagttaacgttgccagtgccgatttagctctttgggagatggatggtattgattgcttgtctggaaagatggagagcccaagctattattttgagggcgtcgtggaggattcaaacgtctacaccaaggacacggtagatgatctcgatgataagcaaggacagggtttcatgtcggccgatgatttggaggaaattgacataggtccaggcgatcgaccaaggccaacatttatcagtaagaatttgtgtccagaatttagaaccaagttgatagaacttttaaaagaattcaaagattgctttgcttgggagtattatgagatgccaggactcagccgatcgattgttgaacatcggctacctatcaaaccaggggttaaaccgcaccagcagcctccgagaagatgcaaagccgatatgctcgaaccggttaaggctgaaattaaatgtttgtatgatgctggttttattcatccttatcggtatgccgagtgggtttccagcattgttccagttatcaagaagaatggcaaagtcagggtgtgcattgatttccgagacttaaacaaagctacccgaaaggatgaatatccaatgccagtagctgatcagctggttgatgctgcttcagggcacaagattttgagttttatggatggtaatgcaggggggatagagataactctgaggagtgttaatgcgatcaagaagattcagcctccggagaacaagacggaattgcaagatatgatcggcaagataaattttgttagaaggtttatctataatttatctggaagattagaaccttttacgccattattgagattgaaagccgatcaaaagtttacttggggagcagagcagcagaatgccttggatagtattaaagagtatcttagctctcctccagttttgattactccacaaaagggaataccttttagattatacctatcagccggtgagaagtcaatcggctcggttttgattcaggagcttgaaggaaaagatagggttgtgttctatttaagtcgtcggctattggatgcagaaacaagatattctcctgtggagaagttgtgcttgtgcttgtatttttcctgtacaaggttaaggcattatctattgtccaatgaatgcactgtaatatgcaaagccgatgtggttaagtacatgttatcggctccgattttgaaaggaagggttggaaagtggatattttccttaacagaatttgatcttcggtatgagtcaccgaaggcaattaaggggcaaactatagccgattttattgttgatcatcgtgatgactcaatcggctcgattgacattgtgccctggactttgtttttcgatgggtcagtattgactcatggttgtggtatcggcttggttataatttctcctcggggggcaagttttgagtttgcttacactattaaatcttatgcaactaacaatcaggctgagtaa

SEQ ID NO: 6613 - DNA, 1473 bp, Oryza sativa
  Clone ID: PAT_MRT4530_13287C.1
gattccctcctccagctctagggtttccgcctctctctgcgctacgccatggcgggagccaccgccgccactccgatggacatcgacgccgccgcgccgccgccgggggcggccgccaagggcaaggcgcctctctcctccactcccggcggtagggccgcgccctgggtcgagaagtaccgcccccaatccctcggcgatgtcgccgcccaccgcgacatcgtcgacaccattgataggcttacaaatgagaacaggcttccacatttgttgattcatgtgcctccgttccataggaaaacatcgaccaaaatggcttgtgcaaggagcttgtatgggtcacgaaatgatcacatgaatcttgcattcaatgcatctgatatgcgtggtagtgatgttgtatggcagtagatccaagactacgcgagggccctcagtttgtctttcgaagccaggcaatctgtgaagttggtactattcgatgaagcagatgccatgaccaaggatgcacagtttgcattgcgaagagtcattgagaagcatacaaggagcacaaggtttgcgctgatatgcaaccatgtgaacaaaatcattccagcactgcaatcaaggtgcaccaggtttagatttgcaccccttgatggcactcatgttagggaacgtcttaaacatataatacaatccgaggggcttgatgtagatgacggtggtttgacagcccttgtgcggttaagtaatggtgatatgaggaaggctttgaacatattgcagtcaacacacatggcatctaagcaaataacagaggaagctgtgtacctttgcacaggaaaccccatgccgaaagacattgaacagatagcatactggttgctgaatgaatcattttcaaccagcttcaaatgtattcttaattatcaaagtatatctgatatgaagatgagaaaaggactggccttggttgatatcatacgggaggtcactatgtttgtgttcaaaatacagatgccatctgatgtacgcataaagctgattaatgatctggctgatatcgagtaccggctaagctttgcttgcaatgacaagttacagctgggggcgctgatatcaactttcacgggtgctcgcacggctatggttgctgctgcccactaatttcagcaaggtgatgatcattttgttgcccttcactgccacttcaatctggaaatgacgcggcaatgttcgttattattataagcatgtggttagcgtaaagcttaaaagcatggcgaggagaaattttatctgtagggtttgtttgctcgacgtgctagcttttgggactcgggagtgccttgtaattgaactgtaaccgaattttatcgggtgtaaccgtgtaggtgatgcatgatgcgtgtaacgttttatgcagtagaaaatgtattcacagttccagctaaaaaaaaaaaaaaaaaaaaaaaaaaaaaaaaaaaa

SEQ ID NO: 6614 - DNA, 6057 bp, Oryza sativa
  Clone ID: PAT_MRT4530_13288C.1
ttgcaggatcaaatcaactggcacgctcatagacccaaaggcaagttttggacctgcactggagttaagcagatctcccaggcctcgtgttttcacgtcaacacgcttttggcacacccagtaggacagattagaagtcagaaccgcaatagcattctctcatggctgagaaaccaccggcatcgccgtcttcggccggcaaagagggtcctcccaaatctaggatcctgaagcttggtggctctgaagttcatgaaggcaacatcgtgcctgtcactgtggacaaattgacacctgaacaaaagaaggagtttgacgtgatgatgcagcaaacacagaaccaattcttgaactcattcatggagacccgccaaggaacaattgttcagagatacaagatgaaattggttgctgacgttcctgggacaagttcttccaaggatggaaaagtgcaacaggactcagatggtacagctcaatcaggtgataaaggtgttgcagatggctcaggtgataaagatgatggttctcagggagttcaaggtgagaatcctaacctagatggcaacacggcacagctacagtttaataatttccaagatcggattgactatgctgtgcaacatgctttgattaatcaatctggagtgttagtcaataccttgtcaaacatggtgaagtcgatggttgatggctcaatagctgagtatcaggctacaggaccggtttacttaccagggggtgttttcccaaactatcggcccctgattactaataatcagtcggctgctcagccaattgctcccaacgcgccatcagctcagccaatagcaccagtatcgattcctgcacctgctgcaccatcatcggcaccaggtcaactaattaatcctcggttgttagtgagagagcagccacagcatgctggtcaaaatgtcaatcggctaactcaggaccaggtggcgactatgtttttaccaaatccactagttgtcgatccggcacagcaacagccgattcagcagacgccaccaaggcaacaggctgttcagctgggttgaggacacctgataatcagccgaggcagcatgtcacaactcagattgtccctgagcatttggttcatcatgtgcaaccagatttgcagatgtgatgagagagcagtttgggctcaagcggaaagacgctggaaacttgtatcggcatccataccctgagtggttcgagagggttcagctgcctaaccgatacaaagtcccagatttttcaaaattctcggggcaagacagtgtttcgacttatgaacacgttagccgattcttagctcaatgtggcgaggcatcggctactgacgccctgagggtcagattgtttcctttgtctttatctggatcggcttttacatggttttcttctttgccatacaattcgatcaatagttgggccgatttggagaagcaattccatagttacttttatagtgggggttcatgagatgaaattgtccgatttgacagcaatcaaacaaaggcatgatgaacccgtataagattatattcagaggttcagagagatgaggaataagtgctacagcttgagcttgactgatgcccagttagccgatttggcttttcagggtatgatagctccgatcagggaaaaattctcgtcccaggactttgatagtttgtcacatcttgcacagaaggtaaccttgcatgagcagaggtttgcagaagccaagaagaattttaaaaaggtcaatcatgtttgtccctacatatatggatccgatgatgatgatgatgattctgaggtagcagcagccgaatgggttaggagcaagaaggttataccatgccaatgggtgaagagttctggaaaagaagagaggtatgactttgacatcaccaaggatgataagatctttgatttgttgctacgggaaaaacaaattcaacttcctgctggtcatacaatcccgtcggtcgaggagctgggcaagaggagatattgcaagtggcataattctgggtctcattttactaatgattgtaaagtcttcagacaacagatgcagacggctattgaagggggtaaaataaaatttgacgactccaagaggtcgatgaaggttgatggcaatccttttcctgttaatatgatacatacatctggccgaacagctgatggaggaaaagctcgaggtttctaagtaaattcgactaaaattattaacaagtatcagaagaagtatgataagcaacaacaggaagggtgttatgatgaagataatggaatgaggctaccatctatcgaagattgtcctagatgtagtaatgttgcagaaagttcaagccgatcttataacagaagcaatcgactaaggcaggcaagagttcctgttcattaaagattgggcccagtgaatcaagatcgtgaccaagggggtgatgaagacagaaaaaatcaatggtgcccttctggtatttttacaaagaatcagaaaaggaggaaaacaaagccgaggcaggagtggcgtgttaagaaccaagctactacggccgatgaggtcaaagtcgatgaagcaagatgattggctaaagggaaaagtgttctgactgcatcggttaacatgattttcacgttaccagctgagtttggagctaatcaagccgatattgatgagattgaagaagcatcggctaggttagttttgtcaccagaacaggcggtttttgagaagccagaagggacaaagaatcggcatcttaaaccattgtatataaatggctatgttaatgggaagccgatgtccaagatgatggtcgatggtggggctgctgtgaatttgatgccatatgccacgttcaggaagctaggcaggaatgctgatgacctaatcaaaacaaacatggtgctcaaagactttggtggcaatccattggaaaccaaaggggttctaaacgtggaactgacagtcggcagtaaaaccatccctacaacgttctttgtcatcgatgggaggggttcctacagcttgttgcttggaagggattggattcacgccaattgttgtattccttcaaccatgcatcaatgcttgattcaatggcaaggcgataagatagaaattgtaccagctgacagccaattgaagatggagaacccaaactattattttgagggtgtcgtggagggttcaaacgtctacaccaaggacacagtagatgatctcgatgacaagcaaggacagggtttcatgtcggccgatgatttggaagaaattgatataggtccagaatttagaaccaagttgatagaacttttaaaggaattcagagattgctttgcttgggagtattatgagatgccaggactcagccgatcgattgttgaacatcggctacctatcaaaccaggggttagaccacaccaacagcctccgagaagatgcaaagccgatatgctcgaacctgtaaaggctgagattaaacgtttatatgatgctggttttattcgtccttatcgatatgccgagtgggtttccagcatagttcctgttatcaagaaaaatgatttaaataaagctaccccgaaggatgagtatccgatgctagtagccgatcaataggttgatgctgcttcaggacataagattttgagttttatggatggtaatgtagggtataatcaaatatttatggcagaagaagatattcataagacagctttcaggtgtcctggtgcaatcggcttatttgaatgggttgtgatgactttcggcctgaaaagtgctggagctacgtatcaaagggccatgaattacatataccatgatctgatcggctggttggtcgaggtctacattgatgatgtggttgttaagtctaaggaaatagaggaccacatagccgatttgcggaaggtttttgagaggattaggaagtatggcctgaagatgaatccaacaaagtgtgctttcggcatatcggctggccaatttttgggatttcttgttcatgagaaagggattgaaataactcaaaggaatgttgatgcgatcaagaagatttagcctccagagaacaagacagaattacagaagatgatcggcaagataaattttgttagaaagtttatttctaatttgtctggaaggttagaaccttttttacaccattgttgagattaaaggccgatcaaaagtttacatggggggcagaacagcagaaggctttggatagtattaaagaatatcttaactctcctctagttttgattcctccacaaaaggggataccttttagattaaatctatcggccgatgagaagtcaatcggctcagttctgattcaggagcttgaaggaaaaaagagagttgtgttttatttaagtcgtcggctcttagatgcagaaacaagatattctcctgtggagaggttgtgtttgtgcttgtattttttatgtacgaggttaaggcattatctattgtccaacgaatgcactgtgatatgcaaagccgatgtggtcaaatacatgttatcggctccaattttgaaaggaagggttggaaagtggatattttctttaacaaaattcgatcttcggtatgagtcaccgaaggcaatcaaggggcaggctatagccgattttattgttgatcatcgtgatgactcaatcggctcagttgaggttgtgccctggactttgttttttgatggatcagtgtgcactcatggttgtggcatcggtttggttataatttctcctcggggggcaagttttgagtttgcttacactattaaaccttatgcaactaacaattaggctgaatatgaagcagtactcaaagggttgcggttactcaaggaagttgaagccaatgctattgaaattatgggggattctttgctggtaattagtcagttggcaggagagtatgagtgcaaaaatgatacattgatggtttacaatgagatgtgccgagagttgatgaaggaattttggctggtgactttgaaacatatatctcgagaacaaaatatcgaagctaatgatttggcccaaggggcatcgggatataagccgatggtcaaggatgttaaggtagagattgccacattaacagccgatgattggagatatgatgtgcatcagtattaacagaatccatctcaatcggcttctcagaaattacgctataaggctttgaagtataccctactggatgatgatctttattatcgaacgattgatagggtgctgcttaaatgtctaagtgccgatcaagctaaggtcgcaatcggcgaagtgcatgaggggatttgtggcactcatcaatcagctcataagatgaagtgtttgcttcgacatgcaggatatttttggccgacaatgttggaggattgtttcaaatattacaagggatgtcaggattgccaaaagtttggagcaattcaaagagcgtctgcatcggctatgaatcctatcatcaagccatggccattcagaggttggggaattgatatgatcggcatgattaacacaagtttatattggtggcaaccgattattttaccaagtgggtagaggcgattcccttgaagaaagttgattctggagatgctatacaatttgtccaagagcatataatctatcgatttggtattcctcaaaccattacaaccgatcaaggatcaatctttgtgtccgatgagtttgttcagtttgccgataacatgggtattaaattgttgaattcttccccatattatacacaagctaatggacaggccgaggcatctaacaagagtttgattaagttgattaagaaaaagatttctgattatcctcggcagtggcatactcgattagccgaagcattgtggtcttatcggatggcttgtcatggttcgattcaagttcctccttataaacttgtttatagacatgaggctgttttaccatgggaagttagaatcggctcaagaacaacataattattaaatggcaaatacttgaagaaatattaccctaagtgtttgggttaatgca

SEQ ID NO: 6615 - DNA, 1339 bp, Oryza sativa
  Clone ID: PAT_MRT4530_13289C.1
atggcgggagccaccgccgccactccgatggacatcgacgccgccgcgccgccgccgggggcggccgccaagggcaaggcgcctctctcctccactcccggcggtagggccgcgccctgggtcgagaagtaccgcccccaatccctcggcgatgtcgccgcccaccgcgacatcgtcgacaccattgataggcttacaaatgagaacaggcttccacatttgttgctttatgggcctccgggcactgggaaaacatcgacaatactggccgttgcaaggaagttgtatgggtcacagtatggcaacatgattcttgaactcaatgcatcagatgagcgtggtattgatgttgtaaggcagcaaatccaagacttcgcaagtgcccgcagtctctctttcggagcaaagcaatctgttaagatggttctattggatgaagcagatgccatgaccaaggatgcacagtttgcattgcgaagagctacatcttctaatctcccccatcttacagtcattgagaagcatacaaggagcacaaggtttgcgctgatatgcaaccatgtgaacaaaatcattccagcactgcaatcaaggtgcaccaggtttagatttgcaccccttgatggcactcatgttagggaacgtcttaaacatataatacaatccgaggggcttgatgtagatgacggtggtttgacagcccttgtgcggttaagtaatggtgatatgaggaaggctttgaacatattgcagtcaacacacatggcatctaagcaaataacagaggaagctgtgtacctttgcacaggaaaccccatgccgaaagacattgaacagatagcatactggttgctgaatgaatcattttcaaccagcttcaaatgtattcttaattatcaaagtcatactcctaacaattacaattcatggtttaaacatgaattgtgcaatttgttctttgctgtcagtcttgtgaaaacactgtcctatctgcttcagatgccatctgatgtacgcataaagctgattaatgatctggctgatatcgagtaccggctaagctttgcttgcaatgacaagttacagctgggggcgctgatatcaactttcacgggtgctcgcacggctatggatgctgctgcccactaatttcagcaaggtgatgatcattctgttgcccttcactgccactttaatctggaaatgacgcggcaatgctcgttattattataagcatgtggttagcgtaaagcttaaaagcatggcgaggagaaaatttatctgtagggttgtctgctcgacgtgctaccttctgggacttgggagtgccttgtaattg

SEQ ID NO: 6616 - DNA, 166 bp, Oryza sativa
  Clone ID: PAT_MRT4530_1328C.1
atgtcgatccaacgtgtcaactccaaaaaaactttaaaaaaccggtccagcgggaacgcgcagcgcaaacgaacgaggctgccgcgtgggccccactcccgtggacccgacgctgcagcttctgaagatccgctcttcgtggaggttgaagccgacgtttgggaaa

SEQ ID NO: 6617 - DNA, 2427 bp, Oryza sativa
  Clone ID: PAT_MRT4530_13290C.1
atggagaagtacagcaagttccagatggtactactcaatcaggtgataaaggtgctgcagatggttctcaaggggttcagggtgatggttctcaaggagtttaaggtgatggttctcagggatttcaagtcgatggttgatggctcaatagatgaatatcaggctacaggaccggtttatttgccaggaggtgttttcccaaactatcggcccttgatcactaataatcagcgagctgttcagccaattcctcccaatgcaccatcggctcagccgacagcaccagtatcggctcctgcaccaactgcaccatcatcggcaccaggtcagctaattaatcctcggttgctggtgagagagcagccacaacatagtggacaaaatgtgaatcggctaactcaagaccaagtcacagctatgttcttaccagctcagcctattgttgacccaatccaacaacagccgattcaacagacgccaccaaggcagcaggttgtgcagccaattcaacaaacaccaccaagacattgggccgatttggagaagcatttttatagctatttctatagtggggttcatgagatgaaattgtctgatttaacggcgattaagcaaagacatgatgaacctgtgcaagattacatccaaaggtttagggagatgaggaataaatgctacagcttgagtttaactgatgcccagttagccgatttggcttttcagggtatgatagctccgatcagggagaagttctcgtcccaatactttgatagtttgtcacatcttgcacagaaggtaaccttgcatgaacagaggtttgcagaagccaggaagaactttgaaaaggttaatcatgtctgtccttacatatatggatcggatgatgatgatgatgactccgaaatagcagcagccgaatgggttagaagcaagaaggttataccatgccaatgggtgaagagttctggaaaggaagagaggtatgactttgatatcaccaaggccgataagatctttgatttgctactttcggaaaaacagattcaacttcctactggtcatacaatcccatcggctgaggagttaggcaagaggaggtattgcaagtggcataattctgggtctcattctaccaatgattgcaaagtcttcagacagcagatccaggcggctattgaaggaggcaagatcaaatttgatgattccaagaggccgatgaaggttgatggcaatccttttcctgtcaatgtggtagaggttttcagaagaaatatgacaagcagcaggagaggcattatgaagaagatgatggcggctttgatcctcattggggttgtgagttctttagattttgctggaatgaagaagacgaagccaaagcaggagtggcgcgttaagaatcaagtgcctacagctgatgaagccacagtcgatgaagcaaagaggttggctaaaggaaaaagtgttgtgactgcatcggttaacatggttttcacactccctgcggaatttgggatcaagcaagtcgatgttgatgaagttgaggaagaatcggctaaattgattttatcaccagaacaagcagtctttgagaaaccagaagggacggagaatcggcatcttaagccattgtatgtaaatggttatgtcaatgggaagccgatgtctaagatgatggtcgatggtggggctgcagtaaatttgatgccttatgctacatttaggaagctaggcaaaaatgctgaggatctcatcaagacaaacatggtgctcaaagattttggtggcaatccatcagaaaccaaaggagttttgaatgtagagctgacagtcggcagcaagactatccctacaacattttttgtcattgatgggaagggttcctacagcttgttgctcggaagggattggattcatgccaattgttgtattccttcaaccatgcatcaatgcttgattcagtggcaaggcgacaagattgaaatcgtgccagccgacagccaattgaagatggagagcccaagctattattttgagggcgtcgtggagggttcaaacgtctgcactaaggacacagtagatgatctcgatgacaagcaaagacagggtttcatgtcggccgatgatttggaaggaattgatataggtccaggcgatcgaccaaggccgacatttatcagtaagaacttttctccagaatttagaaccaagttgatagagctcttaaagaaattcagagattggttttttcgggagtattatgagatgccaggactcagccgatcgattgttgaacatcggctacctatcaaaccaggagttagaccacatcaacagcctccgagaagatgcaaagccgatatgctcgaacctgtcaaggctgagattaaacgtttatatgatgttggttttattcgtccttgctga

SEQ ID NO: 6618 - DNA, 3930 bp, Oryza sativa
  Clone ID: PAT_MRT4530_13291C.1
atggctctgttaaagctaagatccagaagcttgcataattctgggtctcattctactaatgattgcaaggtcttcaggcaacagatccaggcagctattgagggaggcaaaatcaaatttgatgattctaagaggccgatgaaggttgatggcaatccttttcctgtcaatatggtgcatacagctggccgaacagtcgatggaggtcgtgcaagaggttttcaggtgaattcggctaaaattatcaataagtatcagaagaagtatgacaaacagctggagaggtattatgaagaagatgatggcggttttgatcctcattggggctgtgagttctttagattttgctggaatgaaggtatgaggctgccatctattcaagactatcctgggtgcagtaatgttgcagaaaattcaagtcgatcgttcaatagaagcaatcggctatggcaagcaagagttcctgctcatcaaagattgggcccgaagaggagggttcaaaggttgaggaacagggagcgctttcaagaagttgagcaagaaatcaatcatcggttaaagaagacgaagccgaagcaggagtggcgtgttaagaatcaagctcctatagccgatgaagccacagtcgatgaagcaaagagattggctaaagggaaaagtgttgtgactgcgtcggttaacatggttttcacgttgcctgctgagtttggggtcaagcaagccgatgtcgatgaagttgaagaagaatcggctaagttggttttatcaccagaacaagcagtctttgagaagcctgaagggacagagaatcggcatcttaaaccattgtatataaatggctatgtcaatgggaagccgatgtccaagatgatggtcgatggtggggctgcagtgaatttgatgccttatgctacatttaggaagttgggcagaaatgctgaggatctcatcaatacaaacatggtgctcaaagattttggtggcaatccatcggaaaccaaaggagttttaaatgtggagctgacagttggcagcaaaactatccctacaacattctttgtcatcgatgggaaggtggcaaggcagaagattgaaattgttccaactgacagccaattgaagacggagagcccaagctattattttgagggtgtcgtggagggttcaaacgtttacaccaaggacacagtagatgatctcgatgacaagcaaggacagggtttcatgtcggccgacgatttggaagaaattgacataggtccaggtgatcgaccaaggccgacatttattagtaagaatttatcttcagaatttagaaccaagttgatagagctgttaaaggaattcatagattgctttgcttgggagtattatgagatgccaggactcagccgatcaattgttgaacatcggctacctatcaaaccagggcttagaccacaccaacaacctccgaaaagatgcaaagttcatatgcttgaacctgtcaaagctgagattcaacgtctatatgatgctggttttattcgtccttgccgatatgctgaggatttaaacaaagctaccccaaaggatgagtatccaatgccagtagccgatcagctggttgatgctgcttcagggcacaagatattgagttttatggatggaaatgcgggatacaatcagatcttcatggccgaagaagatatccataagacagcttttaggtgtcctggtgcaatcggcttgtttgagtgggttgtaatgactttcggcttgaaaagcgccggagctacatatcagagagctatgaattatatatatcatgatctgatcggttggttagttgaggtctacattgatgatgtggttgttaagtctaaagagatagaggaccacatagtcgatctgaggaaggtttttgagagaactaggaagtatggcctgaagatgaacccgacaaagttagagccttttacaccattattaagattgaaagccgatcaaaagtttacttggggggcagagcaacagaaggctttggatagtattaaggaatatcttagctctcctccaattttgattcctccatcgaaaggggtaacttttagattatatctgtcagccagtgggaagtcaatcggctcggtcctgattcaggagctggaaggaaaggaaagggttgtattttatctaagtcgtcagctcttagatgcagaaactatatattcccctgtggagaagttgtgcttgtgtttatatttttcatgtacaaggtttaggcattatctattgtccaacgaatgcactgtcatatgcaaagccaatgtcgtcaagtacatgttatcggctccaattttgaaaggaagggttggaaagtggatattttccttaacagagtttgatcttcggtatgagtccccgaaggcagtcaaggggcaagctatagtcaatttcattgttgatcatcgtgataattcaatcggctcggttgagattgtgccatggactttattctttgatggatcagtatgtactcatggttgtggtatcggcttagttagaatttccccttggggagcatgttttgagtttgcttataccattaaaccttatgcaaccaacaatcaagctgagtatgaggcagttctcaaaggattgcagttactcaaggaagttgaagccgatgctattgaaattatgggggattctttgctagtgatcagtcaattggcaggggagtatgagtgcaaaaatgatacattactggtttataatgagaagtgccaagaactgatggagtttcggctggtgactttgaaacatgtgtctcgagaacaaaatattgaagctaatgatttggcccaaggggcaccagggtataagccgatgatcaaatacattagggttgaagttgctgcattaacagccgatcattggagatatgatgtacatcaatatttacagaatccatctcaatcggcttctcggaaattgcgttacaatacgttaaagtatactttgttggatgatgagctttattatcgaacgattgatggggtgttgcttaagtgtttgagtgccaatcaagctaaggttgcaatcggtgaggttcacgaaggaatttgtggtactcatcaatcggctcataagatgaagtggttgcttggtcgtgcagggtatttttggccgacaatgctggaagattgtttcaagtattacaagggatgtcaagattgtcagaaatttggagcaatacagagagcaccggcatcggctttgaatcctatcattaaaccatggtcatttagaggatggggaattgatatgatcgatatgattaatccaccatcaactaatgggcaggccgaggcatctaacaagagtttgatcaaattgattaagaggaagatttctgatcatccttggcagtggcatactcgattggccgaagcattgtggtcttatcggatggcttgtcatggatcgatccaagtccctccttataagcttgtttatggacatgaagctgttttaccatgggaggttagaatcggctcaaggagaacggagttgcaaaatgatttgacagccgatgagtattataatctcatggccgatgaaagggaagacttggttcagtctagattaagggcccttgcaaaggttaccaatgataaggaatgggttgctcgacattacaacaagaaagtggtgcccaagactttttcagaaggtgaacttgtatggaagttgattttgccgattgggactcgggataccaaattcggcaagtggtcaccgaattgggaaggaccgtttcagatctacaaagttgtgtctaagggagcttacatgttgcaaggactcgatggagaagtctatggacgagcgctaaatggcaagtatttaaagaaatattacccaagtgtctgggttaatgcatga

SEQ ID NO: 6619 - DNA, 2122 bp, Oryza sativa
  Clone ID: PAT_MRT4530_13292C.1
gtcgactctagaggatccccttgatgaagtggaggaagaatcggctaagttgattttatcaccggaacaagcagtctttgagaagccggaagggacagataatcggcatcttaagccattgtatgtaaacggctatgtcaatgggaagccgatgtctaagatgatggtcgatggtggggctgcagtgaatttgatgccttatgctacatttaggaagctgggcagaaatgctgaggatctaatcaagacaaacatggtgctcaaagattttggtggcaatccatcagaaaccaaaaggaattttcaatgtggaactgacagtcggcagttaaggcattatctattgtccaacgaatgcactgtcatatgcaaagctaatgtcgttaagtacatgttatcagctctaattttgaatggaagggttggaaagtggatattttccttaacaaaatttgatcttcggtatgagtcaccgaaggcaaccaaggggcaggctatagccgattttattgttgatcattgtgatgattcaatcggctcggttgaggttgtgccgtggactttgttctttgatggatcagtatgcactcatggttgtggtatcggcttagttataatttctcctcggggggcatgttttgagtttgcctatactattaaaccttatgcaactaacaaccaagctgagcatgaggcagttctcaaagggttgcaattactcaaggaagttgaagccgatgctattgagattatgggggattctttgctagtgatcagtcaattggcaggagagtatgagtgcaaaaatgatacattaatggtttataatgagaagtgccgagagctgatgaaagagttttggctggtgactttgaagcatgtatctcgagagcagaatattgaagctaatgatttgacccaaggggcgtcgggatataaaccgataatcaaagacatcaaaattgaggttgcagcgttaacagctgatgattggagatatgatgtgcatcaatatttacagaatccatctcaatcggcttcccggaaattgcgatataaagcgttgaagtatactttattggatgatgagctctattatcagacgattgatggggtgttgcttaagtgtttaagtgccgatcaggccaaggttgcaatcgacaatgctggaggattgtttcaaatattacaaggatgtcaagattgtcaaaattttggagcgattcagagggcaccagcatcggctattaatcctatcattaaaccgtggccatttagaggttggggaattgatatgatcggcatgattaatccatcatcaagcaaagggcataagtttatattggtggcaactgattattttaccaagtgggtagaagcgattcctttgaagaaggttgattctggggatgctatacaatttgttcaagagcatataatctatcgatttggtattcctcaaaccattacaaccgatcaagattcaatcttcgtattcgatgagtttgttcaatttgccgatagcatgggtatcaaactgttgaattcttcaccatattatgcacaagctaatgggcaagccgaggcatctaacaagagtttgatcaaattgattaagagaaagatttctgattttcctcggcagtggcatactcgattggccaaagcattttggtcttatcggatggcttgtcatggatcgatccaagtccctccttataagcttgtttatggacatgaggctgttttaccatgggaagttagaatcggctcaagaagaacagagttgcaaagtgatttgacagccgatgaatattataatctcatggccgatgatagggaagacttggttcagtctagattgagagcccttgcaaaggttaccaaggataaggaacgagttgcttggcattacaacaagaaagtggtgcccaagactttttcggaaggtgaacttatgtggaagttgattttgccgattgggactcgggataacgaattcggcaagtggtcaccaaattgggaaggaccgttccaaatctataaggttgtatctaagggagcttacatgttgcaaggactcgatggagaagtttatggacgagcgctaaatggaaaatag

SEQ ID NO: 6620 - DNA, 735 bp, Oryza sativa
  Clone ID: PAT_MRT4530_13293C.1
atggccatacatccatacatcagaagcctcatggtgctcggtcttgggtacatctggtactcactcgcagtgaaaaatgcaggagtcgtcgtcggtgcagtatattctgcagcagtagatggcggcgtcgggcgactaccggctgctgcagtcggtgcggaacgtgtacgccatgggcaagggaggcttcgtcctctggcagatggcgcccgacatgtggtacgtcgagctccccgtcggcggcagcaaggtgcacgtgggatccaacgaaggtctcatctggcaccacacaccgtggctcggcgcccacgccgccaagggcccagtgcgcctgctccgccgcgtgcccgcgtcctccaggtccgaacatctcacgttctcaacctcacccccgggaccggtggcggcgagggcgggggaggaggggagaggaaggcggtggctcggaggtggagttcggcggtggcgcgagaggtcgccgcctcgccaaggtcgccgaggtcgtcgccggcctcgctcgcctgcaggaagagaagatggataggggagaggaaagaagagagggagagagaagaagagatgttccctcgacgaggttggtgttgctgccgaactggcatccgccaacgagaagctcaaaagcatgttgacaaaatgagcaagtgccctgatttcaaagggtttcatcgcatagctgatgcagaaatccagaagcgttttctctggtttcattag

SEQ ID NO: 6621 - DNA, 2059 bp, Oryza sativa
  Clone ID: PAT_MRT4530_13294C.1
ggaaaaacgacagggttataattctgttatgatatcttcaaatactacgtacattggatcaacgaaagccacatgacacatgaagaataaactatctagcacttatggcagatatggtcatatcattaacactacatggctcagtaagaacagattgctcttcatttgccactctcacattgaaatatcccgggtgcttaggttcagccaggaccatcgtcttgctgcttagcattgcaacaacatctgacatggttggtcgatcagctgcattctcttgtacacacagcaatgctatgttaatgcacctcatgatttcattttctgcaggaggatatttggaaactaatgattcatcgatgagttcaagccatcttccctctccccatagtgaccatgcaaatccaaggagattgataaagtctccactatgatgggaaccagaattcttttttccactgataatctcaagaaatagaacaccaaagctgaatacgtcggatttgatagagaagaggcccacagaagcatactccggagccatgtagccgtatgtaccaaccactcttcttgttgtgtttccttctgtgttatttgagctaaatattcttgctaacccaaagtctgaaattttagggttcatttcgctatccaagagaatgttactcggtttaagatctcgatgtatgacactcaatcgggagtgcttatgtaggtaaagaagtccatgtgctattccttcaattatttctagacgtttgtaccaatccagcaaagctcttttattttcatcaaagataaataagtccaagcttttgtttggcaagaattcatagaccaaaattttctcctcttcatgagagcaacaccccaagagcctaaccaaattcctgtgctgtagtttggctatgagctggacttcatttttgaactctatgaaaccttgtcctgaatgtgaagcaagtctcttgactgctatctctattccatcaggaaaatggcccttgtacacggcgccaaagccaccttctccaagcttgtttacttcagaaaaattacttgtagcctccagtacctgatcaaactcaaatactgaaaactctggattttttccttctaggtcccaaactaattcttcctctccctgcaagttatcagttctccttgcttgtaatcccattataccttttctgtgccccctccgccagccgcagtaaacaatgaagcagaaaaatgccaccacaggaattatgacaatgggaattacccagagcttgctcttatgccttttggggatggccggagccggcgcgccggtgagatgcagcataggcttgctgtcgtagaacacgtacgcctcatacctgaagtagcaccgtgtgacatgtatctgcgcacccatgcgcacggccatggtggagttgatcatgccggtgaggcggcggaggcacgccaggcagtcgccggcggacaggtccggcgtgcattgcgccagcgagtacaccagcgggaacgtcctgccggtgtccacgacgcccgtcgcaaaccgccccgcggcgccggccgccctctccaccgtttccgacagaagctgttggatgaggccggcgatgaaccgcacgttctcgccgtcgccggtgatgttgttgacgttccacctctcgaagggctcctcgtcttctgtggcgtcggaaggatcgagaaagttctggaaggagtagacgccggtgcagtcgccgtagtaagccccggccgtgtagttggcgacgcacgactcgttgatcagtctcgcgaacgtgtaggcgacggattcgccgcaagctgtgtcgttgaggtcgccgcggcagagcgcgaggacgtagaccacgtcgggggcttggccggcggcggcggtggcgtagtggtgcggggaggaggaggttttgttggggagggttgcggacacgaacttgaggttgtcgcagaacacgccgccaccatcgtcggcggcggccatgatgacctcgaacggcatcggcatgaggcccagtatgagcaggacgccgacgacgatgtccat

SEQ ID NO: 6622 - DNA, 1967 bp, Oryza sativa
  Clone ID: PAT_MRT4530_13295C.1
tttttttttttttttaaaagaaaaacattaacacaatgtatatatctaagtaaactgcggctcatctggaagacgaggtattcagggagggatgtgcatgatagaaagcagagaatctgaatgctttgcactagagattcatgtcattttgtctactatcaaatttaacaatgaatgcactccacctgacttcgaaccagaacccaaaacaaaagagaacattttatttactatgttagctagatgttcataagccatgctccaatttctatgttcagctatccttgttctcagctgccaatcttcaaagcttgattgcctttgatttttacatttgccacgctagccagtgcgctcagaggctctgaatccaccatagttgatttcttgacaggatcaacaaggtcaagcctcttctgcagcttcctccttttgtatgtgaaagggtacctatgaccttcttcaacttctgtaactgactggctggcaggagtcttcagcttcaatccttctgggtaacgcattgtttcagactgctccaataggtgtttgtaagggccagcggtgtctgtaccaagggtcaacacctcagaaatactttcagcagttttcagaccatgcgtcatgtatccatttgtttgatgacaatcagtattccttgtaaatggatcaggagaactttcaggaattacggcattttgttgaccaaagttcttcaaaaggttcttctcgtggggtgcttcattgcaatattccggactatgtttggttgttgactgatggaaggaattcggcattcgagaatagtaaccccttttaagctcctctggaaccataatttgcactccaaacggactttcaactgagtgagggtaagtatcaagtgtgccttctctttggtagggacgcacatgtagatttctcaaagtactcttgcttgtgtttatgtggtagtaataagctgaattcatcgcaaaaccatgaacatccagtgcagaagcgcaaggtaagctggagacctgtattcccagttggtctgctagcatcggttctggtgtacgatgaattccttcattgtgatcaatgagggaagcacaatcggtctttattttcagcacacctttgggcaatctaatacatgtagtaagctcaccaggaacatgaaagacaggactcttcaatgagctcatttccattgatttgtctctgtagactattcccttgcgcttggctgaacaatgagtggttactgtcccatccatacgtttggttcgcttcaaaggtggaagggttgcatctttaacctcattggcaattgatagacttctattgaaaggagaaccgcttatgtcaacacctgtgaggggatcttcatgtcttctgtcattccaactgttaaccttaccctgaagaccagtactcgccccacatcgtcctcctaccttgtccatggatgcaaacttgaaaatcatgccatcatgatgggacttcagaaaatgataatatcttcgtctttcaaagatcatcagtaattctctagcctgggaaacttctggagaataaaacccaccattcaatctgtggaagaagctcttcactggactcccaaagaacaggtcactgccactaaacagctccttcattgttacaaagaaatcatgttggtccatgtctgggagataggctgctagacggaatctatcatcttctgttagacataagttccatgtctccaaagaaagaatatcattcaattcaggcaaatcataaagcccataagggacactacagatctgatctccagactttgcaagctcacaattgacctcttcatgttcatagtcatcggattcatgaataggaaatctctgaagcagcattttctcctcttgtgtaatgtcctcgtctccacagctgtaagcccgctcttctgtaggcgcacaacttgctaccttcacaatgcccat

SEQ ID NO: 6623 - DNA, 654 bp, Oryza sativa
  Clone ID: PAT_MRT4530_13296C.1
atggagcttgcgagggtggagacgctggtgacgacgcactaccttgtgaggcatttcaggtggcagctgtgctgcggcctgcggggaggagaacacggatttcccagcccaatccgcggggaaaccctagggaaggaatttttcctcgcgcgatccgccgccgcttctctctcgcgcgcgaccaatgttgggcaccgccgcgcctcctcctccggcgagacgcgccaccgccgggactcctccggcgagacaccaccagcgctgccaccgtaccatgcgatggagatagttgatgctcatgaatgcaggaggaaaacacttccaagatatttgctacttggtcagaccacccggtactactacagaaaggctttttgcatgcgggcgaagggcatctttgcatacgattgccccaaacgtaagggcgagaagggcggggccacccaaggcagcagagccgcccccgccgccgcggcagtgaagaggggaggaggggcgggcggcggtgcccgaggcagcagagccacccccgccgccgcggcgccaccacttgaggcgcccgtgctcgccaccgaggagcacgaggacgacgtcgtggtggtggtcgccgtcgtcgcgacctcctctgccttggcctcctccgcgcggcagtaa

SEQ ID NO: 6624 - DNA, 280 bp, Oryza sativa
  Clone ID: PAT_MRT4530_13297C.1
tcctcgggggctccaccaccacaccagcactgtggcgcaacacgccgctcaacacagaggacaccctctaatctggcgcgcgggcggccccgatatgccctacacacatctacacgaggaaaagcatatgggggcacatccccgagaccctgttcaaaagacacagggccacactctacgtctgacacatgtgccccgcgtccccaagcacaaacacaccacacagtgtgccgcgtagagtctacaagagaaggccccccccctgttcaaggcacacaag

SEQ ID NO: 6625 - DNA, 419 bp, Oryza sativa
  unsure (1)..(419): unsure at all n locations
  Clone ID: PAT_MRT4530_13298C.1
nnccacatggggcaccaccacaagaacgacgacaaggccgcggcggcggccggcggcgaccaccgcaaggaggagaagcaccacaagcacatggagcagcttgccaagctcggcgccgtcgccgccggagcatacgccatgcacgagaagcacaaggcgaagaaggaaccggagaatgcgcggtcgcacagggtgaaggaggagatcgccgccaccatcgccgccggcagcgtcggcctcgccatccacgagcatcacaagaagaaggaagctaagaagcatggccatcaccattagctacctaccctatcactacttactggactagtgtgtctatntatttgattattaccatgcatgtactnctagctagcatatcggctgtatttttgtcgacggatacatgtacatcatctatc

SEQ ID NO: 6626 - DNA, 318 bp, Oryza sativa
  Clone ID: PAT_MRT4530_13299C.1
acaaatattggatcgatttatctagcctttaggatcatacaaggacagcaagttgaaatttctatcaactattctttttggttctggaaaaaatctacaaaacttagtagtggaaaaacaaactataattgggctaggggaaccgccaatcccaatttcagacttaacggttggcacaagttctaccttcgcaacccccttgctgacaggatgagttggatgggaagaaccatccatatagatggtcttttgaacacttcctgggacagagctttttatgttcgctgaaaaattatcaccaacagtttcttttacagt

SEQ ID NO: 6627 - DNA, 405 bp, Oryza sativa
  Clone ID: PAT_MRT4530_1329C.1
atggcgatgtatgctgaggttaccaactatctcggcacgcactcctcaaccacgctgcccgaagggagatgccacgacatggcctgttcacaagcgatccccgtgcacgtgatcttcggggagctcgctgcgtccgaggcagccaccacaatggtttcatgctgccgtgttgggctccgatcttccgaggccctcgtgggaagtgaattgatggggagcacgtacatggagcaagcaagcctccatgtcctgtgtaccaccttcatcatcctttccttcagcagggaacaacggcagaagattccgttctgccggaatttaattaaggggaaaaggaaaaagtttacaatcccaggaatgggatttcaagtccaaaaacaaaataaaacaatcaagggtgcctaa

SEQ ID NO: 6628 - DNA, 183 bp, Oryza sativa
  Clone ID: PAT_MRT4530_132C.1
atgatggttgttcggatgtgttgtgtttttcgtgttgtcgtggtggttgacggcgaccatggctggtttcaagtggggagctgcagctactcgggcggtgtcgttttggccaagcgcatcggcaccacagacagcggcgaaagtggagccgcgtgggagcagactggtggaggcagcatgtag

SEQ ID NO: 6629 - DNA, 381 bp, Oryza sativa
  Clone ID: PAT_MRT4530_13300C.1
atgcttttggatccggacctcctcgctaccttctgcggcgctgttgacacttacgcctgggtgctcgaggaggccaagcaccacgacgatgacaacgttgttgttggattgggactgcgtcgtggctggttgctactgctattgcttgctcaaagccaaccaacgatatcgttgctttcgcatttcttctgttcttgctattttgggcgtcacagcgacatcggcatcagcgaggactccgtgggagacggtgccagccgggacgagctccgcgctactgggcctggacgccgcgttgccgcactcgtgctgccgcagttattcgtggatggccgatattcgggcagccgacgaggtggtcatgcgccaccgctgccgtag

SEQ ID NO: 6630 - DNA, 680 bp, Oryza sativa
  unsure (1)..(680): unsure at all n locations
  Clone ID: PAT_MRT4530_13301C.1
attccaactcgaaaagcccatccttctgtccagactccagcgccgccgctttccggcagcgccgacaacgccgccgctctcccaagcgccggctgccgcgccccactccggcgacccccccccccaacaaccaccccgcagtcgccgccacccagaattggtcccgcagctccccgcgaatccggtcccaagctaaccctagccgctggcctcctcctctgctgctgctgctgctgcgactccctaccgccgccgagatggccggtgctgagcaccgcgcaactcctgtggcgtacggttggttatctattccagaggtagcttctcctgaaattggttaaagtgtttcttctcctcttggagcttggttggcacctggagtatcagcccttcctggaactgaatcaccttcctgatctgaagctccttgctccacttataactcagaaaatagcaaaatacgctttcatcactgaaggtccgtcgcgaagggatgcagcaggatacggatggattgacggcccatactgattatattcaagtgtaaatttccctgaataaaaccgtaacagaagtcgaggacgatggacgacgacctgacanaaaactctgctgaatatgacagcttcattcatcctgcagatcaaaagagcgggtttcgtcaaataattagaaatata

SEQ ID NO: 6631 - DNA, 255 bp, Oryza sativa
  Clone ID: PAT_MRT4530_13302C.1
atggccgcgaataatccaactcttggaacattaaccatctacagatcccttaccgtgataacacctcctgttgaaatcgagcctatcgtccctttacgctattctgacaagcctccaagaaacccaaggaaattttggctggggatgcccagagaagataaggagcttaagtctaccatgacggccattgccagttcacggacgagaagaccttctcagccaaaggagaactcgagattcatctgcgagcggtga

SEQ ID NO: 6632 - DNA, 372 bp, Oryza sativa
  Clone ID: PAT_MRT4530_13303C.1
acgtggagggggtcggggcaactcgaccccaagctgggagggggcagccgccgcccacgtggatttgggggcagccgccgctccaccatgggcttgacccccctcggggggagccacgtgggtttgggggcggcccgaccccaagctgggagagggcagcagccgcaacaccccaggctcgacccccctcggggggagccacctgggagggggcagccgccgcgacaccttgggctcgaccccctcggggggagccacgtgggtttgagggcggcctcctccctctagctgggtgggggcagccgccgctccaccccaggcttgatcccccttggggggagtcacgtgggtttgacggcggcctcctccctc

SEQ ID NO: 6633 - DNA, 445 bp, Oryza sativa
  Clone ID: PAT_MRT4530_13304C.1
ctgtttttctgcttgagaaggctgaggagctcatgagggggggcttgcatccgagtgagctcatcattgcctacaccaaagccatcaacaagacaatagaaattttagaggatcttgatgagaaaggctcacagaacatggacgaaagaaacacggaggatgttgcgttgaggatgagatctgctgacgcatgcaagcagtctggccaggaggatatgctgagccctcttgcggctgatgcctgcaatcaagtctgccccaaaaatcctgccaactttaatgatgacaatgctagactggctaaactacttggaggtggattgcacaattcttctgtgggccgagaattggatctgaaaaatgatgctggtgggagcattaaaaagacggacaaggcaaagactgccctatctgctggtggagtcgacacctcagcacctgaaac

SEQ ID NO: 6634 - DNA, 826 bp, Oryza sativa
  unsure (1)..(826): unsure at all n locations
  Clone ID: PAT_MRT4530_13305C.1
cggacgcgtgggcggacgcgtgggcggacgcgtgggcggacgcgtgggcgggcacagggtggaggacctgtgggaggtggcggagccgcagctgtcaccgtccgagaagctcaactcctgcttcgaggacatcaccgtcgcctccttccaccgcccgcttggctcgcaaggctggctggcatacatggtgatatatacgcctctcccagggaccatatatgtgcttctctgcataactgggctctgccaatagctgacccactattcaagacanngttgcagttgcagaggatgcatatgctttggttttgcacttgcgatatatggcattgactaatatttgatggggtgggtttatgtaggtcttacaacaaagatatgatctggtggtctactgaaggaaccattattcagtgttgcctacaaactgtaagtttgggtgtgatcaatactgaggattcctttgacaagggtttccaaaaagaatttcttcaatggaactccttgatttgatggacactatgtttcttctgttcttgtgtcctttgatcttctttgtagtttcattacttgctcttcttggtgggttgttatattatgtgataataaaaaaagaagaattagtaatagttataaattgatcaggaaactggtcttgtgtcctttgatcttctctgtagtttcattacttgctcttcttggttggttggtatattatgtgataataaaaaaaataaattagtaataggtataaattgatcaggaaactgggcagcattaggaaaggaatcaaacatgaggaggcgggtctattttttgacataat

SEQ ID NO: 6635 - DNA, 555 bp, Oryza sativa
  Clone ID: PAT_MRT4530_13306C.1
atggagatggagagcccgcggagcccggaggcggagatcgggcacagggtggaggacctgtgggaggtggcggagccgcagctgtcaccgtccgagaagctcaactcctgcttcgaggacatcaccgtcgcctccttccaccgcccgcttggctcgcaagacgcgctaaagaagaacctttctcctgtcagaaaaagaagaacctttctggacttccttattctttatgccaatatgtcgctggctggcatacatggtgatatatacgcctctcccagggaccatatatgtgcttctctgcataactgggctctgccaatagctgacccactattcaagacaagattttactcctttgtttgccaaccgtgcttgcagtttgcagttgcagaggatgcatatgctttggttttgcaatggcgatgcatgcacaaatgggcatgcaggtcttacaacaaagatatgatctggtggtctactgaaggaaccattattcagtgttgcctacaaactgttctcttcttcactccaggtgtatggctagatatcatataa

SEQ ID NO: 6636 - DNA, 306 bp, Oryza sativa
  Clone ID: PAT_MRT4530_13307C.1
atggatcttcgctggcgctcctcccaccccacagtcggcagcggcggttttggcgtggcgacgacgacgcgaggcgggtgcgcggcagcgacggtaggcaggcgagcgacggtggcgggaggcggcgcggcggcggctctcgggcatgggagcggtggcgctcgggagcaggtggtggcccgcggggaggccggattcgccgccgctgggccgcggggaggcaggatccaccgtagccgggccgcggagaggcgggatccgccgccgccaggccgcggcgaggccggatccgccgccgtcggctag

SEQ ID NO: 6637 - DNA, 789 bp, Oryza sativa
  Clone ID: PAT_MRT4530_13308C.1
atgtatagatcaaatcctggtgcaaaatgtggggtgctgactgaggaaattgagatatctaaactgtctgcagggttgggggatcagctaaacaaacaagaggtatctgtgagtcaagagcaggctctggttgtttggcagaccgaggggatttcatctcaaccggtagacgatcctgattctcaggaggagggagaggattgccaactggaagctttgatggattgggatttgcaaaaaggttttgtgaatcctattatggaagatgatgaggaagggaaatgtgacattcctacagaatcagatatcgagaagatgagggctgaggaggatgagttagaggatgataatagttctaagcagtcaccttcgcttgggggggggggaagtttttcaagaagtcaagaagaagaagctaaggaaagagatacttccagtaaaaagacaaagtctcagagtcaaagacaaagatgtgccgctgagattgcttctgctagtaacattgttctggggggtgatgaatctgaaaccttggaagctcaggctattctcttcgaagcagaattgaggaaaaagagttcagtggtggctgaggatgtggatttgggggtaaatgacagctcagggctaggggagcccgagaatgagattgaagttagggaggaagagctctattatgaaggttctctgggtcaagggacaacgaaaatgcaagggcaggaaggaagccaggggggcttaggactaaaaaagaagagggggagggggagacctaggtctaaatcatga

SEQ ID NO: 6638 - DNA, 512 bp, Oryza sativa
  Clone ID: PAT_MRT4530_13309C.1
aactttatagtaagataggatagaaaggtccaaattgagctgcttggtaataaatggattgcctctttccggcaaatcatcacggtggaggaaatacacgagttagtccgattgggaagcttgatacaggatgttaatctctccactattcctgatgatatctcatggaagtggaatgaatctgggatttacacaagtaagagtgcatatcttttccaattcgaaggatcttttgcttccataaatttctcctcgctctggaaggcgccggctgaaccaaaatctaggttttttggatggctagttctccatcagaaaactcccactacgcagaacttactcaggaggcattggccatgcaactggatatgttgtctttgcacatgtgcttttaaggatacaaatcacttgttcaatggatgcccattcgtcaggcaagtgtggagctttgtttgctcatggctaaacttggcagtggtggaggacttggggagattggagcagcttgggca

SEQ ID NO: 6639 - DNA, 267 bp, Oryza sativa
  Clone ID: PAT_MRT4530_1330C.1
atgcccaactccccaactggtctaaagaagagagtaaaactcacaggacccaaggcatgcccgggacttaggacatggccggttccgaagcatgtgacttataaagaccaaggtgagcccgagactcaagacaaggtcgggtttgaagtggaccctggacttacaaggattaaggtctctatgctcttctcactgaagaatgtaggacttacaaggactaaggagaagaccgggtccgaggcagaccttagcccaaggtgggcctag

SEQ ID NO: 6640 - DNA, 604 bp, Oryza sativa
  Clone ID: PAT_MRT4530_13310C.1
cagcacaatctccactgcacgctgagcgccatggaagaatttctcctttcggctgtccgtaagacgctcatcacggcatagaggccaccggtgatcggcgcgtcaggtgtttgtccatgcaagattccagaacgacataaaatcctttgtttcgatgtaaggtatccactcgatggatgccactcgatggacgaccgcggacatgcatttcaacagcttgatttaaagctcctcgttgtgctcgacgcccgctggtggagggcaacctgtcagcggcggcacccgcaccaaccttagtaagccgccacgagtgcggctgttgcctggctgcgcgagttttcggcgatgaactattcagcatgacgtcgcgaacgtattctgaatcacgcgcgatacacttgcccctcagttccgatccctcctgtaaatccagtcctcgattatttcatcagatctatgcccgaattgggagcttcgacccaaacccgttcgaagccgtcccagttggccggcgcgagaccggaatcccctaatgctacacgccaggtataccgcacacgtcgcatactgcgacgatcatcaagtggcgagtcatccccgtacc

SEQ ID NO: 6641 - DNA, 1389 bp, Oryza sativa
  Clone ID: PAT_MRT4530_13311C.1
ctccatctcctcaacgtcggctgggaaaggaaggcaaccagtcgtcgccttgtgcttggtggctccaccaccgcctcggcctcctcgaccgctgccacgtccctagcctccttggctgccgccgctgcgagcgcgggcggagatactccttcctcctctccagctccctcctcttccccctccggtccgtctctttctctctatctcttccccttcaccgccaagtgccattgtcgccccctcccccccaatttcgtcgcatcgagcaaggtagctgctccctcctcttcctttctcctcgccccgcgtcgttcgtgctcctccacgagcccccgccgacggcggcgcccgacgacggcgacgtcagggtctgcgacgcgtgcggcgacgacgtgcgcggcttcgtctaccactgcttcgaccgcgacctcgacctccacccctgctgcgcgcacctgccgggccgcgtcgctctcggcggggccgcgttcgagctctcctccggcggcacggctccccggcggtgcctcctctgcacggaggaggggagccgcccccacctccgccgcaactactggaccaagctcaagaagctcctcaagatcgtcgtgttcgtcctccgcgtcatcgccggcgtcctctccccgcggccactcgccggcgaacgcccccgcgccctcatcgtccagccgcggaagctcgggttcacccacctcagcctcgtcgccgtcgaccccgccgacgagctcgccgtccacgtccccatccggaacaagtacaagcggcccactcgcttgtatcacgagagccaccgccgcagcttcatcccgaatgcctcagctgccgacgaaccgctgccggagcaggagcccgatcgatttgccgatcatctggcaccggggttggaagtcgtggacgccgacgacgacgacgaccacgtcgccttcttcgagcgcaccgtcccggcgctggacatctccatcgtcgcggcgcacggccgtctcctgctggcccgcggccggagctgctactacgtctgcgacccggcggccaaccgctgggtcgagctccccgtcggcttctactacttccacatgctgttcgagcgcgagaggccggtggacttcgccggcgcgtgcggcgacttcgtcgtgctggacgacagcggctacaagctatggcgctacgactacctcgagagcggcgacaatcgcagggtggagctctggaacctcaacaaccctaaggacgacaatctccgcgatctctacgaacgcaaccaggtctcctacgtcttcgaagagctctacgaccgctaccacgtcttccccttcttcggcgctgttaggagcaacaatatcaagtggtggcctttcctttgtcttgctc

SEQ ID NO: 6642 - DNA, 1377 bp, Oryza sativa
  Clone ID: PAT_MRT4530_13312C.1
atgagagattaccaacgatttgctcgcgccgtcgccgccgtcgccgccgccgccgggcggcacctacccgacgacgccgtcatatcagacatctcgcgcagcctgtcgtccagagcagcgcaccgcctcgccgccgcgtgcccgcggtggcgagcgatcctgtcgcagccgacgttcctctgccgccacctctccccgcggccactcgccggcgaacgcccccgcgccctcatcgtccagccgcggaagctcgggttcacccacctcagcctcgtcgccgtcgaccccgccgacgagctcgccgtccacgtccccatccggaacaagtacaagcggcccactcgcttgtatcacgagagccaccgccgcagcttcatcccgaatgcctcagctgccgacgaaccgctgccggagcaggagcccgatcgatttgccgatcatctggcaccggggttggaagtcgtggacgccgacgacgacgacgaccacgtcgccttcttcgagcgcaccgtcccggcgctggacatctccatcgtcgcggcgcacggccgtctcctgctggcccgcggccggagctgctactacgtctgcgacccggcggccaaccgctgggtcgagctcccgccatccactctcccgccggaacacggcatcaactccggccttcactacgacgacctcgacgacgatgcgtcgtcggggacggggaggctagacttcacggtggtgctcatcggctgcaggcaccggcgcgtggtcgtcgagaccttcacgtcggcgaccggcaggtgggagacgaaggagctgcccgaacaggggacccagggcttggcacgcagcgtcggcggcgggccccgcgtccccgggcatccacgtcggcggcccgcgagggcggaggggtccatcgggcgggcggagcggtcgctgggctcgaccggcgggcgcctccggatgtgcgcgttcgacgtccgcgacgacagcgacgagagcggcagcccgtatccgcacgacggcggcgtgggcgtgcacggcgtgtgggtgatgacgacggacgacggcgtcgccgctccggcgtggcggcgcgtgcacgaggcgacggtggacgacgtcggcttctactacttccacatgctgttcgagcgcgagaggccggtggacttcgccggcgcgtgcggcgacttcgtcgtgctggacgacagcggctacaagctatggcgctacgactacctcgagagcggcgacaatcgcagggtggagctctggaacctcaacaaccctaaggacgacaatctccgcgatctctacgaacgcaaccaggtctcctacgtcttcgaagagctctacgaccgctaccacgtcttccccttcttcggctag

SEQ ID NO: 6643 - DNA, 416 bp, Oryza sativa
  Clone ID: PAT_MRT4530_13313C.1
aggaggaaggggaattttactggttggagtaatatcttccaagggaaaattcttgcggcccaatattggctacctggggttctcaactaattggcaagttagacatacctagggattagtgcagtacatcgatcattgcatcactaattcactagggggcggccaacttggaacatggaaatctcacctaaaacttaaacagctgaactaggagcatgcagcatccatcaacactcaacttacgatcgaaaccataatccatggacgacaaatcctagctactttcagtttcagtagagagtcacaagacagagatgacaaacaatcatcttgggccgatacgtataccacttacatgtagggaagacaggctccgacctgcttttgagttagggcctgtctggcgacatgtgcat

SEQ ID NO: 6644 - DNA, 1872 bp, Oryza sativa
  Clone ID: PAT_MRT4530_13314C.1
atggcgtcgcgctcgcgcgccgtctcctccggcttcacgaaggcgccgaccttctccgtcaccaccgcgtcgcagctccacgacgccatcgaccgcctcctcccgcggctacgcggcgacccgtccctcgcccccgccgcgcgcgcgctcgccgcggcagccaccgcctcgctgccgccctccaccgtcctctccaaccgcctcctccacctgctctcctcccacccagccaccctccccgacgcgctcgcgctcttctcctccatcgcggccccggacatctgctcccacaacaccctcatctccgcgctctctcgctccccgcgccacctcccctccgcgcgggagctgttcgaccgaatgccccagagggatcacttcgcctggtccgccctcgtctcaggttacacccgacacggccagcccgaggccgcgctcgcgctctaccggcggatgcaggaggagccggggaacgatggcgcggacaacgagttcaccgcgtccagcgcgctcgcggcggccgcggccgcacggtgcggccgcgcgggcagggagctgcactgccacgtcgtgaggagagggatcgacgccgccggcggcgacgccgtcctgtggagcgcgctcgcggacatgtacgccaagtgcggccgcgtggacgacgcgaggagggtcttcgaccggatgccggtccgggacgccgtctcctggacggcgatggtggagaggtacttcgacggcggccgcggcggggaagggttcaggctgttcctccacatgctgaggacccgagttcgccgtcgagagcttcgggaggcaggtgcacggccggatggcgaagagcggcactggagactctgcttcgcggagagcgcgctcctccgcatgtactccaagtgcggcgacatggggagcgcggtgcgcgtgtttgaggccatggcgaagccggacttggtgtcgtggacggcggtgatctccggctatgcgcagaacgggcagccggaggaggcgctgcgctacttcgacatgttcttgaggtctggaattaagcctgatcatgtcacttttgttggtgttctgtcagcgtgtgctcatgccggcctggtcgacaagggcctcgagatcttccattcgattaaggaacagtattgcattgagcacactgctgatcattacgcttgcgtgatcgatctcctaagccggtcaggccaatttgagcgagcagaaaagatgataggtaatatggcagtgaaacctaacaagttcctatgggcgtccttgcttggtggctgccggattcacaagaatgttggcttggcaaggcgggcagcagaagcattgttcgaaatagaacccgagaatccagcaacttatgtaactctggcaaatatttatgcctcggttggtctttttgatgaggttgaggatgtcagaagaatcatggaatcaaagggtataaccaaaatgccggcctcaagttggattgaagttgggagaagagttcatgtgttcctagttggtgataaatcgcatcctaaagctgatgaaatctatgcacttctgaagaagctgtatgtgaaaatggtggaagaagggtatgtggcggacattgaatttgttctccatgatgtcgaagatgagcagaaggagcaggacattggctaccacagcgagcggcttgctgttgcatttgggatcattgccactccggagggttccccgatcaaggttttcaagaacctgcgcatttgcggggactgccatgctgctattaagctcatatcgcagattgtgcagagagatatcattgttagggactcgaataggttccatcacttcaaggacgggatatgttcttgcagagattactggtga

SEQ ID NO: 6645 - DNA, 452 bp, Oryza sativa
  Clone ID: PAT_MRT4530_13315C.1
acagtatttatcaaggtaagaacatggatcatggatggcatgtactaatgtacatatttgccaaactatcacctttctaaatatggactttcctatttcagaatttagataagatttagggctgacacttacatttagtgattagtacaatttcagagttttgtcatttttccttggtgcatcataggtcaattgaggttcattaattcttgccaagctttatttctgacaatattttgttttccctctacctgtgtttctacctgacaacttacaagcatgaatattggtagaaaaaatagtactataatttgctcaaataagtaaactaggataggagatgatttggtgtggcttgagacaagctaaattaatcccaattgataacgttattctgataatgccttttaagaagttgttttcagtttccaaaatagtataaaaaaaaaaaa

SEQ ID NO: 6646 - DNA, 271 bp, Oryza sativa
  Clone ID: PAT_MRT4530_13316C.1
ggagaagcactacacaacttttaactagaacaagagaccgaccctatgaaacagatcacacatggacactgggacagttcttccgcttggtaactgcccatgaataccattctctaaaccccgcccttaggaataaccacgaatcaaaaacatcactcaacaaatgagcagaggtctgccaacgcctctacacttcttttgatggactacggcagaagcagatacagctggcagaggtaggtgaaccttatgttcagaactctagagcaaa

SEQ ID NO: 6647 - DNA, 1534 bp, Oryza sativa
  Clone ID: PAT_MRT4530_13317C.1
atggcgcccgtgcagacaccggagcagagcaacgggtcactgacgttgaacccggtggtgcagcgcgtgctgagccgcggcaagtcgctgctgtcgccgtccacgccgcggtcgccgccgccgtcgtacgggagcatcgtcaccgtgctgagcatcgacggcggcggcgtgcgcggcatcatcccgggcaccatcctcgcgttcctggaggagaaactgcaggagctggacggccccgaggctcggctcgccaactacttcgacgtgatcgccgggacgagcaccggcgggctggtgaccgccatgctcaccgcgcctaacgacaacggcgacccgctgttcgccgccagggacatcaacgacttctacctcgagcactgccccaggatcttccctcccgtcagcaaggggcctctcggtctgttcaagagcatgacggggcccaagtacgacggccggcacctccactccgtcgtgcagcagctgctcggcgacaagcgcgtcgacagcaccatcaccaacatcgtcgtcccgaccttcgacatcaagctcctccagccaacaatcttctcgacctacaacgctcgcaaggacgtgtccaagaacgcgcttctgtcggacgtgtgcatcagcacgtcggcggcgccgacgtacctccccggccaccgcttcgagacgacggacaaggacggcaagccccgggaatttaacctcgtcgacggcggcttcgccgcgaacaatccgacgctgctggcgatgacacacgtaaccaagcagatcctgctgggctgccaggacttcttcccgatcaagccggcggactacggcaagttcatgatcctgtcgctgggcaccggctcggccaagatcgagaagaagttcgacgccgtcgagagcggccggtggggcgtcctcggctggctgttcaacaagggcgcgacgccgctgatcgacagcttcagccaggccagcgccgacctcgtcgacatccacgcatccgtgctcttccaggcgctgcactgcgagaagcgctacctccgcatccaggacgacgagctcaccggcgacgcggcgtccgtcgacgtctccacgccggagaacctccagaggctcgtcggcgtcggcaaggcgctgctcaagaagcaggcgtgcaaggtcgacctcgagaccggcaagaacgagccggacatgaaccggaaaagtaacgaggaggagctggtgcttttcgccgagatgctgtcgcgagaacggaaggccaggcttcagaaaaagcaggggagcatgaagatctagtacatattggcaaattgtagcagatcttcggatcaatactacaggtctacaactactattggtgtcaagtgattggatgtaaaatttatccgttcatattggatgtttgttgtatcttcgtaaattcatgtacatctatgtaaggaaatgattctaaactctcgagaagatatctatgtgagtagtaatgaaaaaaagctttttactatcaaaaaaaaaaaaaaaaggttctagatcgcga

SEQ ID NO: 6648 - DNA, 501 bp, Oryza sativa
  Clone ID: PAT_MRT4530_13318C.1
aaaaacaggacaaacagcccatgtgtcatggtctaatgggtaccccaagcggtccatcacacccgaaataacacctcgtaacattattatcccagatcagcaaattggaacatacaacataagttggtagagaaaaaacatgctacaatgggcaggtttctggacaaaaaccccccctacgtatgggtctggcagatctcgtgcaggaagggcttcaaaacattctgaacagctatgcttggctgggctcctatatgcggaaggaactgcttgcaactctcggtctcatagcccacaaagaccgcccatagggttagcactctgaagaggctttttactgtcggcacacaggcgggatctttgtttgcataatttgcaaataaaacgctcttttgaccctcataagcacgctgaagggcttgcccaaccagccaagagcatttgacaccttgaatgccagacccgatcttgccaataaagctggggtcaccacaacaatcc

SEQ ID NO: 6649 - DNA, 396 bp, Oryza sativa
  unsure (1)..(396): unsure at all n locations
  Clone ID: PAT_MRT4530_13319C.1
attcccatgtggcagtagattattattacatggtagctcaaactaatgtgatgcagtttctgggtattccaatttgtgcatttcttaatttaatcatatatttgactggaatgggcatatatgtgactttgatagctagatatgtaaaaaagttttgagatttctggacatctttcatttgtcaatgcagttctatttcttttctactattgaaggcaagaaatataatttaccgtaccttttttatcagctatagtgtttttgttgttagcctttgaagctattgcttttaaagtgctgtaatcatctcgaaaaattattatttcagccagttgacattgcaagttaattaagtaaatttacatgtggcataaaanaaaaaaaaaaaaaaaaaaa

SEQ ID NO: 6650 - DNA, 1586 bp, Oryza sativa
  Clone ID: PAT_MRT4530_1331C.1
ctaaccagagaccatattagtgcctgacaatccatgcgagttgccacatccatgagtacatcattccgacaccacagtagagtgacaccattatgagaggtaggaaaggaaatctgctgccaaatacatagtggtggaatacttgagaccataattctatagcaacaattcctaaaagatagctaaaactgatccacccaatgaagctatttttcctgaccacgctgcctgattcatttactttcttcccttcttgaggagattttgcagcaaaatgggaagaaaatcctacccacatgagggtagcataggtcaacagaagcataacctttataggatattcttggttctcaaacaacaatgggaacaatgaataacatgaaactattgacaacacaaaataatgcttcgcgtcctccaagctatccatggcaattagggcaagcggaatagtgaaatggagtgatgccttctcatgtacatgccatccaaacataaacccacatgtagttgcatatgacacccatctaataatgtgccttggctggggtttagagaatgctttcatgaggcaaggagacatagcaagtatgaccaataaaaatgtagttattggagtgaccttgggaagaacagcaaaaggagacgaattaccaacaagccccccggtaaatgaagcttcaggtatctggatgttgaagcctagtcttctaagaagaaacgcgaagatcttgtcaagtaaaatgtagaatacccaaaaatttggcgcccaataagcatggcacaggcctcgaccaaagggaaacaaccggttaaagagctgttgcatctgcttacagtatctgcccatagtacaggaagggcacaaatgcagcagcaaacacagcagccacaccagcccccatcagcaccaaccttcccaatcccctcaccacaccccggccacagcaataatgccggaaaagatacacgaagtagaccggcgccgccactaggaacaggtgcttcgagcacagcagagcagcaaaaacgactccgccggcgagatccctcccctgctcaaggaagtgcagcgacagcagcagcagccccatcaggaacccgttgtactggaagtgtacgtggtccacggcgagcagcgccggcgaccagaggacgagcgcgagggagaggaacggccgccgccgccgccgcgtgagcgcgtccgtggccagcaggaggacggaggagaggaggaggaggaggtcggagaaggcgacggtgaggcggaggtagaggaggtaggcgaaggagggcggcgcgtcggggacggggagggagacgagggaggcgtcgacgaggggcgccgggagggcgaggaggcgggagaagtaggcgaagaagggcgggtagtcgagcgtccactgcgacgaggcgtcggtgtaccaccgccgcgcggggagggcgtgggtgagggcgagccagtagcggtgcacgtcgaagtcggtggagcggtaggtggggacgagcaggagcttgacgcatgtggcggcggcgaaggtccaggccgccgcccgcgccggggaggtggcggcggcggccgccat

SEQ ID NO: 6651 - DNA, 447 bp, Oryza sativa
  unsure (1)..(447): unsure at all n locations
  Clone ID: PAT_MRT4530_13320C.1
cccacgcgatcgagcaagcgcgctatggtgctgggtatggtggcgagcctcaagcgaagccccaggcccaagatggatgtgagttcgccctccatgtgtggagtctaccctaggaactgagcacatccatgcaaagtggctactggtgattgcggttcttggaagtgtgtaccatcatatatatatagctggataaaaaaagagtcacacatcatcgagagtgtcatgtaataaaaaacggaataggctttggctgcaatgaggtctggattctattgcatcatgcacagagcaattgaccatgtggtgctgtatcttaggagtaggacgttacggactgttcactgtccaatgccnacgctcatagctcattctattgtgggccttaaagttgaacgcgagcaagcaatttaattcaaataatattgatatgtctctttccattct

SEQ ID NO: 6652 - DNA, 4965 bp, Oryza sativa
  Clone ID: PAT_MRT4530_13321C.1
atggatctcgcatcctacgctgcggcggcgccggctcccccgcggtggctcacctcgcgcacgtgcgacgtgctcccctccgcggccccctcctcttcgggatttggggagtgggccgccttcctcttcctctccgactgctgccagcgggtgcacctctccgcgctcgcctccctcctcctgctccttctcctctgcttcgctctgcgcaggaccgcctcgtcgtcgtggtcgccgcgggcgcgaaggggtggtgctgatgggatcgaccgcgacgaaggcaagcggccggtgctccaccgccctgggccggcccccgcggtgcgggtcggggtggggtacgtcgtcgcgctctcggcgtcgctcgccctcgccgtgttctacgccgtgctgctggtgctctcgctcgtgacgcggggaggaggaggcggcgtgctggagccggtgttcctggcgctgcagtgcgccgcgcacctcgccgcggcggcggtggtcgcccacgagaagcggttccgcgcggtgcaccacccgctcacgctccgcctcttctggctcgcggcgtccgcgctcgccgtgctcctcgccggctccgccatcgctcgcctcgcctccggcgcagccgccctccccgacgacgcgctcgcgatcgccgtgctcgtcctctcccttcccctgcctctcctcgcgatcgccggcgccaccggcatcaccgtcgtcgtcgccgcggcggagagcagccacgaagagggcgccgaggggaacgggaacggcgaggacgtgagggactacaagaacgtgacgctgtacgcgacggcgtcgtggccgtcgcggctgatgtgggcgtggatgcacccgctgctgaagcgcgggtaccgcgcggcgctggacctgaccgacgtgccgacgctggcgccggagcaccggccggagcgcatgtacgagctgttcctctccaactggccggcggcgtgggcgaccaaggacaacaacccggtgcgccacgcgctgctccgctgcttctggccgctcttcctcctcaacgcgtccctggctgtgctccggctgacggtgatgtacgtggggccgacgctgatccagagcttcgtggacttcacgtcggcgtcgccgcgacggccgctgtgggacggcgtgcggctggtggcggcgctgctggcggcgaagacggcggaggcgttctgcagccaccagtacaacttccactgccagaagctggggatgcagatccgcggcgcgctcatcacggcgctctaccgcaagggcctccgcctctcctgctccgcgcgccagaagcacggcctcggcatgatcgtcaactacatggccgtcgacgcgcagcagctctccgacatgatgctccagattcactacctctggctcatgccgctccagcgatggtgttcccacttcccgtgccagagacagagtggaccagtagaaccttgggtggggtctctggttggggtggcgctgggattgctgtacttgtacttgggcccgccggtgacggcggcgctgggcggtgtggtggcggtgatgatgttcgtgctggcgggggcgcggcggaacaaccggtaccagttccggctgatgacggagcgagacaagcggatgaaggcgacgaacgagatgctcaactacatgcgggtgatcaagttccaggcgtgggaagagcacttcagcgcccgcatcgaggcgttccggcgcggcgagttcgggtggctcacccgcttcatgtactccatctcgggcaacatcatcgcgctctggagcgcccccatcgccatcgccgctctcgtcttcgccacctccgtcctcctcggtgtccgcctcgacgccggcctcgtcttcaccgccacctccttcttcaagatcctccaggagcccatgcgcaacttcccccagtccatcatccaggtctcccaggccatggtctctctcggccgtctcgactcgtacatgacgagcgcggagctggacgagggcgcggtggagcggggaccggcggtgggggcggggatgacggccgtgcgggtgagaggtggggagttcgcgtgggaggaggaggaggaggcggcagggcagcaggcggtgctgcgcgggatcgacatcgacgtccgcgctggcacgctggcggccgtcgtcggcatggtcggctccggcaagtcgtcgctgctgggttgcatcctcggcgagatgcgcaagatctccggcgagttctcttgcatgccgaacacctctcaaacgagagcgataattttgaaagaagcggagacaccgggcatcgcgtcggggaggtcgagcggcgacggctgcgaccggcagcgcactcgagcggtgacgccgctgggcggtggggtggtcgagcggcagcgggggcgcccgagcggcgatcaacgggcggcggggcggtcgagcggcgctggcaccgacggagcagcacaagcggtcgagcggcgacggcaccggcttcgaatcggcgtcggcctcgacctcctctgcctctccgtcgcctccctctcccattctcttctcttcctccggctcggcggcagatcgacgtcttcctcacttctccactgcggcggcggttcggcgtcgtgcggagtaaggctccccggcggaggcgcggtgacagtgcgggggagcatggcgtacgtgccgcagacggcgtggatccagaacgggacgatcgaggagaacatcctgttcgggcgggggatgcagcgggagcggtacagggaggcgatccgggtgtgctccctggacaaggacctggagatgatggagttcggggaccagacggagatcggggagcgcggcatcaacctgagcggcgggcagaagcagcgcatccagctcgcccgcgccgtctaccaggacgccgacgtctacctcctcgacgacgtcttcagcgccgtcgacgcccacaccggctccgatatcttccgcgactgcgtccgcggcgccctcagggacaagaccgtcctcctcgtcacccaccagctcgacttcctccgcaacgcccacgccatctacgtcatgcgcgacggcgccgtcgcccagtccggccgctaccacgacctcctccgcaccggcaccgacttcgccgcgctcgtcgcggcccacgagtcctccatggagctcgtcgagagcgccgcgcccggtccttcgccgtcgcccgcgggcaacctgccgctctcccgccagccgtcgtccgcgcccaaggagagggagagcgcgtcgtcgaacggcgacatcaagacggcgaaggcgtcgtcgcggctgatcaaggcggaggagcgggcgagcgggcacgtgagcttcacggtgtacaggcagtacatgacggaggcgtgggggtggtgggggctgatgctggtgctcgccgtgtccgtggcgtggcagggctccaccatggccgccgactactggctcgcctaccagacctccggcgacgcgttccggcccgccctcttcatcaaggtgtacgccatcatcgccgccgtgtccgtggtgatcgtcacggtgaggtccctcctcgtcgccaccatcggcctcgacaccgccaacatcttcttcaggcaggtcctcagcaccatcctccacgcccccatgtccttcttcgacaccaccccctccggcaggatcctcaccagggcgtcatcggaccagacgaacgtggatctgttgttgccgttcttcgtgtggatgagcgtttccatgtacatcacggtgataggcgtggtgatcatgacgtgtcaggtggcctggccttcggtcgtcctcgtcgtacccttgctcatgctcaacctctggttccggaaatactacatctcgacgtcgagggagctgaccaggctggagtcgatcaccaaggctcccgtgatccaccacttctcggagacggtgcagggcgtcatggtgatcaggtgcttccagaagcaggacaacttcttccacgagaacctcagccgcctcaacgccagcctcaagatggacttccacaacaatgcagccaacgagtggctcggcctgcggctggagctcatcggaagccttgtcctctgcgtcaccgccttgctcatggtcacgttgccgtccaacatcgtccttccagttgagaggataaagcagttcacgaacatcccatctgaggcagaatggaggatcaaggagactgctccctctgcaaactggccacacaaaggcgacatcgatatcattgatctcaagtttcggtacaggcacaacactcccctagtgctgaagggcatcacgctaagcatacacggaggggagaagattggtgtggttgggagaactggcagtgggaaatcgacgctgatccaggcattgttcagaatagttgagccttctgaggggaagataatcatcgacggcatcgacatctgcacgctagggctccatgatctgaggtctcggttcggcattatccctcaggagcctgtcctcttcgaagggacgattcgaagcaacatcgacccgcttcagctgtactctgatgatgaaatttggcaggccttggaacgttgtcagctgaaagatgcagtgacttcaaaacccgagaagcttgatgcatcagttgtcgacaacggcgagaactggagtgttgggcagaggcagttgctgtgccttggccgagtgatgctgaagcacagcaggatactgttcatggacgaggccactgcttcagtggattcccgaaccgatgccgtgattcagaagatcatccgggaagagttctcagcctgcaccatcatcagcatcgcgcacaggataccgacggtcatggactgcgacagagtcctggtcatcgatgccggcctagcgaaggaatttgacagtcctgcaaacctgatcgaaaggccatcactgtttggagcattggttcaagagtacgcaacccggtcatccgatatataa

SEQ ID NO: 6653 - DNA, 679 bp, Oryza sativa
  unsure (1)..(679): unsure at all n locations
  Clone ID: PAT_MRT4530_13322C.1
cggacgcgcgggcggacgcgtgggcgccagcctcaagatggacttccacaacaatgcagccaacgagtggctcggcctgcggctggagctcatcggaagccttgtcctctgcgtcaccgccttgctcatggtcacgttgccgtccaacatcgtccttccagagtatgtcggtttgtcgctctcgtatggcctgtcacttaactcggtgatgttctgggccatttggttgagttgcaatattgaaaacaaaatggtctcagttgagaggataaagcagttcacgaacatcccatctgaggcagaatggaggatcaaggagactgctccctctgcaaactggccacacaaaggcgacatcgatatcattgatctcaagtttcggtacaggcacaacactcccctagtgctgaagggcatcacgctaagcatacacggaggggagaagattggtgtggttgggagaactggcagtgggaaatcgacgctgatccaggcattgntcagaatagttgagccttctgaggggaagataatcatcgacggcatcgacatctgcacgctagggctccatgatctgaggtctcggttcggcattatccctcaggagcctgtcctcttcgagggacgattcgaagcaacatcgacccgcttcagctgtactctgatgatgaaaattggc

SEQ ID NO: 6654 - DNA, 273 bp, Oryza sativa
  Clone ID: PAT_MRT4530_13323C.1
ttttggttattagcattatatgctggctgtgttaaaagactctgtgtacaaacttgaatacattatgtggtcatacagagggttgtaacttataaactttcatgaaaaggggctgagccatgtcttacaactcttaatcgccaacatacacaggacacaggagtgccataattagagcttcctattactgatgagacatacatttactatagaggcgtatcaagcagtctcaaacttcaccatgccagaagaacgttcaaagaatcaccgggt

SEQ ID NO: 6655 - DNA, 276 bp, Oryza sativa
  unsure (1)..(276): unsure at all n locations
  Clone ID: PAT_MRT4530_13324C.1
ggcagatctccggcgaggtgacagtgcgggggagcatggcgtacgtgccgcagacggcgtggatccagaacgggacgatcgaggagaacatcctgttcgggcgggggatgcagcgggagcggtacagggaggcgatccgggtgtgctccctggacaaggacctggagatgatggagttgggggaccagacggagatcggggagcgcggcatcaacctgagcggcgggcagaagcagcgcattcagctcgcccgcgccgnctaccangacnccgacg

SEQ ID NO: 6656 - DNA, 1160 bp, Oryza sativa
  Clone ID: PAT_MRT4530_13325C.1
gcacgagggacaccgcgacgatcgatgcaggcgattcgcccgggccgttcgtgccgcctgggccgttcctgcggccgcgacggcgtctcctcccgctgccttgctcggctccaccgtagcagcggcagtagcaacgggggcggaggagcagtgaggtgcgcgaaggcagccgcgcagtcgatggaggccgtgaagaaggacgaggaggcgagggtggtggcgctgcgggcggtggaggcaacgcccgagtcgttcgcgccgttcggccaggtcatcgccgccacacccgacggcgacgagttcggcccccacgacgcccagctcgacctcacccgcggcatcccaaggttctacatcatgaggttggagaagcggccgctcgagttctggacgatcacccaccacgcgagcgtgacccagtgcctcggctccatcggcggcgaagattggtacctcggcgtggccaagccctcgatcgtggaggatggggcacacgagcagggcggcgatgggaggaagcccgtgcagtcgcgtgctggccactactaccttcctcccgatccagctgaagtctgcgtcttcagggtttccggcgctaagtttctgaagctgcacatcgggacctggcatgcggggccgcagttcaaggcggatgcggtggatttctacaacctggagctcagcaacaccaatattgtcgaccacactacgcacgatttcaagaaagacgacggggtaacttttgtgattgaggactgagacacatttcacaacctaaggctgggtaatgaatatgctagactgtttgcatgtcttggctgtttcctgagtttttaatgaacaatcgatatgcaaatgtgatgtacaatatgcacatatgagctgcttgtttaagtcattgtaaaaaacaaattaagaaaaaagaggcaaggggagtctctagtgggtacacccaaaagggcaaaaagccgtccagtatgaaatgatgttgctcttttctgaaaacaatatgaatgatttgagtcaataagtgatgtatttccagagagagaactatcagacaatggactttctggtatcgtgccttccccaaaaataaaaaataaaaaataaaaaaataatataaaaaaaaaaaaaaaaaaaaggggggggcctcgtgc

SEQ ID NO: 6657 - DNA, 144 bp, Oryza sativa
  unsure (1)..(144): unsure at all n locations
  Clone ID: PAT_MRT4530_13326C.1
tgaacaattggaaagcattgtattgaagtctgatgcgctttgatcatataatatttgcattgcagattgtgacaaanaaaaaaaaaaaggagaaaagagataaaaaatggtgaccgatgtaaaggaacttaaacatgcgaaagt

SEQ ID NO: 6658 - DNA, 468 bp, Oryza sativa
  Clone ID: PAT_MRT4530_13327C.1
cccacgcgtccgcccacgcgtccgctggagtgttgggcagaggcagttgctgtgccttggccgagtgatgctgaagcacagcaggatactgttcatggacgaggccactgcttcagtggattcccgaaccgatgccgtgattcagaagatcatccgggaagagttctcagcctgcaccatcatcagcatcgcgcacaggataccgacggtcatggactgcgacagagtcctggtcatcgatgccggcctagcgaaggaatttgacagtcctgcaaacctgatcgaaaggccatcactgtttggagcattggttcaagagtacgcaacccggtcatccgatatataactaatgatgagatgagctgatttttgactcagaatttgggaggaaataagggcgacggatggccaccccagctgatctagtgctctcttcacactgtgagatgcttttcaatttttattgag

SEQ ID NO: 6659 - DNA, 753 bp, Oryza sativa
  Clone ID: PAT_MRT4530_13328C.1
atggaaaaagcacaagacacgggcgatgtatacaggaccaacgtgccatctccaggagctagcacgctggctccggctagggacgagtgcctagagactctcatcctgacgggacggggcgaggcggcaacaatcgggagccttgatgggtgcggccagtgcgccggcagcctgaccaatagagatagctggacgacgactataaccagcgacaaccaccacggggcaaccctacaatcacaggcggtgggtggggaagaacgcaggtcggggaagagaaaggcagtcgtcggcgaactggcactcagcgtctcagccagttcgcccaatcgcccgagcccaacgccgccagccgccagcctccgcgagactgtgactccgcgccggtgcccggtgtcgtccccagctagccggctccccgcagtccgcgccgacgctgtgccatcccctccggcctcccctccttatgcgactccccgccggcgaggcggcgccgccaccgccgtcccatcccctcctcgcgaggccgcgactccgcgtctccgtgccggcgtcgccaccgccgtccgcgccagcgccacaccgtcctccccttcggcctccccgccgtccgcgccgacgccgctccgtgccgccgtctcccctccgtggctcagcccagtcacatatactgagaaagacatcttctccaaagttagtgaggaagacattatacaaactttcatgactaaggccaagcgtacactgcggtag

SEQ ID NO: 6660 - DNA, 1278 bp, Oryza sativa
  Clone ID: PAT_MRT4530_13329C.1
atggcgtgggcggagctccccgaagagtgcgtcgccggcatcctccaccacctcctttgcctccctgaccactccatgttctccggtgtctgcacaaggtggcgcaccatcgccatgcggcatctgccgcctatgcaaccgtggttgttcatgccgtccaccaacgcgacctccttcttctgcgtcgcctgcgagcgcacccaccaggggccctgcctgccggacaacgcccgcggcgcgcgcttctgcggcgcccaccttgaaggttgggtcgccgccgccgagattccgcatgatgaccgctctgtcccggggaatcgtgcccccgctctgctcaacctctgcaccggcgagcgcgtcctcctcccgagatccctccgcaacaacaaccctgataccaccttcatcaaccacatccaagccgtcatcctctcctataccccatgtcaggctcatccgtactacgccgccgccatagtttccggcaagcccaatatcatgttctggcgccccggcatgagcgattgggtgccgccgatgctgaagtgggactcggggttcaaaatgtggcagaagcagctatccaaggacccaatcgaggacgccaactacatcttcttcggcccgctcggtgggggattctatgtcctcaacaacaaggaggacctcctggtgtacacccccaaggccaacgacaggcacggcgagctcacgatgtcatccgtgaacaagtaccagctccgccgaaatccccgacccaccatgccagggccaggggaggtgctcggccgctacctcgtggaatcccgcgggcagctgctcatggtcgtcaggttcgtctccacggagaaggccacggtggcgttcgacgtcttcaagctggagctgaagccaccgtcctggaagaaactcaccttggacaccctcgcagaccggacgatcttcctcgtgcgaggctgctcctgcgccgtcgagatgaggaaatctagccagtgccctcccaacatctacttcctggatgactccgcgaggttcaacggcgcagggagctcgacctcgcaggtgcagcaggttgagggcccgttcccctgcggcgacaccggcagatgctgcgagcagggcatagtccgctgcctgccgcgagagccgccatcagactcctcgccgtggacttggttctatctgcccccatacgaggcccttagtcgtaagtggtttatggagcaactaatcaaacaaggggaacagctgagactgcaggaacatcaggatgggtag

SEQ ID NO: 6661 - DNA, 457 bp, Oryza sativa
  Clone ID: PAT_MRT4530_1332C.1
tttaatctgtccacccatttttccctccctctccactttgtatggatccggcggaggcatgcagtttctcatgcggcggagcggcggcgatagcggttcggggcgacaagcgactgcgggcgtggcgtcggcgggcgggaggtgcggcggctccacctcctccaccgctgaacgggggcgggcgcggtggtggtgggtgactggaggctcggcgaggcggcggcggatctggtcgcagcgaggcggattctgcacagctgaaggcggtgcgatggcggatccgacttcccctacctcccacgcgggtcttgctcgggtgaaggcatgcacactgtggcttggcggctcaagatccccatggtgcttcatcggtgtcggctgaccttagtaccgcctatatattcctttgttcgtggggcgctttcggagtcttcgtcatggtcatgtctctcttctc

SEQ ID NO: 6662 - DNA, 513 bp, Oryza sativa
  Clone ID: PAT_MRT4530_13330C.1
atggtcgtcaggttcgtctccacggagaaggccacggtggcgttcgacgtcttcaagctggagctgaagccgccgtcctggaagaaactcaccttggacaccctcgcagaccagacgatcttcctcgggcgaggctgctccttcgccgtcgagatgaggaaatccagccagtgccctcccaacatctacttcctggatgactccgtgagtttcagcggcgcagggagctcgacctcgcaggcgcagcaggtccaggggccgttcccctgcggcgacacgggcagatgctgcgagcagggcatcgtccgctgcccgccgcgagagccgccatcagactcctcgccgtggacttggttctatctgcccccatacgtcgcctttcttgaatggtttaagacgcaagcaatcaaacaactggaacaggttctttcaaagttcttacgaatttcaaatgtgaacctgattggaaattgctgtgctaaaatgaaacatgattcagcagttctgatctga

SEQ ID NO: 6663 - DNA, 3355 bp, Oryza sativa
  Clone ID: PAT_MRT4530_13331C.1
gtttcgtttttttttttggcattaaaaaaagtactcgtgcatggatctattgtttcacattacctcagctatcaaggcacaatttgcagacaccatgaactgtacagaagtacaaacgcaaaacccatgcctggacgaaaataaggaggcactatttactacactatataatcaccaattcagttcagcatcctcccctacagaaccagttacagataggaaacacaaaaaaacaaaaaaaaagaagaaaaagaacacctagcaagagacgatttcagcttcaccaaagccataggagctgaaatgcttgaccctgaatttccactcgccattggcagcatcgaatgagatgaactcagcaccctgctcctcagctttcttcaccagcatctccttgtacttgcccaccctcggaccctctgtgtactgatcccccgtcttcttgttcatgcacttgatattgagaagggtcaccacggcagctttattcagaccctcaccaacagggggcttcttgctatcgtccttgtacacgatcacttcacggttattgaattccacaatggactccagatcaaggcccctcacgtccgtttctccaataaacttgatgctaccgtaatcatgacgtcccacagcaaaatccctcacacgactgcagtagcctggttcagcacgttctttggcagcaagctcctccagactaggctctgtataataatcggcatgcactagcttaggcacaagcctctcaacagaagtaccattcccatgccttgtcacagtatcaggctcatttgatgcacggtcatcacgctggatgccattttcgattgacgactacctggttggtgaaatagccaggttgcctttaagtttatctgtctcgactaaactctttggaattggctgcatgtcaacactgacgcgtgaaggccactgatcaattggacggattataagattcctcgggttctctctaggaatgaaaaacgcatcagcttttggtgttgcaggagattcttcgtcatcagcaaagaatgggactaccttgccatcagatatcggattatattttctgggcagcacttttatccttctctgcgacaaatgcctaggaaccaccatggataatgatgtcctgttcgtaagaggcttatcagcaactggcaaacttgagattccatattgaacagaaggggctgatccaccattcccaatggacatctgggagattcttcgtcatcagcaaagaatgggaccttgccatcagatatcggattatattttctgggcagcacttttatccttctctgcgacaaatgcctacgcaccaccctggatacccattgctggcagagtaccgaagggatttgtaacaagagctggttgcatgaccatattggactggctaggagttggctgtccaaaaggtgctgattcatagtgttggaaatgccaggaaatccaccagtaggacctgcagtaaccatgcatgcacaagcacaaaagtgttaacccaattttgcttaaccaagtaaaagaatctgagattgattaggagacaaaacacaaacctgtttgagtttgaggttggaagtgaagacatgctgccaaacagtccaccagtcattccaggggtaggtgtgctgaataggcttccagtagagaaagctggagtgctcaatccgaaccctgatgatgcctgggtaaatggctgttgcgcaaacgccggggaagaactaaatagcccagctgattgagtgttaaccaaggacaagccagtactgaatgaactggggtttgataatgatgcgccaaacggagaagaagaagcaaaaccaggagtagaatttgcaaacagagaactgcttgtttgtgtaaataatgggatacttgtagttgatgcaaatggacttgagcttgctgctgatgtattattgaatggtgaattgaacaatgttgtggaagtagaaccgaaaccagtggaaggcttggcagcaaatggattgctaacggatgtcgtttggaatgcatttgaagtttggaatgcatttgaagggttctggggaaattgattgttcagtggggatgggaagctaggggttgctgctggagttcctgaaggattaggtccacctttgtctccacgttggtaatcctcccacctcaactcttcatgactcttcgctttgtatgcctccatggctgatatagaatccaactttgcagtgggctgagcaccacttgtagcactatccgcgtctggagtttgagtatagggttgaattctggttcctcctgcttggttcccaaatgatgtttgcccaaatgtcggtgctgctgtctgtgagccaaatggagaagtctgtgcaccaaaaggagatgtagatgttccaaaaggagtgctaccaaatgtagatgctgtttgaccaaaagatggtgaagagccaaagctaaaagcactcgttgatgtgccaaatgaagctgagcttgaagctccaaatcctggagtgctacttgcaccgaaggctggggtactggtagcaccgaataatgatggcgatgttgaaccaaatgctggggtggtggtgccaaatgctggtgtagttgtggcaccaaaggccggcgtgcttgatgcaccaaaagtgctgctaccaaatgctgcgctgccaaaggtggacgatgtggcgccaaatgcaggggctggtgatgcaccaaaagctggcgcagagctcccaaatggagaggatgatggagtgccaaacgccggagtggatggctggccgaaggccccagcggacgtcgcgccaaacgccggggtggatggctggccaaaggcacctgtggacgtggagccaaacgctggagtggacggctggccaaaggcccccgtggacgtcgtgccaaaaggtgttgccgcgccaaaagtgctgccaccaaatgctggttgtgcttgctggaatggacctccaaaagcactagactggctaggagaagaaccaaaaccgccaaagcttggcttttgtccaaacaatgatgatcctgcaaatttggttggggctggtgatgcaccaaaagctggtgtagagctcccaaatggagaggatgacggagtgccaaacgcctgagtggatggctggccagtcggagcagatggctggccaaaggctccggtggacgtcgtgccaaaaggtgaatttcctgtctgtgccccgaatgcggtgatcgggctgccaaagggtttcggcgcaaaaggattggtggtggtagtgttcgcctggccaaatccgcctgtctgtgccccgaatgggttgcttgaggtctgcccaaaagggctagtcgacgactgccc

SEQ ID NO: 6664 - DNA, 599 bp, Oryza sativa
  Clone ID: PAT_MRT4530_13332C.1
ctgcaggaattcggcacgaggggaaatcgcgcgcgttgcgctggccgcagctgacgcgctggggctgccattcgtgcggccgtactggagcgggcggaccgcgggggacttcgcccacggggccaacttcgcggtggcggcgccacggcgctcagcccggatttctaccgggagagaggcgtgcacgtgcgcgacaccgtgcacctcgacatggagatgaactggttccgcgatctgctcggcctgctctgcccagacgatcttgccgagaccgagggagccacggatccgggtgaaggccaagacccgcaagaccttgagcaagaagcgggagatgaagcttcggaggatccctatgcctactaccaggagggagatgaagacgaaggcgcccagtaggtcttagtacggtcgttgcctgtggcaatggcatgccgctgcttaaattctgctgccttacctatttctgcttttggatgtattccggaccgctcggtccgatgatttaagactatgcctgcaggcttatgatgtaataattcgtactagacattcgtgtatgtgtatttggtatttcagctatgaattcgtgtgtaccc

SEQ ID NO: 6665 - DNA, 4423 bp, Oryza sativa
  Clone ID: PAT_MRT4530_13333C.1
tcaccttggctcctccggcacctgcttccgcttcccgccgtcgccggcctcctctcctagtgcgggtccgactacaaagccataggagctgaaatgcttgaccctgaatttccactcgccattgacggcatcgaaagagatgaactcagcaccctgctcctcagctttcttcaccagcatctccttgtacttgtccaccctcggaccctctgtgtactgatcccccgtcttcttgttcatgcacttgatattgagaagggtcaccacggcagctttattcagaccctcaccaacagggggcttcttgctatcgtccttgtacacgatcacttcacggttattgaattccacaatggactccagatcaaggcccctcacgtccgtttctccaataaacttgatgctaccgtaatcatgacgtcccacagcaaaatccctcacacgactgcagtagcctggttcagcacgttctttggcagcaagctcctccagactaggctctgtataataatcggcatgcactagcttaggcacaagcctctcaacagaagtaccattcccatgccttgtcacagtatcaggctcatttgatgcacggtcatcacgctggatgccattttcgattgaagtagacctggttggtgaaatagccagagggcctttatgtttatctgtatcaactaaattctttggaattggctgcctgtcaacagtgccacgtgaaggccactgatcaattggacggattataagattcctcgggttctctctaggaatgaaaaacgcatcagcttttggtgttgcaggagattcttcgtcatcagcaaagaatgggaccttgccatcagatatcggattatattttctgggcagcacttttatccttctctgcgacaaatgcctaggaaccaccatggataatgatgtcctgttcgtaagaggcttatcagcaactggcaaacttgagattccatattgaacagaaggggctgatccaccattcccaatggacatctgaggcattgctggcagagtaccgaagggatttgtaacaagagctggttgcatgaccatattggactggctaggagttctgtttgagtttgaggttggaaggagaacatgcttggagtaggggcagattgttgaaacgccgtctttgtctccacgttggtaatcctcccacctcaactcttcatgactcttcgctttgtatgcctccatggctgatatagaatccaactttgcagtgggctgagcaccacttgtagcactatccgcgtcaaatggagaagtctgtgcaccaaaaggagatgtagatgttccaaaaggagtgctaccaaatgtagatgctgtttgaccaaaagatggtgaagagccaaagctaaaagcactcgttgatgtgccaaatgaagctgagcttgaagctccaaatcctggagtgctacttgcaccgaaggctggggtacctgaagatccaaagccactagaaccaaatgctggggcactggtagcaccgaataatgatggcgatgttgaaccaaatgctggggtggtggtgccaaatgctggtgtagttgtggcaccaaaggccggcgtgcttgatgcaccaaaagtgctgctaccaaatgctggttgtgtttgctggaatgtgcctccaaaagcattggattggctaggagaggaaccaaaaccaccaaagcttggcttttgtccaaataatgatgatccgctgccaaaggtggacgatgtggcgccaaatgcaggggctggtgatgcaccaaaagctggcgcagagctcccaaatggagaggatgatggagtgccaaacgccggagtggatggctggccgaagccccagcggacgtcgcgccaaacgccggggtggatggctggccaaaggcacgtggtggtcgggctgccaaatggtttcggcgcgaacggattggaggtggaggtgctggcctggccaaatcctgtctgggccccaaagggttgcttgaggtggttgctggagccgaacatggctgcttgctcggggacgaggcccgcggcggcggcggcggcggcggcggcctcttggtccccctcttctcctccccctcccctcctgagtggggtggaggtggaatcgccggtgggttgtgggttgctgcggacgattaggatcctgaatttccactcgcccttggcagcatcgaatgagatgaactcagcaccctgctcctcagccttcttcaccagtatctccttgtacttgcccaccctcggaccctctgtgtactgctcccccgtcttcttgttcatgcacttgatattgagaagggtcaccacggcagctttattcagaccctcaccaacagggggcttcttgctatcgtccttgtacacgatcacttcacggttattgaattccacaatggactccagatcaaggcccctcacgttggtttctccaataaacttgatgctaccgtaatcatgacgtcccacagcaaaatccctcacacgactgcagtagcctggttcagcacgttctttggcagcaagctcctccagactaggctcattcccatgccttgtcacagtatcaggctcatttgatgcacggtcatcacggtggatgccattttcgattgaagtagacctggttggtgaaatggcagtcttgttgaactccctctcagccaaagagccttcatgttcatcaatatcagctgaattctttggaatttgttgcctgtccattgtgccacgtgaaggccactgatcaattggtcggattaccagatttcttgggttctctctagggatgaaaaaagcatcagcttttggtgttgcaggagattcttcatcatcagcaaagaatggaaccttgccatcagatatcggattatattttcttggcagcaattttatccttctctgtgacaaatgcctaggaaccaccatggataatgacgccctgctcgtatgaggcttctcagcaaccggcaaacttgagattccatattgaacagaaggggctgatccaccattcccaatggacatctgaggagtcgctggcagcatcccgaatggatttttaacaagagctggttgcatgaccatattggactggctaggggttctgtttgagctggaggttggaacaaaatgctgggcatttgagcagggacaggttgttgcaatgtcggcgttgagggtgaaggcccgctgccaaacaatccaccagtcgccacaggagtaggtgggctgaataggctcccagaaaaagatgggaagctcgatgtgaaccctgatgatgcctggctgggttatagttggtgcaaatgggcttgagcttgctggtgctgtattactggatattgaattgaacacggatgaaatagaaccaaaaccagttgaaggctgcttgggagcaaatggattgttcgcagatgctgatggaaatgcatttggagggtttggggaaaattggttgttgactggagatgggaagctaggggtcactgctggagttcctgaaggatttggtccacctttgtctccacgctggtaatcttgccacctcagctcttcatgactcttcgctttgtatgcctccatggctgatattgagttcaattttgcagcaggctgagtaccacttgtagcactgtccgcatctggtgtttgagtataaggctgtattctggttcctccagcttgattcccaaatgatgtttgcccaaatgctggtgctgttgtctgtgatccaaatgtagatgtctgtgagccaaaagtagatgaagttgttccaaagggagtgctaccgaatgtaggtattgtttgaccaaaagatggagaagagccaaagttaaaagcactagttgacatgccagagcttgaagctccgaatcctggagtactacctgcaccaaaggctgtagtacctgaagatccaaaaccaggagtggtggatgaaccaaagcctgtagaaccaaatgctggggcacttgaagcaccgaatacagatgtagatgttgaaccaaatgctggggtggtcgtgccgaatgctggtgtagttgtggcaccaaaggatggtgtagttgtggtgccaaaggtcggcgtgcttgccgcgccaaaagtgctgccaccaaatgctggttgtgcttgctggaatggacctccaaaagcactagactggctaggagaagaaccaaaaccgccaaagcttggcttttgtccaaacaatgatgatcctgcaaatttggtgagctcccaaatggagaggatgacggagtgccaaacgcctgagtggatggctggccaaaggctccggtggacgttgagccaaacgccggagcggatggctggccaaaggctccggtggacattgagccaaacgccggagcggatggctggccaaaggctccggtag

SEQ ID NO: 6666 - DNA, 477 bp, Oryza sativa
  Clone ID: PAT_MRT4530_13334C.1
atgccagagcttgaagctccgaatcctggagtactacctgcaccaaaggctgtagtacctgaagatccaaaaccaggagtggtggatgaaccaaagcctgtagaaccaaatgctggggcacttgaagcaccgaatacagatgtagatgttgaaccaaatgctggggtggtcgtgccgaatgctggtgtagttgtggcaccaaaggatggtgtagttgtggtgccaaaggtcggcgtgcttgccgcgccaaaagtgctgccaccaaatgctggttgtgcttgctggaatggacctccaaaagcactagactggctaggagaagaaccaaaaccgccaaagcttggcttttgtccaaacaatgatgatcctgcaaatttggtgacgtcgagccaaacgtcggagcagatggctggccaaaggctccggtggacgtcgtgccaaaaggtgaatttcctgtctgtgccccgaatgcggtga

SEQ ID NO: 6667 - DNA, 753 bp, Oryza sativa
  Clone ID: PAT_MRT4530_13335C.1
atggctggggtacctgaagatccaaagccactagaaccaaatgctggggcactggtagcaccgaataatgatggcgatgttgaaccaaatgctggggtggtggtgccaaatgctggtgtagttgtggcaccaaaggccggcgtgcttgatgcaccaaaagtgctgctaccaaatgctggttgtgtttgctggaatgtgcctccaaaagcattggattggctaggagaggaaccaaaaccaccaaagcttggcttttgtccaaataatgatgatcctgcaaatttgcggattgttgtgtcacatgtcatacaaaatgatagctctgaagagcaattaaaacaacaacattgggctggtgatgcaccaaaagctggcgcagagctcccaaatggagaggatgatggagtgccaaacgccggagtggatggctggccgaaggccccagcggacgtcgcgccaaacgccggggtggatggctggccaaaggcacctgtggacgtggagccaaacgctggagtggacggctggccaaaggcccccgtggacgtcgtgccaaaaggtgagcctcctgtctgtgccccaaacgtggtggtcgggctgccaaatggtttcggcgcgaacggattggaggtggaggtgctggcctggccaaatcctgtctgggccccaaaagggttgcttgaggtctggccgaaagggctagtggacgactgcccaaatgctgcgaggaacaaacatatcatatcacattaa

SEQ ID NO: 6668 - DNA, 193 bp, Oryza sativa
  Clone ID: PAT_MRT4530_13336C.1
gaaattgtcaaggttccattaatattgctgggggggttcaaagtacaggggaaaattcattgattctttactactcaatgaacctatcacactatttattgatacctctcattccctttttttttagtaaataaatcaacatttcctttatatactattttatatattaattctattaattttttatgcctca

SEQ ID NO: 6669 - DNA, 903 bp, Oryza sativa
  Clone ID: PAT_MRT4530_13337C.1
aaatagccagagggcctttatgtttatctgtatcaactaaattctttggaattggctgcctgtcaacagtgccacgtgaaggccactgatcaattggacggattataagattcctcgggttctctctaggaatgaaaaacgcatcagcttttggtgttgcaggagattcttcgtcatcagcaaagaatgggaccttgccatcagatatcggattatattttctgggcagcacttttatccttctctgcgacaaatgcctaggaaccaccatggataatgatgtcctgttcgtaagaggcttatcagcaactggcaaacttgagattccatattgaacagaaggggctgatccaccattcccaatggacatctgaggcattgctggcagagtaccgaagggatttgtaacaagagctggttgcatgaccatattggactggctaggagttggctgtccaaaaggtgcctgattcatagtgttggaaatgccaggaaatccaccagtaggagctgtttgagtttgaggttggaaggagaacatgcttggagtaggggcagattgttgaaacgccgttgatgaaaagggtgaagacatgctgccaaacagtccaccagtcattccaggggtaggtgtgctgaataggcttccagtagagaaagctggagtgctcaatccgaaccctgatgatgcctgggtaaatggctgttgcgcaaacgccggggaagaactaaatagcccagctgattgagtgttaaccaaggacaagccagtactgaatgaactggggtttgataatgatgcgccaaacggagaagaagaagcaaaaccaggagtagaatttgcaaacagagaactgcttgtttgtgtaaataatgggatacttgtagttgatgcaaatggac

SEQ ID NO: 6670 - DNA, 207 bp, Oryza sativa
  Clone ID: PAT_MRT4530_13338C.1
tgttttcgtgggttctcttcacatgccgacgccggatagcacgagcacggaggcgcgagcagggttgctgcaggatatagacgtaggccggatgttgagagggctctgaacatgctgggcaacacgaatgattgtgggggcgaagcgaggcatctccctgtgactgctcttgaagcggttcatgctcttcacgaccggtatgaacaa

SEQ ID NO: 6671 - DNA, 647 bp, Oryza sativa
  Clone ID: PAT_MRT4530_13339C.1
ggcattaaaaaaagtactcatccatggatctattgtttcacattacctcagctatcaaggcacaatttgcagacaccatgaactgtacagaagtacaaacgcaaaacccatgccaggacgaaaataaggaggcactacttcatcaccagttgagcatcctcccctacacagttacagaaggaatataaaaaacacgaaggaaagagcactagcaagagacgatttcagcttcaccaaagccataggagctgaaatgcttgaccctgaatttccactcgccattgacggcatcgaaagagatgaactcagcaccctgctcctcagctttcttcaccagcatctccttgtacttgtccaccctcggaccctctgtgtactgatcccccgtcttcttgttcatgcacttgatattgagaagggtcaccacggcagctttattcagaccctcaccaacagggggcttcttgctatcgtccttgtacacgatcacttcacggttattgaattccacaatggactccagatcaaggcccctcacgtccgtttctccaataaacttgatgctaccgtaatcatgacgtcccacagcaaaatccctcacacgactgcagtagccctggttcaagcacgttctttggcagcaagct

SEQ ID NO: 6672 - DNA, 1161 bp, Oryza sativa
  Clone ID: PAT_MRT4530_1333C.1
atggggctgctgctgctgtcgctgcacttccttgagcaggggagggatctcgccggcggagtcgtttttgctgctctgctgtgctcgaagcacctgttcctagtggcggcgccggtctacttcgtgtatcttttccggcattattgctgtggccggggtgtggtgaggggattgggaaggttggtgctgatgggggctggtgtggctgctgtgtttgctgctgcatttgtgcccttcctgtactatgggcaggtgagttttgctcggttaatttacctttggaatggacgaattggttgcataattggcacaatattgtcttactcattgcaacaaataatcttgcagatgcaacagctctttaaccggttgtttccctttggtcgaggcctgtgccatgcttattgggcgccaaatttttgggtattctacattttacttgacaagatcttcgcgtttcttcttagaagactaggcttcaacatccagatacctgaagcttcatttaccggggggcttgttggtaattcgtctccttttgctgttcttcccaaggtcactccaataactacatttttattggtcatacttgctatgtctccttgcctcatgaaagcattctctaaaccccagccaaggcacattattagatgggtgtcatatgcaactacatgtgggtttatgtttggatggcatgtacatgagaaggcatcactccatttcactattccgcttgccctaattgccatggatagcttggaggacgcgaagcattattttgtgttgtcaatagtttcatgttattcattgttcccattgttgtttgagaaccaagaatatcctataaaggttatgcttctgttgacctatgctaccctcatgtgggtaggattttcttcccattttgctgcaaaatctcctcaagaagggaagaaagtaaatgaatcaggcagcgtggtcaggaaaaatagcttcattgggtggatcagttttagctatcttttaggaattgttgctatagaattatggtctcaagtattccaccactatgtatttggcagcagatttcctttcctacctctcataatggtgtcactctactgtggtgtcggaatgatgtactcatggatgtggcaactcgcatggattgtcaggcactaa

SEQ ID NO: 6673 - DNA, 380 bp, Oryza sativa
  Clone ID: PAT_MRT4530_13340C.1
cacgattgattcattgtttgtgtgtttttattttttaaaaacaataccctttagaacatgtaattagagcaggatcatggtaatgggggggaacacggaaactacacaccctggcttgacctgccacgtgttaaggggagcacaaagggactaaactaatacagcgtttcataaaacatgggggagcacatatgcacgggacttgacggtaaaagcagtcctaggttcccaagagagagtcctggacgacaactccgacggtctgccctaacacctgaaacaagttggcaacaactgacaagctcgagaaaattgggggtgctaaaaatttccatcggcagggcgttggaaagaaccggctatacgtgggcgaactttac

SEQ ID NO: 6674 - DNA, 294 bp, Oryza sativa
  Clone ID: PAT_MRT4530_13341C.1
tggatccccgggctgcaggaatcggcacgaggccatgctgtttgtgcatagtataagttcatctatcaattgttgggtagaaatataatgattcggtaattgattcagttattttttgggtagaaatataatgattcggtaattgattttgttatttttacgcacagactcaaatacattgagatttatgtgcgcatcatgattggcccactcaacgtggaattcattctccattttatgtgccagggggatgattttgttctgcaaaaggcagttactcttgtgctgcagaac

SEQ ID NO: 6675 - DNA, 1058 bp, Oryza sativa
  Clone ID: PAT_MRT4530_13342C.1
atggaccaagggaagcatcaagtcatggccggtgttgtgccggagccccgcgctgacgccgccgctagtggctttgttacgaaggacacggccgatgactttgagttctgcgtcatgtcagtcgggggcctcgtcccatccggcgccgccgccggcgtggccaacatgtgcgtgtccttcgaggtcggtcccagcgcagccggcccccgccccgcccctcgccgacggcggctggcgatgcggccggacttgtacttctggcacggtcggagttggcggcgtccaccgtgggttccaaatccatccccttccacctctctatcatgatgcggtaccatcccaagtaactggcggtaccgacgaatattagcctttagatctgatccaatcaatggctcatatttggtaccgccacaacctgttgactctaaaaaaagctttttctcatcgaatctctcaacttcagtgttctcccctatggcgccgacgtgctcgagcaaatggaggagctgctcagcgttgacatctgcatcgccgtcgctgtcggcgacgacggcaacttcgtcgatcgagatcctccaactcctcggcgactcctcaagcttaaccagcttcaaacgggtcttggcaagaagtgacttgtcggcgtaaatctcttcctgcgtttcattgttttttgttcttgtggacttgattcttctcaagatatcagcgcttggagatgacttaacagcagccttcaaacttgttattttatcatcaagtgaccgtttcatctcataaaggtcagcaatatgaatcaacagacgtccttcctccaatttaattgatctaagggcctcatcaaaggagaatacaaaagaataggcatttgcaacttcttggtctgatatcccatccatgttaatcttggagccaatcacagggcagtagtcatcttcagctggtccttgcggttgctgggaagccccgccccctccctcgctgaggcgcctcttctcctcccgggacctgcggaggattctcccacccccatggcgcctgatgatccttgccat

SEQ ID NO: 6676 - DNA, 237 bp, Oryza sativa
  Clone ID: PAT_MRT4530_13343C.1
cactattggtgctgatacgcctgcaggggccggcccggacttactggccggacccacgcgtccgggttcgttctccttctccctccccggcccctagccggcgggcccccacaatcgcccgggtgtcgccgtcaccggaacggaaaatcatgggcgcggaggcagagcaccgcatgtatccctaccccgctcccgctaccggtccccctacccttgttgggaggaccgacagaaact

SEQ ID NO: 6677 - DNA, 156 bp, Oryza sativa
  Clone ID: PAT_MRT4530_13344C.1
atggcgtgcgcgtcaacgataattctgcgtggattttcgagggattctcggcggtttggcggccggggagggacgtgcccaggcttaaaaattttgactcgcaaattagctttcatttatgtaattagttttgttgatgtgatggaaaaggactga

SEQ ID NO: 6678 - DNA, 1064 bp, Oryza sativa
  Clone ID: PAT_MRT4530_13345C.1
ctagtcgacgggctccccgacgaggctgggcattgagccattgcatgacctcggagcggtcggcagtggctcgtcgtcgtcggtgacgaggttggtcggcggcaagatccccatggggatggtgggtttccggaagaggccggtgaggaagtcgaacagctggggctcgagctcgtagcaatggcagcggcagcagggggcggcgatccgcggcgcaaactccggcaccccagcgtcgaggcggctggtcgagccactcctctgggccccgtgccctgccacgcccgctcccgccgccgccgccgtcgtccgccgccgaagggggcagccggattccgcagccccgattccaccacaggccacagacccttcacccgtggctcgggccgaggcccgacttccgagccgcaatatttggggaatcatccctggagtataatggcgagccaggagaagcccaccccgcctccgccgccgccgccgcatccacctgcaccggaggccgtacctcgcgtgcgccggttcggagggggtcctccgggcggaggaggcggcggaggttaccctaacccgccggacgcggcgatccccgacgcggcgacgctgcgggagcagtggcggttcgcggtgcggcagtacagcaggtggtactcccacgcctggggcaccgccatcctcgccggcgccgccttcttcggactcggctggctcgtcaagggctccaaccccctcccgtcccgcgccgagcaccacgcctccaacgccaaggaggaggagggctaaccgaaagtccttgctactcaccggtgcaaatttaaaattagccgtaatgggcaaagcgaagataaggcaagcaagaagaagaattctgcatcgtgctaaatgcacattgtacacttttgactgcaagacactgctcacttatctcatcttcctcgcctgttgtgtatatttggtctagtatctgcagaataagaatacgtggccttactgtttagtgaagcctttggagtatcctgtaaatatggacgagatgctgctgaaatctaattagtgtttgcccc

SEQ ID NO: 6679 - DNA, 588 bp, Oryza sativa
  Clone ID: PAT_MRT4530_13346C.1
atgcgtcgccgccgctttggtcttcttctcggtgacaggtgggcatcacaggctcacgacgaggctctactggcgagtgagctaggttgcagtcttgcaggtgcattcgacgggctccgtggcgagtgcacggggctgccatgcgatccttctcatgcacggcgcgttgcttcactccccgcctctgacgccggaggacgcatccctgcacggctgcgcctggaccacgtggtggagggtgtcagcggccgtggtggggtgggcgccagcggagaggagggactaggtgcggcggaggagggatccggtgaggatgatgacggtggtggtgccgtcctcatgctggcgcctaggagggagaggggggagaggagtggtgactggctactgctgttggcgcctcggcgctcctcctcctcctccaccgtccccggtctctccccctcccgctggcgcggcacgtggagagggtgggagtgggagaggcggccgactgctgctgctagcggcgagctgctgttgttgccaagctcgcccgccaccactccaccctctaccgccggcagcctcccaggcccgcttccctga

SEQ ID NO: 6680 - DNA, 412 bp, Oryza sativa
  Clone ID: PAT_MRT4530_13347C.1
gaacaaaagcgtttgttcaataaaaaaaaattgaaatatggttgagcattctcacatacttgaatgatactctaaaaagttacactgagcatatctaaagctcgctataacataaactaccgatctcaatgtcgggggaaccttccacggaggttatggaatggaggaactccatatgggctacgcataccttagatggacactgatccagatctgaattttgaaaggactatcgtcatgttgtctggtgttgaacactgacctcgccagttttattgcggaggccaccgttgactactccaagccctcgatgttggacatctagggcttgaccaagactagctttaccacgtttggcgtgttggtcacgttcaccctgtacacgtgaccattatcctacgggtggctttca

SEQ ID NO: 6681 - DNA, 217 bp, Oryza sativa
  Clone ID: PAT_MRT4530_13348C.1
gtgagtatgccgacccattgacatcgcatgactgaagagcatgcggcgtgtagctagtggtctagatagaaccgaggtgaactgtggcaccactaactctgtaagactcatactgatgatcaatattagaagacatgtggaagatggcaggaagcgacggtgagaacattgatactgctagcacgacgaatggtgggagcgaccccgacctctggac

SEQ ID NO: 6682 - DNA, 735 bp, Oryza sativa
  Clone ID: PAT_MRT4530_13349C.1
atgaggcgacggatccagtggtgccgaggcacgcgcacgacggatctagctctggcggtcagcgaaggcggtgtagcggtggcggactttgatggggaggcggcggttctgtgggaagggagggagcactggcggcggcgcacggtgaggcaggcgacggtggctggcggaggaccggagggaggagtggtggcgacgccgtcacgcgacgcgcgttgggaggtcggcagtggcgccatcacagtggcatgcgtagggaggtcggcagcggtgcaccgcttcggcggcggcggtgtgctgagggaagtcggcgccggcgccatcgcgcggcgccggcgcacggcttcgggggcggcggcgtgcagatggaggcgctgggcgatatttgcgttcccgacatgccacgggcatatactaccacagatgctcggctgcggttggtatggatacacgtttgaacgttgctggggcctcaattcaaagccgccggttggcgacggcggcgaggcgcggggagctctcagctttggcaagcctggacgccacggcaccggggcagtctatcggcttatcctgtcgtggctggccgccacgtgccggtcctacggtgtgtgctggccttacagctgtggagctgagccggcaacgcggtcacagctcttcgcacgtctctgtgttatttctcacggggtctacagctggtcaggattactgtccccaaaggaaagagaatga

SEQ ID NO: 6683 - DNA, 203 bp, Oryza sativa
  unsure (1)..(203): unsure at all n locations
  Clone ID: PAT_MRT4530_1334C.1
cccacgcgtccgggtcggagaaggcgacggtgaggcggaggtagaggaggtaggcgaaggagggcggcgcgtcggggacgtggagggagacgagggaggcgtcgacgaggggcgncgggagggcgagnaggcgngagaagtaggcgaagaagggcgngtagtcgagcgtccactgcgacgangcgtcggtgtaccaccgtccg

SEQ ID NO: 6684 - DNA, 976 bp, Oryza sativa
  Clone ID: PAT_MRT4530_13350C.1
ctaattaacatcagtctcattgagtaaatcagcaaggaggatgtcctgactagaaatgtagccgcaacgttcacatgttccttgctctggcatccttgttgttgtggagatcctaaaattctcacctgattttatgatgtccagtatagctctaggtattatatgggatattgcatagtaaggatatataacaatctccttctcgtaggtgtatttgaaaggcttgcatcttgggattggcccatcttcaccagtagttataaaggtacatctacttaaccgtgcaatatcaccacgtaatatattcaataacacagtttctgcaatgtcatcagcattatgtccagtcacaatcttgtcaacttttaagagagcagcacctcggtccagtgcctgacgtcgaaaaacaccacaaaaggtacagttattttttaggccaattgctttcacaatatcatccattgtccagccatagaggtccttataggaaactattttcaatggcaggccatactgcaataagtcggttgtatcagcaacttttccaccagaagctccaatggccacacgatcaccaggtttaaacaaattattgtcaacaatagtctgatggatctcatcctcaaagacaacatagaagcattccctacatatctgctctaaggttttgggacgcttgagggcggccttccgctcgccgcagcgtgtgcagaggcggctccccgccctagccggaggttgtctcgggccatcaacggcagagtccatgggcaattgtgatggacaaaatattttgcggctggcggcgtggtccgtggaggggatgggtttcaagggctgtccacccgtagctcggtgctcggggctccagcctccgcctgccacccttccgccgcgagcccgcgaggcgcgaccggggacagcgtgtcgaggggtcggcgcctcggccgttcggcgtcgatgcttcgggcgtaaa

SEQ ID NO: 6685 - DNA, 348 bp, Oryza sativa
  Clone ID: PAT_MRT4530_13351C.1
aaaaaaaaaaaaacgttgaaaatgcaaaaggggaaaaaaaaaaacgtttttaacccaaaaagaaaaaaataaatttttggggtggttcaaactttaaaaaaattgaaacccaaccctttaaaaagttaaggccacataaaaccttgggggaattccaaaaaagggacatgtttttcacaaagggggtggacaataaacccgggcaaacaaggttttttaaaagcagcaacaacagggggaaaaaaccccaaagccaaatggttttccccccctttaagtcatttaaaggaagcccccccaaaactggcccctttgggaaatgggaaaaccaaaaaaacccttgggggg

SEQ ID NO: 6686 - DNA, 2117 bp, Oryza sativa
  Clone ID: PAT_MRT4530_13352C.1
ctaattagcatcagtctcattgagtaaatcagcaaggaagaggtcctgactagaaatgtagccacaacgttcacatgttccttgctctggcatccttgttgttgtggagatcctaaaattctcacctgattttatgatgtccagtatagctctaggtctcatcctttccagatctttaataaattcgcgagcaaatccacggtatgcatttggtgaatatatgcatgagaatatatgggatattgcataataaggatatataacaatctccttctcataggtgtatttgaaaggcttgcatcttgggattggcccatcttcgccagtagttataaaggtacatctacttaaccgtgcaatatcaccacgtaatatattcaataacacagtttctgcaatgtcatcagcattatgtccagtcacaatcttgtcaacttttaagagagcagcacctcggtccagtgcctgacgtcgaaaaacaccacaaaaggtacaattattttttaggccaattgctttcacaatatcatccattgtccagccatagaggtccttataagaaattattttcaatggcaggccatactgcaataagtcggttgtatcagcaatttatttatttattctgacgggcagaagcccagttcttttatcgccgtgagcgatataacctgccttttattttttttttttttttttttggaggcctaaaaagttatttccattaatttaaaaagatccaggtgtattaaaccaacaatgacattttaacaaaatatctcggcagaagcctttgaggctttgagcaaaaaaactgataatatctaaaagtcgatgtttccatgttttccttgcagactcgaccgtgcccctctccggacattatcacctgctgctcacagtcactatcacctccagacgctcctgggggtccttccaacgcccgctttgtgcgcccctggagttaatccgtccagcaggaggcattcttggcctactttctgcatagtagtttcgcgagagtggtctctgtagcctttaactccttcatccactgataagaggaaccaatcaagacaatatttgtgacgatgatttaactctgatagcacatatgcgagcacggttgaatctttaccaccagaagctccaatggccacacgatcaccaggtttaaacaaattattctcaacaatagtctgatggatctcatcctcaaagacaatgtagaagcattccctacatatctgctctagggttttgggacgcttgagggcagccttccgctcgccgcagcgtgtgcagaggcggcttcccgccctagccggaggttgtctcgggccatcgacagcagagtccatgggcaattgtgacggacaaaggattttgcagctggccgaggagaggaggaaggggactcgccggcgtcgccactcagctctcgcctcgtggccgccggagtgatgaggggctcgtcggaggtaagaagagcgggctcgccggagccggagccggagccgccgccgccgccgaagggaaaccgccccttgtcgtcgccgctgcgctcgccccgacgccacccgccgtgtgctgcccttctcccatcggttgtcgtcctcaagatggggaagagaggaagagaggagggcgtcagcatcggcaggggcaaggagttggcgccgccacagcagggcatcggcggcgcaagagcaggtgctccagtctcgcgggcacgcggcgtaagggcgggaggcgtagaccggagccccgagctgcgaggtggtcagcccctgagccccctccccttccccccatctgtggcaccgtcgacagcaacgcacgcgcacgtcgccgccgtcgcccgacgcacgcgccgctgccttctccccaatctgcgccgccgcgccactgcctttacccccatctgcatcatcgccgccaaccaacgcatgcgcacgccgccgccgccgccgcccgacgcccacgcgcgccgctgccttctctcccatctgcaccgccatgctggaggacgaggaagacgacagcaacaaggacaacaggaaggagggggccatggaggtcgagaagtccgtgaagccgacgagcatgcccgccat

SEQ ID NO: 6687 - DNA, 599 bp, Oryza sativa
  Clone ID: PAT_MRT4530_13353C.1
ccctgcaggtccccgttcccggaattcccggttctacccacgcgtccctaaattataagagcctctattgtatcttttactccctccatcccaaatataaggctcaaccactcataacacaaagaccaagaaaatatttaatcacattcttggtttggatcacctcgatgcatgaaagcaaggaagatgtgccccagcccgaaccgctgcccctcaaattcttcctgccccagcccaaaccgctgcccctaaaattcgagatttattaaggctaatctatttgttccactgcggaggaagacgtaccgccaccgccaccgcgaggaagtccggttgatgtgccgcgcgagcctccagccccagcccgaaccgctgcccctcggatagcttggttactgctgtaatgtgaattgctttatcgagaatgtacttggaatgtgaattgctttctccaggatgtgagattgtcaattgcttgtgagaatgtgtgtgtatatatagatatatatgtcatttttctcttttttttagctaatttcatttaaacaacagtcccttttgaatgtggcgtgtattttatctctaaaaaaaaaaaaaaa

SEQ ID NO: 6688 - DNA, 733 bp, Oryza sativa
  unsure (1)..(733): unsure at all n locations
  Clone ID: PAT_MRT4530_13354C.1
cgaccacgcgtccgggcnnngtcagggctgacccccgaacggctgccggactgctctactgatcttctctctcttcagactcgctgaaccttctcaaagactccttttgtactgagaacacaattcaccttctcacaagaaggcaaaccttgtacgttgatcgaatcttctttcgcatccagaagagaggctgtgggctgggcgagagagtggttcaggtgactaccggagtcattgattaagcaggtcagatgggcttagtagggctcgaacctacaatatcaccgttatgagcggtacgtttcaaccaattaaactataagcccaatcggatctctacatgccgggaagagcggacagaaagaggagacctttgctctatctccttcttcctcttcccggggccccagaggggttctttggcaagccctattaaagaagctaagtgacgaaagtcactcaagtagtgagtttgagagtgaccgttagggcgaccacttgtacttataggccttggcgacctatagtcttgttacgcaacacagcttcactcgattcagtaaatcaatagttcaaaccagcccactaatagcttagatagtggcccttccactttggtatagttgaccctacctattgactcaaggtaagacctctgactcaagggtcataggaagggggaacccagacgtagtgggatgtaggcttcagttgttttggtactttttcacta

SEQ ID NO: 6689 - DNA, 303 bp, Oryza sativa
  Clone ID: PAT_MRT4530_13355C.1
cccacgcgtacctcatgacgtgactacacttgcgtgtacagctctttcttcgtcttggtggtgaactcaacactgctccggacatggcaactgtgctgaacaacgtgtacgtcagctcagcagattgtgctgaagatctgctatgagatcgacgacctctgttcacaggctgtgcatgctcctactgaccgaaagaacttccaaatgtggttatctaacctaggagagatctacgctgccttctacaacatccttcattctcgactacaccatatcatggcatgtggggcacgcacagtctgt

SEQ ID NO: 6690 - DNA, 636 bp, Oryza sativa
  Clone ID: PAT_MRT4530_13356C.1
atggtgacggggagaagggccggcgcggtgagcacggtttgtggccggtgggggaggggtgcagccagcaacgggtgggaagaaccagatgtggcagtggccggcaatggccctcgctggcaacgggcggggagaagactagcggagaggtgttacacagtgcaacagcgtcaccgagctcaaccggtcagggggacggggaagctaggtgtccggattgccaatgaaggagatagagcgggagcacgggacagggaggacgcccgccactgcggacgacgccgcatcgtcgacaccatctcacccatcaccccgtcgagcatggtgcaagtctcctccgccactgccgcatcgtccattccgccacgaagcatgtccacaatcctgcacctggcattccagacctcagtgcgggaggagaggccctgcgacagagggctagacgtaggtagtgtggaggccgccggagagctagtgaaggaagccgttagagggccagagggagttggcagtggaggcgcatatcctgtcaacgtgattgtggccatggccagctgccagaggaggagcagtgtcacatgggccgccgcaatttggaggaaaggagtaagggatttgggaggaagagaggtgtag

SEQ ID NO: 6691 - DNA, 378 bp, Oryza sativa
  Clone ID: PAT_MRT4530_13357C.1
atggccacaatcacgttgacaggatatgctgctcaagctactgccgctgaccagggcctctcctcccgcactgaggtctggaatgccaggtgcaggattgtggacatgcttcgtggcggaatggacgatgcggcagtggcggaggagacttgcaccatgctcgacggggtgatgggtgagatggtgtcgacgatgctaaggatggtggccacaaccgacctcgcgcgggacgtcgcccgcctgaggaggcacgactcggagcgagtctgcgccctcgctaccggcgtcgtccgcagtggcgggcgtcctccctgtcccgtgctcccgctctatctccttcattggcaatccggacacctagcttccccgtccccctga

SEQ ID NO: 6692 - DNA, 468 bp, Oryza sativa
  Clone ID: PAT_MRT4530_13358C.1
atgggaggggaggcggcgagctcccgcggccagcggctgcctgaggcagtggcgccggcggcggctgcgccctcccctccgccagatccagcgggaggggaggcggcgagctcccgcggcgggcggctgcctgaggcagctgcggcggcggttgcgccatcccctccgccaaatccggcgggaggggaggcggcgagctcccgcggctggcggctccctgaggcagcggcggcggctgctgcgccctcccctccgccagatcttgcggaaggggaggcggcgagctcccgcgggcggcggaggcagctgcagcgcaccacagcggcgacagcggccgtgccacagcggcggatctcaaggggaaggaggccggaggcaacccaagggagaaggacgaaggatgaactgcgatattggaaaggttggaagggggcaaagaggttttgtgagtggtggtgccacaagtag

SEQ ID NO: 6693 - DNA, 558 bp, Oryza sativa
  Clone ID: PAT_MRT4530_13359C.1
gtggtttttttttttttttttttttttttttttttttttttttttttttgccccatagaacaattcacattcaatatgtcataaaaaaaactctgcactatgagaaatgccatagccacatcggatacaaacaagtcacattgttaaaaagattaacatattctgggttaacttcaggcctgaaagaactaagagcaaagagaaagggccttaactagtttctagtccattctctttgcatcgggctgatagcctgatatgtacctaaagtataaggatcagcatcgatccctagtccatgtagtgcggggttgtttggacaaaaagctcctcatcttcgtcatcatcgtcatcttcatcagcacctacccaattgcttgggtgatgctgtgatcgaggattatcactgacaacatcaggaggctcttccaagggatccatttgcataggctgcattgtatcgtttgcattatcagcgactggtggcttgtagcgagcatttacactatgcagcattgatgtgtcattcaatgcattaaaattggccggacccctggg

SEQ ID NO: 6694 - DNA, 1032 bp, Oryza sativa
  Clone ID: PAT_MRT4530_1335C.1
atggagcctcctcaactcgacggccagtgcgggggcgagccaccggcatccgtggagggagtcgtgttcatgccgtacgccaccgcggactcctcgctgcgcgtcatggccgacgacggggacgggtcgctccgggagggttgccggaggcgcgagccgctatggatcgtcttcgacgtgtcgggcaccatccacctctcgacgggactgcgcgtgtcgtcgtacaagaccatcgacggccgcgggcagcgtgtgacactgtccggcaaggggctccagctgcgggagtgcgagcatgtgatcgtctgcaacctggaggtggaagggtgccgcggccacgacgccgacgccgtggcggtgaagcccgggtcgcggcacgtgtggatcgaccggtgcggcctccgcggctgcggcgacggcctcctcgacgtcacccggggcagcacggacgtgaccgtgtccaggtgccgcttctcggcgcacgacaaggccgtgctgatcggcggcagcgccggccacgtcgaggaccgtgccatccgggtgaccatccaccactgcctcttcgacggcacgcggcagaggcacccgcgcgtccgcttcggcagggtgcacctctacaacaactacaccaggggctggggcatttacgctgtctgcgccagtgtcgagtcacagattgtatcccagtgcaacatttacgaggcaggggagaagaagaaagtcttcaagtacatgatagaacaggcggcagacagagaccagagttcaactgggttcatccggtctgaaggcgacctgttcctgaacggtgcagaggagtgcactgctcaggattcagaagctgcggcagatgagctgtgggacttcaagattcaggaattggatttctaccagtcttgttccgttcagccggcgtcaatggcgctcaaggagctactggagtgcttcaccggctggcagccagttccgctgccggaagacacttgcctcgaagaggaaactgattctgctcctgctgacactactgcttga

SEQ ID NO: 6695 - DNA, 562 bp, Oryza sativa
  Clone ID: PAT_MRT4530_13360C.1
ttcatagtgaacctttgatcaaaatcaccacaatgcttgttattcctcattgatatgatcctactgtacccttgcttgtaccttttgaaacagtgtctctattggttaatttgcatgcgatctttgattatgctatacctttttttagtgtttaagcagtctaaaacaattcttcatgaaaatatgtgaactctgaaaagaccatatctaacctggatatgtatggtgtatcatgagcatgatttgtgttattctgtaggcagaccaggcttccaagtaccagcgcttcattacctagaaaacatctccccagatttgctacttttaaataaagagtatgcttggcatattggagggtgggttttcacaacaggaggtgcaagaatggaggcttctatatcacagttctcttcatggacaaagctttaacactttcttaggcaatgtaacgtgagtactcttaaatattggtgattccaactactctgtttgattaataatacccatttcaagactatctaattctaaataaaactacacctacaaactaaatgtcatgata

SEQ ID NO: 6696 - DNA, 146 bp, Oryza sativa
  Clone ID: PAT_MRT4530_13361C.1
atgcaaaagtcgggcggcgaccgtccagtcgaggatgtagtagtggccaaggacggcgggcggacaggcattagcgatgaggcagcagaagcgcgtgcaggcgaaggtgacgaggtgatgaagcggaggaggacgcactataggag

SEQ ID NO: 6697 - DNA, 606 bp, Oryza sativa
  Clone ID: PAT_MRT4530_13362C.1
atggagaaggagtggtccacgtacgccacgcatggctaccctcgcctcctcctctacatctgcctgtcagtgccggatccgatctatgaactactcttccccacctcctccttcctcgctcgcagcctcgacggcgccacctccaccatcgataccgctggcggcgggagaaggaggcatacctccgcgtcgaacagggcgtactcgccgccaaaccatctccgccggaggttgaggaggaagaggcaggcgaggttcggcggcggcggtgggccggcgagggtggagtggccgagggcgagggcaaagcggatgcgaccagtgacgcgcggaggagcgccggcgccagccagcggtgcgcccggacagcagcgcaggctggacaacaggcgaggttcgccgctggcaactgcctgcgaaggaccggtggcacagctggacggtgacggctgcaacgcgtcgagtgaggagggaagggagccgtcggtggccggcgccgctgtccgggcgcaccgcttgccggagccgtcactctcccgtcatcgcagccgctccgtcctcgccctcccaccaccaccgccagacctcccctgcctgccgtcatag

SEQ ID NO: 6698 - DNA, 1208 bp, Oryza sativa
  Clone ID: PAT_MRT4530_13363C.1
tttttttttttttttttttatggaaccctcgcttatccatacaaacacacttgcaaatatcagctgatataggaaatagctgcgagttcagttattctcgtccaagcaaaaatagtacagcttaagttcaggacacaggatatgcgcaaaccaaaagtactatttcaagagacatactgatcgaacattcatgaaaagtatgtaacgcttgcagggagtaacaaaattaatttggccttggtgttgcccactcaacacgaaggataaggttatcataaccataaccattgagcttgctgatagccttctcagcgtcctctctgtgaacaaagttgacgaagccgaaccccctgcttgctccagtcttctgatccaccgcaacgtagacacggctaactggaccaaatgtgcggaatagctcaagtaggtcgggttcacgggtgtcctctgatagattggtcacacggacagagttctcatcattcctacgcctcatgtcatgtccaaccctatcaacagcaccagacctcatgcttggaggaacatatgctcccttcacggcgccacctggaggtccagagccatcagcagtgggaggcctgtccacaaaagcttctgtctggggagctagatccttgtaggggcactttgaggtccagtgatcacccttcttcccacaggttctgcaaaccatgagaactgcaccactcttgcttgccagtggatcaccagaagcacttggttcttcagctttgctccctggggcgcgtgggcgctcaaggacgatctcctcggtggacaccatggtgagccgcgcgccgacgtcctcctgcacggcgtcgccgaacttgggccacgagcggcgctcgatggcgctcttggagaggcgggcgcgggcgatcttgcggacgcggaaggtcctggtgaccttcaccttgttccccttgtcgtcgaagcgatactcgaccaccttcttgaacccattctcgtcgggcccggagaccacgcgcggcgggagcaggaagtcgaggtccccctcgtcgtcctcctcgagctctccccacctgatcttctgcgtcgccacctccacggccatggcgctctctcctctctccgctgcgttcgctagggtttgcgggggcggcggcgtgggagggagagagtggggaagaagacctcggcgtaggaatggaggcggaacgagcggc

SEQ ID NO: 6699 - DNA, 333 bp, Oryza sativa
  Clone ID: PAT_MRT4530_13364C.1
atgcccgggggaggggtcgtcgacggcatctgcagatggctccgccgccacggccgcaccgcctccgcctaccagccccaccccagcggcgacggtgggctcgaggtggtcccgggccccttcacgctccccgcgcgcacctcgccactgccgccgccgtccgacggccagctcaagaaggagtcccttcgttttgggacagagagtaacatctcaatctcatattataatttgttgctgcatggcattactgtctatatcgtattcaaattaaataaaacttctaaaaagcacttatacaaagtaggtatcttaggtcaagattttgtttag

SEQ ID NO: 6700 - DNA, 490 bp, Oryza sativa
  Clone ID: PAT_MRT4530_13365C.1
agaccatatccatccctactctaccacaggagtatctcttgctttgttgttctagcggacctgccacacgcgaagaagaggaaatggcctcctcctccgcctccttatccttgctgctgtgagggggccatctttgcattgaaggagagacccgccggcccctcgtgttgtaggacaagaacggcgggcgtaaaagaccattccggctgacggttgagaggagaaggaacgtgagaaagaagagatactacgcacgacgagcgtccatgtaacgaaactaccctaggctacaagaatgcggaccgtcggccagccgtgaggagaaaagaacgtccagtctggtagatactccaactgccctccgaaaacataatgatattccttcacatgtctttgaccaaagagtaggaagtggctgaaaccccacatttgcagtggagccataaactctaaccttgaccggatgttgacccaagctatatgcttatgc

SEQ ID NO: 6701 - DNA, 1539 bp, Oryza sativa
  Clone ID: PAT_MRT4530_13366C.1
atggaggtatcactgccattgctgatcggcgtcgtcctcgccttcctcctgctcttcgtcctcgtcaacatcaagaactcatgccgctcctggtggcctccgccggagaaggagaagaagaagctgcggctgccgccggggccgtggcagctgccgctcgtcgggagcctgcaccacgtcctgctgtcgcgccacgccgacctgccacacagggcgctgcgcgagctcgccggcaagtacggcccgctcatgatgctccgcttcggtgccgtgccgacgctcgtcgtgtcgtcggccgaggccgccagggaggtgctcaagacgtacgacgccgccttcgccagccgytacctcacgccgaccctggccgtcctcagccgcggcggccgcgacatcctcttctccccctactgcgacctgtggcgccagctccggaggatctgcgtgcacgagctcctcagcgcgcgccgcgtccagtcgctccgccacgggcgcgaggacgaggcggcgcgcctcgtccgctccgtcgccgccgagtgcgccgcccgcggcggcgcagccgttgtcaacgtcggcgagctgatctcccgcgcggtgaacgactccgtcgtgcgatccgccgtcggcgcccggtcggcgcggcgcgacgagttcgtgcgcgagctcgacgagtcggtgaggctctccggcgggttcaacctggccgacctgtacccgtcgtcgtggctggcgcgccggctcagcggcgcgatgcgggagacggagcggtgcaatcggagcttgatggccatcatggacgacatcatccgggagcacggcgacggcgaggaagacctcctcggcgtactcctcagattgcagaggaacggcgatgtgcagtgtcccctcaccaccgatttgatcactaacgtcgtcttggacatgtttgcggctgggagtgaaacctcgtctacgacacttgagtgggccttaacagagctagtaaggaacccacacatcatggaaaaggcccaatcagaggtgcgggagatatttaggggagaaaacaagctaacagaggaaatgatggacaagctaagctacctccgcttggtgattcgggaaacactccgactacatttaccggtaccattccttcttcctaggcagtgccgtgagccatgctcggttatgggctatgacataccagtgggaactaaagtgcttgtgaacgcttgggccatagctagggacaatcagtattgggatgatcccgaggtattcaaaccagaaaggttcgagaacaatcgtgtcgactttaagggtatagatttcgagttcattcctttcggtgctgggaggaggatatgccctgggattgcacttgggcttgccaatatagagctcatgcttgccagcctcctataccattttgactgggagttcctcgatcgagacaggaatgacgagattgacttgtccgagacatttggtatcactgcaaagaggaagtcgaagctcatggtgtatgctacacaacgtattccatgtttgggttaa

SEQ ID NO: 6702 - DNA, 1149 bp, Oryza sativa
  Clone ID: PAT_MRT4530_13367C.1
atggggcggctgcgcgcgtgcacccgcctccgtcgcctcctcgcgacgaggcctcctcatccggctccgccgccgccgccgccgaggacgacgacgacgggccagactctcccgtgcttctccgctagggccttctcgtcggcctcggcggtcgccgtcgcggtgccgcacgaggcgcgcgactccggcctcgggagctcggcctactgggcctggatccgggcggcggccgagtcggccccggccccgcctccgcagcaagaggaggaggatgagggcctcgcgcgctgcatccccgtcaaggcgtacttcctctccaccagcattgatttgaagagtttgcaggcggaccatgggagcgacgtggtacctccgtcgacccgatcattgaactacattgcactccgatactcagaattccctcaagaaatcatggacattggagttaaggacaacagattttgctatcgctatgtggttgtgttccaatatggttcggctgtgcttttcaacattgctgaccatgaggctgagcactatcttgatatcatcaggaaacatgcttcaggatggcttccggagatgagaaaagatgattatgcagtagttgagaagccctccctgacaacatggatgaaaggaggtcttgactatatagttcttaaaagcctagatacagatggaattcgcatcattgcaagtgttcttggccaaagtattgctcttgatcattacatacggcaggtcgatgacatggttgaggaatttactgaaattaatcgtgtcatggagaagactgggaactttaccatgcaaagaaagaagctgttccaacttgttggcaaggctaattctaaccttgctgatgttatcatcagacttggcctttttgacaggtctgaaatcgcttggaaaaattcaaattatgctcaaatacttgagtatcttcgggaagaatatgagctgaaccaacgttttggaagcctcgacttcaaattgaaatttgtggagcacaacattcattttcttcaagaagttctccagaatagaagatcagatttgctggagtggggtgtcattatactgctgattatcgagattgtcatctcattatacgaaattatcaaggattccagcatgatgtcctga

SEQ ID NO: 6703 - DNA, 3024 bp, Oryza sativa
  Clone ID: PAT_MRT4530_13368C.1
atgccaccgccctcccttctcctccctcctctcctcctcctcctcggcctccatgccgccgccgccgccgtctccgaggtgtcggccctcatggccttcaagaacgccctcaccatccctcccaccgccgccgccttcttcgcccggtgggacgccgccgcggcttccccctgcaacttcaccggcgtcgactgcgccaattccggcggcggcggcgtcaccgccgtcgccgtggagggcttgggcgtggccgcaacgtccgtcccgttcgacgttctgtgcggctcgctgccgtcgctcgcgaagctctccctgccgtcgaacgcgctcgccggggggatcggcggcgtcgcggggtgcaccgccctcgaggtgctcgacctcgcgttcaatggcttctccggccacgtcccggacctctcgccgctgacgaggctgcagaggctcaacgtgtcgcagaacagcttcaccggcgccttcccatggcgcgcgctggcgtccatgccgggtctcaccgtgctcgccgccggcgacaatgggttcttcgagaagacggagacgttccccgacgagatcaccgcgctcaccaacctcaccgtgctctacctctccgcggccaacatcggcggcgtcatccctcccggcatcggcaacctcgccaagctcgtcgacctcgagctctccgacaacgcgctcaccggcgagataccgccggagatcaccaagctcaccaacctcctgcagctcgagctgtacaacaactcgctccacggcgagctcccggcggggttcgggaacctgacgaagctccagttcttcgacgcgtccatgaaccacctcaccggcagcctctccgagctccggtcgctcacccagctcgtgtcgctgcagctgttctacaatggcttcaccggcgacgtgccgccggagttcggcgagttcaaggagctcgtgaacctgtccctgtacaacaacaacctcaccggcgagctgccgcgggatctcggcagctgggcggagttcaacttcatcgacgtgtccaccaacgcgctgtccggcccgatcccgccgttcatgtgcaagcgcggcaagatgaccaggctgctcatgctggagaacaacttctccggccagattccggccacctacgcaaactgcacgacgctggtgaggttcagggtgagcaagaactccatgtccggcgacgtccccgacgggttgtgggcgctccccaacgtcgacatcattgacctcgccaacaaccagttcaccggggggatcggcgacggcatcgggagagccgccttgctgagcagcctcgacctggccgggaacaggttctccggcgcgatcccgccgtcgatcggcgacgccagcaacctcgagacaattgacatttcgtcgaacgggttgtcgggcaaaattccggcgagcatcgggaggctggcacgtctcggcagcttgaacattgctaggaatgggatcaccggggccatcccggcgagcatcggcgagtgctcgtcgcttagtacggtcaatttcaccgggaacaagctcgccggcgcgatcccgtcggagctggggaccctgccgcggcttaattctttggacttgtccgggaatgacctctccggtgccgtgccggcgagcctcgccgctctgaagctgagctccctgaacatgtccgacaacaagctcgtcgggcccgtgccggagccgctctccatcgcggcctacggcgagagcttcaaggggaaccccgggctgtgcgccaccaacggagtggacttcctccgccgctgctcgccgggatcaggaggccactccgcggccaccgcgcgcaccgtggtcacctgcctcctcgccggcctcgccgtagtgctcgcggcgctcggcgcggtgatgtacatcaagaagcggcggcgcgcggaggcggaggcggaggaggcggccggcggcaaggtgttcggcaagaaggggtcgtgggacctcaagtcgttcagggtcctggcgttcgacgagcacgaggtgatcgacggtgtccgcgacgagaacctcatcggcagcggcgggtccgggaacgtgtaccgcgtgaagctcgggagcggcgcggtggtcgcggtgaagcacatcacccggacacgcgcggcggcggcggcggcgaggagcacggcggcgtcggccgccatgctccgttcgccgtcggcggcgcggcgcacggcgtcggtgcggtgccgcgagttcgactcggaggtggggacgctgagctcgatccggcacgtgaacgtggtgaagctcctgtgcagcatcaccagcgacgacggcgcggcgagcctgctggtgtacgagcacctccccaatggcagcctctacgagcgcctgcacgaggggcaaaagctcggcggccgcggcggcctcgggtggccggagcgctacgacatcgccgtcggcgccgcccgtgggctggagtacctccaccacggctgcgaccgccccatcctccaccgtgacgtcaagtccagcaacatcctcctcgacgagtccttcaagccgcgcatcgccgacttcggcctcgccaagatcctcgacggcgccgccgccacgccggacaccaccagcgcgggcgtggtggccggcacgctcgggtacatggcgcccgagtactcctacacgtggaaggtgacggagaagagcgacgtgtacagcttcggcgtggtgctgcttgagctggtgacggggcggacggcgatcatggcggagtacggggagagtagggacatcgtggagtgggtgtctcgccggttagatagccgagacaaggtgatgtccctcctcgacgccagcatcggcgaggaatgggagaaggaggaggccgtcagggtgcttcgcgtcgccgtggtgtgcaccagcaggacgccgtcgatgaggccgtcgatgcgctccgtcgtgcagatgctcgaggcggcggcgatcggccgggagttcgccgtggtcacttcggtgaaggtcaaggtgatcccctag

SEQ ID NO: 6704 - DNA, 1711 bp, Oryza sativa
  Clone ID: PAT_MRT4530_13369C.1
tttacgtttatgtgatgaacaataacttcattcattttcacagcatacaaaaatatgatcatgtatctcctgcatattacacaaggaaaaataaattgccctaggtagatattaactgcaggagaagagtttaagtttgggattgctctataaaattacaatgcaatgcatgacactctgtccaagcttgcttgaagtccctcgaagataatagcgcaaggaaaaggggaaatgaccagagggagatgtatacaaagcatcgctatctcatagacgagccacatatgagttagcctgcgttacgtatctcacccacctataggggttgtatgtcttggatttctttgctatctgaagatatctaacctgcaactttgaagtattgtacatcggtatagtgaaattcatgtttactggtccagcttcctttgtgagatttcctgcattccagaagaagcgtgacataagttttataacagagaagtcacttggagcatagacaagaaagctgcaatccaaaattataccatgtgactcctgggaaaatgtgagctttgcccgaagggtgtgctcagaaccaccaacgatcctagatggcccggcttcttcaattagtgcggtcacacggaaaggtggcttaaattcttgagtaatccggtagttcattacagcgaattccccatccggtggtattaaatgtagagttctgtcaatgtcaaaactatccagatgtactgactcgtggaaattgcaatcatcaagaatgacagctcctcctccagaagaacttctgtaatcatacgaagaagagccagttcttcctatgctcaaatcctcatttagagctagacgaatttctggatttccagtaaggtaacttttcatttggatggttccatcaatctcagatgtaagtatgtaaccacttgaactaaatgtcacacttattctctcaatgatatcaacaaaaatttcctccctcttcttcccaccaggttcggtagcaacaacagattttgtaacagctgtaccaggcatacgcttagtgccttgcatgaacatagcagcaggaccaagtggaggcagccgaccagcatcaaccattattggctcattgaatatgtatgacttcagaacctcggtagaggtggtttgtggatatccaaagtcaatgacttcatcgagcaattcatacactaaaatgaaattcttccgcaatgaatcttcatttagaacgccaaggtaatcttttgtaacacgtgcaatcctttgcaagagttccaagaggagggacggagagacattaaccattgtagttaccacaaaaaatagtcctgcgactttcacatggatataattaacgccatcaacattgaagaccggcggcgcctcctcggcctcgtcgtcgttccagaacttcaccttccggaagaagatctcggcgctgcccttgggcacctccccgcgatagtcgcggaagacgatgtggtcgccgcgctgcgacagcacgaagaactgcgagatcatctccaccccccaccaccgcgatgccaccaccccctcgctcccagcccaataccttgcttctcaggcctcgcgcgcgcgcgcgtacgcccgtggcctggctgtgacgtgacgtgacgtaaccgctgcggcgacgagcaggagagcaagtgaggaggaaggcgactgccggccgcggatccactag

SEQ ID NO: 6705 - DNA, 114 bp, Oryza sativa
  Clone ID: PAT_MRT4530_1336C.1
cttctttcggtggtaacatgagtaagcttctgacatgtctcatcatttcttcctcagcctaagaacagcttgcccctaaagctatcacatcatcgtcccccaatacattccaca

SEQ ID NO: 6706 - DNA, 459 bp, Oryza sativa
  Clone ID: PAT_MRT4530_13370C.1
aacctgggcattaaaacatatttcacaatatcgaagaattcatggttttagtttacaagtcacaagtgactgggaagccatcaaaagtcatatacaaagtaagatgggatacctggactgcaaaatgccacgcaacaaaaaaatcagtaccagtttactaattttggttcactggcacgaaggagcatctatacaggatattctccacttctccatgtgaaaatttccatctcggacaagatagcaaaaatgtgtgttatggaccaatgcccccagtataggcaacgacttcaggacttcctctcctttgctgaatgcaaattacagataaagctcaagtttgtccctctgagtggtcagcagcaatggtgaggcgctcactttctagaaatgaaggatccagaaacttggcgacaaatgcccacatattgtacacgtcttcaaaattagtaaggaagc

SEQ ID NO: 6707 - DNA, 336 bp, Oryza sativa
  Clone ID: PAT_MRT4530_13371C.1
atggcgctgcgggaggcgtcagcgagggcggagacaaagagcccggcgccggcggcgacgacgagttgttgctcgccggaggtggcgccgccgtctgccggcggcggcgacgacggcgacgacatcgccaccactcactcactcactcacgcactaccaccaccaccaccaccacaacaacaacaacaacaaaaagaacgagtcgaagactaccacgccacgagcaagatgagagcaagaacaaagcggagccaagaaaagagcaggcaagagctttttctccctcgcggcggtggtgatggtggtggtggggaattggagcggattgcgacctga

SEQ ID NO: 6708 - DNA, 2187 bp, Oryza sativa
  Clone ID: PAT_MRT4530_13372C.1
tcgtgaaaagaagcagtgaattgcagccaccgagaaccagcgaactatatatatctcaaccaaacaatttcggttcgttgcaaacaatgtcagcaacttatgagaattttcagccaaggctgggactttacaagctacggtagttgcaatgtcctaaaaaaacaaggaagatgaggttatcttcttgaagcttggctgtctctggtgccattgctgtcgccatctttcttcaaactccccatctccatctccgtctccggtatttgacgcgcatcccccattgatacggatcgattcgggacgaactcggtgggctgcgtttgctggctgctctctagattgccactgccaaatgccatcttcctgaatttcttcaggtcttcattgtaatggcccgtgtcgtactcgttgctgttgtatgatcccaagaatcggctatggccaggacgaacaccttcgttcagatcatccaatgacacatcgccttccaaggcccgaacaacctggctcatccgtgggcgtcggcgtgcagaatggcgtacacaagcagctgcacaagcaatcatcctcgccatctcgttaccattgtactcctgtcctagccgtggatccactaaagcatcataattgccatcatctgatgctcgcatcattaaaggccttgcccaatcaaccaagctgtcatccatctgtgattggttcgatctcacaggacggcggccagttattagctcaagaagcattactccgaaagaaaagacatctgatttctcagttagctggccagaagacgcatactctggtgcaaggtacccaaatgtgcccattactctggttgaaacatgagtgttattatcagaagtcaattttgcaagtccgaaatctgccacctttgcctcaaatctcgcgtcaagaagaatatttgctgactttatgtcacggtgaatgatcttaggatggcaatcttcatgaagatatgccaatcccttcgcagcacccaaagcaatgcgtaatcttgtaggccattccatggttggtcggcctctcccatgcaagtggagctccaatgtgttgtttggaacatactcatagacaagcaacctcttccctccagaaatgcaataaccaaccaatgttacaagatgcttgtgatgtacccggctgataatctcaacctccgcctgaaattcacgctctccctgcccactcccatctctcaattgcttcacagcaacctctgtcccattcggcagaactcctttgtgaacatacccaaaaccgccctgtccgagcagattagcatcggagaatccatcggtcgccgctgacaagtcctcataagtgaaagtacaccttgaaaaacccaatgcagcaccaggtgacactagaggttggctgttgtcgccaccggagtaatttgagccagaaccaccactgtgtacatttagtggagcaggaggtggtggaggggaaggatgcgaaggcaccttcttcagcacatgatcaggtggaggtggaggaccattttgctgccaattttggtacaccccaccatagtgatcccctttgaacggcggcgggggcggcggcggcggcggcgggtggccgtagtagtgcaggaggtgcggcggcggcggcggcggagggtggtggtggtggtgccgcttcttcttcttgaacaggcagacgagcaggatggtgacgagcagcagcacgacgaggccgcccaccacgatccccaccaccacgggcgtcgtcagccccgagctcgacgccgccgccgccgccgccggcgaggagggcgtggtcgacggaggcgatggcgctgcgggaggcgtcagcgagggcggagacaaagagcccggcgccggcggcgacgacgagttgttgctcgccggaggtggcgccgccgtctggttagccggaggcggtgtcgccgtctggttagccggcggcggcgacgacggcgacgacatcgccaccactcactcactcactcacgcactaccaccaccaccaccaccacaacaacaacaacaacaaaaagaacgagtcgaagactaccacgccacgagcaagatgagagcaagaacaaagcggagccaagaaaagagcaggcaagagctttttctccctcgcggcggtggtgatggtggtggtggggaattggagcggattgcgacctga

SEQ ID NO: 6709 - DNA, 388 bp, Oryza sativa
  unsure (1)..(388): unsure at all n locations
  Clone ID: PAT_MRT4530_13373C.1
aaagggaaaaaaaaatctncagcctcgcagcgcctaantcctaacgaacgcaacggacggcaccggggcactctccgccactactcgccttcntcgtcgtcgtcgtcttcgcgggctcggcggcgaaccggaggcggcgggttggggttgggaggaggaggagggggttcggcgatggggaggatctcgaggctgctcctgctgctggcggcggcggtggtgctggtgatcgcaacgggagtngcggcgcaggaggaggcggcggaggcggtggtggaggtggaggaggggatcgtggagagggccaaggaggaggcggaggcggtggcgctcaaggcggacttgcagcancttaaggataagatctccggcctagaatcaggaatct

SEQ ID NO: 6710 - DNA, 368 bp, Oryza sativa
  unsure (1)..(368): unsure at all n locations
  Clone ID: PAT_MRT4530_13374C.1
gctgggggaaggagaacagggaggctccactgagaactgcatgcccacctgggatacctcttgatctcgtcagcaacttcgaaattaaatccttcgatgcgtgcgcaaacccgcacttgggccttgctgctatagttgctgctgggattgatggactcaggagaagccttacgttgcctgaaccaactgaatcaaaccctgcaggttatgcctccaactccaagctcaaaaggatgccgaaggacttgatggaatctgtcgaagcactagctgcagacaaaatcatgcatgnaatgatcggcgataaacttgtcactgccgttattgtgtacgaaaggcttgagacgatcactacgagaagaaccctg

SEQ ID NO: 6711 - DNA, 126 bp, Oryza sativa
  Clone ID: PAT_MRT4530_13375C.1
cctgccggacgagcgcgaagataaaagcatggaaggatttttttaacagtcgccgagagctacctcgatacagaagtaaggtgagtacttgacaacctaaaccatgcaacccatgagaaatttctc

SEQ ID NO: 6712 - DNA, 462 bp, Oryza sativa
  Clone ID: PAT_MRT4530_13376C.1
cttaacaagactaagcacagggggatcagcaagggtaccacgggaaaacttgacgcacgcccactccctcagaggctgaacaggcagaggccaagcctcctcccgacagacgggtccatgattcgaaagacccctcactcggggtaagacgggactgctcaaaccctagccaattaccacacgcatgctcgatccttgcttgggacaaccccgtggcacttgcccagccaccagtacagggaagctcgcttgatcacactgtgccggatgccagcacggaacttgccccagcgccggcgagcgccacggtttccagcacgccgaggatcagctctgaagcccatgccacatctcccagccggcgggccggactcgacgccaaggacactgcgcccctggctaacgaacccgaaggatacgctctcggtgaaaggcctcctcagcggttcgcactgcttgacc

SEQ ID NO: 6713 - DNA, 546 bp, Oryza sativa
  Clone ID: PAT_MRT4530_13377C.1
atggcgaccgtgaagctgccgatgtggaccaacccagagaccatcaccaaggtcgtcatggtgttctacatccaagacatcgtgttcttggaagggaagctgtacgccgtcaccgaagcggaggagatcttcgccttcgacgacgcggacatcgagcactactcgcacttgcccagcgaccagtggcggtggacgcatgtcgacaagcaggcgccggcgtttggccgcaccgagttctacctggttgcctgccacacgatggggaaggttctagtagtttccagagacttcggcagagcccgcgtccccgacaccggtggcggccgcgccgcggcgcgctaccacacatctagattcaaggtcgggtcgtcggtgcaggaggcgaagcagatggcggcatgggaggccgtcacgttcctacggagccgattccggagcgtgctcgacgacagcccgtggagctcaataccacattatcatagccacgtaagtgagatagagtacgacgaagattttgacgacgacttcgactacgctgatctctga

SEQ ID NO: 6714 - DNA, 633 bp, Oryza sativa
  Clone ID: PAT_MRT4530_13378C.1
ttgatgatgatgatgataaggatgatattgatgattatgataataaagatgaaaccgggggatattccccaggatgcatgggaagatgttgatcccagatgaatattcttatgaggagctggttgcattgggtgaagtagttggtacggaaagcaaaggcctctctcttgatacacttgcttcattaccttcaaaaacttatcgagcacaagataagcaagacggcaacatggaacaatgtgttatttgccgtgtggaatttgaggaaggtgaatcattggttgcacttccttgcaagcattcataccattctgaatgcataaaccaatggctgcaattaaataaggtatgccctatgtgcagtgctgaagttcctacttcacaggacacccgggcatgacatcactacatattgtagccattatgggcgtataatttaaaagaagtagcggcagcttgatactttctgtcatcggtgaaatggaagcatcaggagctggtggattgttcaggtctctgtacttgtgtgcttcctttgccatgccgctacattgggtcgtggttaagacgctcattgtcgcccatgtatgatttgattagatgtgaaatagttattacatggttgcatcattc

SEQ ID NO: 6715 - DNA, 315 bp, Oryza sativa
  Clone ID: PAT_MRT4530_13379C.1
atgggggcacggccgcccgttcaatcggacgtgactggcaacaggccggtcacagactggtcacatccgattgacagggcctgggtccccttctcacactctccccctgccacgtggcagctgggcgtgggcctcggggggaagcagcggaagagcccgagggggctcgcgctcatggccgtcgcgcaccccacctcaagtgtgccgctgtcaggcgcactaaaggcgggacgcggatacaacgggcgatgtgatgagtgggcgcggcaaacgaagagacaactgtgggcgcgaggatcgtgggggaaattatga

SEQ ID NO: 6716 - DNA, 477 bp, Oryza sativa
  Clone ID: PAT_MRT4530_1337C.1
ttaggtgacactatagaatactcaagcttgcatgcctgcaggtcgactctagaggatccccagatcgtcacaggttatggttgggtggagaggtagggcaagttcatactaaagattttcattaaatcccgccaacattaccctattttgctggcgggatatgaaccttaaaaggtttggttattaaaacatttcacctaaagaacctaaaagggggaaagtaataaggcggtcacacttaatgaccaataccgggggatattaatattcgatttacccagaatggggggctggcattttttatgataccggtttaatatcagataatttgatcatcgggcattacattctggtgcttgcgttggcgtgcgttggatttcaccaattggtgcgattaaatttgatattgcaacacctgttaaatcacttaataacaaacgtggtgtacaattttatattggcttaggttcagaatta

SEQ ID NO: 6717 - DNA, 322 bp, Oryza sativa
  Clone ID: PAT_MRT4530_13380C.1
gaaaaaggttattccatatattgcaagtcatttccgcagggataagatatggttgcgccgaactaaacctaataaacgtaattaccaagtggttattgctgtggacgactcacggagtatgtccgagggcaagtgtggaaaagtggctattgaagcattagttacagtctgccgggccatgtcacaacttgaggttggacagtttgcagttgcaagtttcgggaaaaagggaaatgtcaaagtgctacatgatttcgatcaggtcttcaatggagaagcaggaacgaatatgatttctagtttgtcctttgagcaagacaac

SEQ ID NO: 6718 - DNA, 384 bp, Oryza sativa
  Clone ID: PAT_MRT4530_13381C.1
gtgagaagttcattctgtcttgtcttagttgcaccatttgatttttactttgactttgatccgtaaatgggccctaagccattgccggtcctatgcgacaatagaatgccatccagaacaacgctgacacaagtgaaacacacgttgtcataaccctgacggtacagctgttgcggctgattgagacagctcaggctaggggatgaaagcggatgcctgcctgcagctgatacagtgctcggagcacccacaaggtctggttgttaccggtagcattgtatacccaggaccaacaatcttgatgggctaacagcgagctgaacgtcccaatactggagtgctcctgggttgatctgccggccaggctgtgacacacacctcctg

SEQ ID NO: 6719 - DNA, 686 bp, Oryza sativa
  Clone ID: PAT_MRT4530_13382C.1
aaaagaacatataccttgtaggtgtggctgattgatataactggtagcaggtattgttttctggtaccctatggtgcttatggtgagctgttcgtcacgcagctgagcgagctgttatgatgttcagggacaggcagtgtcatcagacaaggtcgcactgacagctcgcgctggacacgtgccgataggagctctaccggaagatcaccggacgtgagaggttccagacgatgtttcgccgactggacgcgctcgaactcgttatgcactgctggcactagatgctgtattacagccgcgagtgccgatgaccggtcatccgcctaatggtgaggagctacgaggagagtatgccgatgcctgtgtaccatggctgtgctctgaccatgcctgagttctacgatgaataggagtagaacattgaccaggtgttctacggagagggagcagatattgaggccttctaccgagagtagaaagcatatacgtctaagactaagaactaggctttccagaacaatggcactgcgctgatctcattgcacaggatgtgcacaaaatgatgcctagtataccttgattttctacagctgaacatgactaggcttagctttactgccttatatgtaggacgatcacaccgatgctgagctgtgtgcaacgagatagtgatccaaacaaatagt

SEQ ID NO: 6720 - DNA, 515 bp, Oryza sativa
  Clone ID: PAT_MRT4530_13383C.1
aggaattcggcacgagggcgagctctctctctctttctctcggcagctggttgccacgccttgccatggcgatggtggtggaggagctcgacgagttcgaggtgctgtggcctgacaccgacgccgccgacgacgacgcgccgccgccggcgatctcgcctgcgccgccggtgcagccatacgagacacgcgcgcccacgccgcgcgtcaagcactctcggccggtggacgtcccctgcaggggagcgcgcttacaccggtggaactggagatacggtggtgccagcatggaggaggacggccacggcagcgtcgtcgggaaggtggtgatcgtgccgccgcacctgctgctgctgttcggcgtgcggcggccggaggaggaggaggaggaggagatggcggcggcgccgtgcacgctgccgtcgtcgttggggacgcggccgtgcaagcgggcgcgcgacctgcgccacctgcgcaactcggtgctgcggatgaccgggttcatcgaaggatga

SEQ ID NO: 6721 - DNA, 3175 bp, Oryza sativa
  Clone ID: PAT_MRT4530_13384C.1
atggtggacattaagcaaacaaccggccaaccatctgaggttgaccctgataacatcatcccaatcaccctagataagctgacaccggagcaaaagcaagagtttgagcagatgatgaacaacttgaaaagtaaatacttgcattcgttcaaacagacccgttcaggaacagtaattcagaggtacaagctgaagatgaagagtttcaggagaaagattcagcaaaagcccctgaccattgagctcatcaaatcaagcatgatccatggtatcccccaagccgcggaggccgagccggtccctctccgtcatcgagaaccccgtgccctgcagagaagccacgccacacgcatcagcacgctcccccgctgccgcgaaagaagaacacaagggcggaacacaagggttgaaccatgggtcgtggaggatgtcggagccgcgcttgaggagcaccacggggcggtggcactccgtcgtgacgaacccgtgcgccagcaggaggaggtggtggtggtgatccccgccgcggcgaccgcgcgctggccccaaccccggccacgtgagcgggagcggaagccgaggagagtccgccaatggggcgccggggacgtcggggagggggaaggggagcggaaggtgcaggagagcgctccggcggcggcggtgcccctctgcatcctccacgcggcgacggatgccggcgtggcaagcggcgaggggggaggaagccggcgtggttgagcggcgatggtggccggtcccggcccctcccgagcgtgccgccgctggatctaggagggcgagggcgcggccgtcgaacccaccgctgccgcgccgcgcctgcccgtcgtcgtggccgttcccgacctctcccaagcgcgccgccgctggatctaggagggggagggcgccggccgtcgagcccgccgctgccgcgccactccctcccgcagccgtggccgctcccgcatcgaccggcccctcccgagcgcgcagcgccgctcccaccctcgccgtcgtcagtgagaaagagaggagaggagagagcgagagagtagagactgagaggagaggagaggagaggagaggagtagataaggttggtgaaaattttgaagtggggaagagggtgaggatgcaaatcagacttctaaactcgagcacatcgaagggcgacaagaatgccaaagatggcaaggataaaggcgataaagacaaaagtgaagagcccaaggatgatgaggctggggaagaagagccattggaattcaataacttccaggaccaagtcgactacggtgttcatcaagcgctgatcaaccagtcaggggtgcttgtcaacaccctgactaacatgattaaatctgtggtcgatgggacaatagctgagcatcaagttaaagggccaacatttcttcctgagggtgtgtttccacaatataggaatttggtgaccggcaaccagcagcctgtttctaatatacctccagggcagccgatggcgtcggcttcggcttctagaccagaggctaagaagagtttcaaaaaggtcaatcatgtttatcctaacatgtatgagtctgaagaagatgatgattccgaagtagcagcagccgagcaacagatccagttggctattgagggaggaaagataaaacttgatggctcaaaaaagccgatgaaggtggatggccatccttttcctgtcaaaatggtgcatacatctgggaaggcagccgatgggggaagtcatcagagctctcggctttattcagccatgattattaataaatatcaaagaatacatgacaagcaggaggaaaggaaaaattgcatgttcatcagaggttgggttcggtccaccaagatcgcttccaagatgagcatgaagcaagaaatcaaccatcggctgaagaaaaccaagcaggaatggcgcgttaagagtaaagttacgatagccgatgaagttgaagccgacaaggcgaagaggttgctcaaaggaaaagctattgcatcttcgtcagtaaacatggtttttatgctacatgcggaatatgaagctaaacaagcctatgttgacgatgtagaggaggcctctgctaggttgattttgtcaccagaacaagcaatttttgagaaaccagaggggacaaaaaatcagcatatcaagccattgaatgttattggatttgtcaatgggaagccgatgtccaagatgatggttgatggtggggctgctataaatttgatgccatatactacattcaggaagctgggtaagaatgcagatgatctcatcaagaccaatatgggttcctacagcctggtgcttgaaagggattggattcatgcgaattgttgcattccttcaaccatgcaccagtgtttgattcaatggcaaggtgacaagattgagattgtgccagccgatagccaattgaagacggagagcccaaattgttactttgagggcgttgtggagggttcaaatttctacaccaaggacatggcagatgatctcgatggcaagttaggacagggtttcatgtcgactgatgatttggaagaagttgatatagttctcaagggtttgcaattgttgaaggaggttgaagctgatgctgttgagattatgggagattctttgttggtgatcagtcaactagcaggagaatatgattgcaagaatgatgtgttgatggtctacaacgagaaatgtcgagaattaatggatagttttcggttggtgactttgaagcatgttcctcgggagcaaaatgttgaagccaaagatttagctcggggggcatcaggatacaagccgatggtgaaagatattgaagtagaagtcaccacgattgcagccgacgattggagaaacttggagcaattcaagattgttagaaatatgaagccaattatcaagccatggccgttcagaggatggggcattgatatgatcggtcagattaatccatcttcaagcaagggacataagtttatattggtggcgaccgattattttaccaaatgggtggaggcaattcctttgaagaaagttgattctggagatgcaatacaatttgtcaaggaatatatcatctaccgatttggtgttcctgaaactatcacgactgatcaaaggtcgatctttgtatctgataagtttgtttag

SEQ ID NO: 6722 - DNA, 1575 bp, Oryza sativa
  Clone ID: PAT_MRT4530_13385C.1
atggcggcgcgaccgggcgacgggcgacgcggcgcaaccgggcaacgggagacgcggcacgccaggagacgggggttgacggcggctggtggaggggtcggcgacgatgttggagatgatgcggagaccggcggcaggctggggcggcttcgcggtgggcagcagcgactcgtgccgaggtcgcggcgtcgacgggaggtgggctccagcggggttgttcgctggcatctcattggcgacgagcctcctgccgagcagggggcttctttggccagtggaggtttggtggctcaagggcggcaatgcatggatgtggagttggcgggacgacggcttgtgctggctgaagatgctagcgaaagtcttgccgtgcctttggccggttcgacgacgacggcgctcgtggtcgtcgtttcccttcttggaggcgttgtcatggcgttctttcatatcccccacaaatcttcaggtgaaaaccttgttccggctttcggacgagcggcgacggtgttacgcgtcgtgtcctccttgggggcgtcgcttcagagaagtttcaacgcattgacgactgttgatggtctttttcgcttcgaaagctttcatacattgtgttcggcgaggctttcgccttcttgggtctacttcgtttcttgtggtgagtgtcacgctctttggttgtttctgttgatgaagtcgaagctgctcgctgatgggctcgacaacgataacacctcttatgtgatatgggagctgtttagtcgcttttgtgttcagcttggcggcgacatcctgcgtttgggctccgccgtagttgttagttatgccgcctctctccctgccggcggccgcgccgcacccccaccggcgcacctctccacgctccttcccaaccggcgacgcctcttgcccccctccccaccgccggcggccttccccaccgagcagcggcgacgacggcgatccggaggtggtggcggcggcggtagccgccggtggatccgaaggtggcggcggtcgtggaccggatgcggctccctcctcccctctcgcctccctcctgcccctgatccggcggtgatggcggtgtttctcgtttacattgagaacatggagatcatgaagacagagccgccaaagccacaaccggtcggaccgagccaaaggcagtctgaccgagccgtggaaggtctgaccggccactacactgcgttttctagccgttacaaagtagtccggtctgaccggccactctatggcggtcggaccggcagagcacagagttggggatttcgaccccaacggctagttttggtggttgggggtatatatacccactccccagcaacaagggtgtcggcggcgtcggcgggtgggttcgtggccgacggcgaggtggcgaggagcagcgcgctgcagcctccgtcatctcgtgttaatatgatgttttctaatgattccgatttagatttggacttggattttgtgtttgatttggatttggattgtgatgatttgagattggagagaagtgtagttatagattttcgtgtccaacgtttgactgtccgtcttatt

SEQ ID NO: 6723 - DNA, 672 bp, Oryza sativa
  Clone ID: PAT_MRT4530_13386C.1
atgactaggagagaaggggcgagccgaaccggaggctgcagcgcgctgctcctcgccacctcgccgtcggccacgaacccacccgccgacgccgccgacacctgtggtgaactccaaaccactcacaaccggtgcctggcctcctccacaatctcctcagagaggtcaccgggcaacacctccacaagccgtctaggaggcggcaacctccaagaggcaatcattgagcccactcaacctggccggtctgaccgcagtgtagtggccggtcagaccttccacggctcggggcaggagggaggcgagaggggaggagggagccgcatccggtccacgaccgccgccaccttcggatccaccggcggctaccgccgccgccaccacctccggatctgccgagagagtggtgcggcggccaccgcccgccgcgagggagtgtgccgtcaccgccgccgccgctcgcgggagggcagggcgccgctaccgccgtcgtcgccgctgctcggtggggaaggccgccggcggtggggaggggggcaagaggcgtcgccggttgggaaggagcgtggagaggtgcgccggtgggggagccgatctgagccgtccattaaaatgaacggctcagatcgctcccgcgtcgggctggcctccatcatcgggccgcatcagtga

SEQ ID NO: 6724 - DNA, 659 bp, Oryza sativa
  unsure (1)..(659): unsure at all n locations
  Clone ID: PAT_MRT4530_13387C.1
aattgtaatacgactcactatagggcgaattgggtaccgggccccccctcgagtgcattcattgcttgatcaaatgcattcatatactgttcaatattggtgcaattaaaaattagacatgttaggtgagacaaattgcagagcttgactgcagagaatgctggggaaaatacgaataattcataaggataaattgttttatgcagagaaagaactacatttgaacaaatggacagggtccttggcattcgtcctttatctttagaataatttttcagaacatgctgttccgatttatgcatggaaaatgcatgcccacatcaattctgtgtgaaaatcaaagaaactgtaggtagcctaaggaaacattttatgctaataggaaaggattgaaataatgtgctgcacgggaaatttgaactcgattccaaagttgaataggacccactgtaaatagcaagaacattgaaccaaaagggaagtgatgatggcaaacaaccaangtgctgccatgacaaacatgtaaatacntgatatacttagcncaccttgtttcnaagtgatcntgtcacaggnccntgactctgcnttacatacccattntgctcnctggaatcanctcnggagccactaaggatgncctccatcngnccnggncc

SEQ ID NO: 6725 - DNA, 955 bp, Oryza sativa
  Clone ID: PAT_MRT4530_13388C.1
atggacgtggcgcggcggcctgcgagcagcaggaggacggcggtcggcgacagcgggaggcacacgcgcaagggcgacgccgctgggcttgctcactgcctcttgctcgccgcggatcctgcttggtgcggcttggtcgggaagtgggctcttctgcactcaaaaggtgcagttcatatctcaacgaggatacaggcggcggcggcgaagcggcgaggggacagcggtggtgggcgcggtgggggccgacggctgcggcgaggggaggcggcgggccgcgccgcgcgggggccggcggccgcggcgagcggaggcggcgggccggcgaccgcgacgagtggatgcggcgagcagtcgcgcgggggccggcggccgcggcgagcggaggcggcgagcgtcgcgcggaggccggcggccgtggcgagcggaggcggcgggccgcgccgcgcgagggcccgcggccacggcgaccggaggcggcgggccgacgaccgcgacgagcggatgcggcgagcagtcgcgcgggggccggcggccgcggcgagcggaggcggcgagcgtcgcgcggaggccggcggccgtggcgagcggaggcggctgccgtgctcttccctgtgctcgagctcctcccaatgcggccatgcctcctcgtgctcggttgccgtgtgggatggaggatgggctgtgtggggcccactattgaaggtcatggccaaagggactagaagattcatctggaatctgccgttggtcaagctctgagcgtagtacacagccgccggaggcaggcatgtggcaggccgcgctcatgccggagacggtccagctgccgcgttctcgccacaccgccaacgctatgcacggcggaggagcaactgaacagggtatccgcttcgtgcagtgcacagttaacagcgacactccgactctccgactcatcgatttccgaatttga

SEQ ID NO: 6726 - DNA, 250 bp, Oryza sativa
  unsure (1)..(250): unsure at all n locations
  Clone ID: PAT_MRT4530_13389C.1
ttaatttagctttgcattgntcctagttnagtagttggtgttgtccgttgggtttntgtctttccanagttatccntttttctttttctttttttttnttcctnaaanaaaaaagggtgttnacganctgttactgttagtattttggncctntagtatgttttgttgtgtaaaaaaggactagtnaaatccntntcggcttnaaaaaaaaaaaaaaaaaaaaaaaaaaaaaaaaaaaaaaaaaaaaaaa

SEQ ID NO: 6727 - DNA, 412 bp, Oryza sativa
  Clone ID: PAT_MRT4530_1338C.1
aaaaggaaaaaaaagggccttaacaacattaggcaaaaaacgggaccgtcccaaacaccaaaacaagggccggcaattaaataattaaattattctttacccccaaccccccccaaaaggaaccccccccaaaaaaaacccctggggcccccccccccgggatgggggggaaaccccccaacccaaccccctaaaaaggcgggacccccagacccccttccctggaaaagccaaaggcctttgcaaaaaccacattggggaaacccccgaaaaaggaacccctccccgcaaggggcgccacccaaaaaagagaaagggccccaaacccccggaaccccccccccccttttggccccttttcccccccccaagggggggggaaaaaaaaccccgcgccccgggaaaacccccc

SEQ ID NO: 6728 - DNA, 489 bp, Oryza sativa
  unsure (1)..(489): unsure at all n locations
  Clone ID: PAT_MRT4530_13390C.1
gaccatctcaacaaacaccaggctcacagaccccctcctaactacctcatccgccggcctcaaataatcctttactacattattgggtgtttaaataaaagggggtaacctctcacaacacccccatcttttaccccccccaccccccctcaccccctcacataaacagccaaacctactaaaaatatttttttctccccccacccaaacaccaaaccccaacaccgaccccgctacctgaaatatgcacgaatagaaaacacaaccgcacggtaccccaaaccacgcccccagcgggggccgacccaaacacacacgaccaaccacaaacgcccggggaagccgccaggaaatcgcacacgatacacgcggctaactcacacccgaagggtagaaaagaccgaggacgggagcaagccacgggaagggacaccggccaagtcccccagaaccccaaccgcggaggccaactagtcaccgnaagaganc

SEQ ID NO: 6729 - DNA, 576 bp, Oryza sativa
  Clone ID: PAT_MRT4530_13391C.1
atgaacaagccacgggggctactggagctcatgacggccgtcgacgccggccttgtcgccgtagacgacgacggcagcgccaggattgccggccacagacggcagagcgcgccggtggtggcggtggcggtggagacaccgccgacgtcctcgacggacgacgcgatgagcttcgagttcagcgcggcggtcagctacagctccgcgtcgccggccagcatggtgttctccgacggccagctccgggcgcaccagttcccggccgtgcggtcgtcgtcggcggcgagcagccatgtggcgtcgccggttcggagctggagctcctccatgggcggcagtggcggcgccaagggtgggtcgtcaggcggcgggagcaagaagaagcgtgtcagcttcaacgacggtggcgcggggcgggcggcagcggcgacggcggccaacgccggcgaccagcagaggacgagaggcggcggcttgctggggtgcatgggatcaacgtgtacgtgcgggtcgtcacgtaacgaggtggtggagccgagcaataatgccaaccgtaaggtcgtggccgccgcctga

SEQ ID NO: 6730 - DNA, 664 bp, Oryza sativa
  Clone ID: PAT_MRT4530_13392C.1
gaccatataaaatcagggactacatatcactagatcaggagaattgttacgttacggtacatgaatttaaagtacaaagacacagatgatcatcataaatctcgctgttaaaaattaagatacacgggtacatcaacctccggtgcagatgcagacattctgcaatgccaaactggctaagtatcagatgaaaaagacaaggatgatgcacagtaatcagcttgtccacaatgcaagacatgatttttgaagttagattatccgaacgatgccatctcgtatcattatcctgtttgcatcttgcatcctctccaaaatgaattctacttgacgtctattgtaaggtgcagctgcctctctattaacagtttgctcaatttcgtcaattgatatttgatcgagatgatttgccaacacatgctgaccaagaatcgcctcaaatgcttcaattctctccgcaggaacatcctgatcattcgatgcatttcctacatccacatccattgggtcgtttccagaacttctatgctcatctgcattaccaccacttgcacctgcatcatgatcagcttgttgtttcatttccatctctctctgttcacgctcttccatctcagttaactctttgtggtatattgcaaaattcagaacttgcagtgcagcc

SEQ ID NO: 6731 - DNA, 1861 bp, Oryza sativa
  Clone ID: PAT_MRT4530_13393C.1
atgagcagcagcgtggcgtcgccgtccacctcgccgccgacgacgccgccgtcgccgctgccggtcagcgtcggcccggggaaccggaggtacgcgttcacgccgtcgccgtcgccgtcgccgccgtgcccgtcctcgccggcggcgccgaagctgacgccgccgccgcactcctcctccgcgttctccgtccacgcgcggcggctcgcgcgaccggcgaggccgaggcggtttgatctcggagcatgctgctccggcgatcccgaccacccaccggcgacgatgagcggcggcggcggaggaggcggaggcggaggaggaggaagccccaacaacacggaatggcgcttcaaccagacgctccgcaacgtgcaaggaatgctcaaagggcggagctttcctgggaaggtcttgctgacccgaagatcagaacctctttcacctcctgaatactccccgcgctatgagaatgatcgtgatgaatacgaacagaatgaaggctcacaagaaggatatgcaccacctaatgcagatagaagagaaggtgttctgacgaggaaaagacttgagtacgttgaatgtgtttctcaatactatgatattcctgatactgaacgctctgatgaagagattaatatgcttcgacagattgctgttgattgcccaagaactgtgccagatgttacctttttccagcaccctcaaattcagaaatctctggagcgcattttgtatacatgggccatccgtcatccagcaagtggttatgttcaaggaataaacgaccttcttacaccattcttggtcgtattcttatcagagcatctagagggcaacatggacacctggtccatggaaaagctttctccacaggatgtttctaatattgaagcggactgttattggtgtctttcaaagtttctcgatggtatgcaagaccattacacctttgctcaaccaggaattcagcgccttgttttcaggttgaaagaacttgttcatcgtatagatgaacctgtgtcaaagcacatggaggaacaaggattgactttcttcagtttgcgtttcgttggttcaattgtcttatgattcgtgagattccttttcatcttgtaacacgcttgtgggatacctaccttgctgaaggcgattatctaccggattttcttgtatatatatcagctagctttttgttaacgtggtcagacaagctgaagaaacttgattttcaagagatggtcatgttccttcagcaccttccgacgaggaactgggctcaccatgagcttgagatggtgctctccagggcttacatgtggcacacaatgttcaaaagctcgccaagtcacctcgccagctaggatacccgataatcatatctgtaatctatgacctgattttgatgtactctagacttgtcccctttggggaaggaaccatgaggagacttcttttgttttcagtgcatactatcaattgtaacactacccccaatctgtatattttacttacagattattatcaatgatgatgaatagatggcattcaatttgtgtattaaaaaaaaaaaaaaaaaaaagcatttctgaagatgccagacgggctgccggcgatggcgggttccaagtcggtgcgagtgatccttctcgcggtggtcctggccgtgttcgccgttctcctcgccggcgcggcggcggcgaggccggcgccagcagcggagaggagcggcggggaggcggcggcggcggcgtacgtggcggtgaacccggcggcggcggtggtggagaaggcgagggagacggtggagatgctcatggcgaggctgccagctgggcccagtccaaagggccccggccactag

SEQ ID NO: 6732 - DNA, 297 bp, Oryza sativa
  Clone ID: PAT_MRT4530_13394C.1
atgtctgttgctacgaacttgcagcacatcacgcatgctccgagatcaaaccgcctcggcctcgccggtcgcgcgagccgccgcgcgtggacggagaacgcggaggaggagtgcggcggcggcgtcagcttcggcgccgccggcgaggacgggcacggcggcgacggcgacggcgacggcgtgaacgcgtacctccggttccccgggccgacgctgaccggcagcggcgacggcggcgtcgtcggcggcgaggtggacggcgacgccacgctgctgctcatggccggcctgatctag

SEQ ID NO: 6733 - DNA, 366 bp, Oryza sativa
  unsure (1)..(366): unsure at all n locations
  Clone ID: PAT_MRT4530_13395C.1
agttcgngnggctcatcgtgtcgtccggggtgatgaagatgtaccangcggccatggacaagncgctgacgatgttcgngaccaacgacgacgcgttccaggccaagggctncnggatctgagcaagctgaccagngacgagntcntnacgcttatgcagtaccacgacttancgcagnangggcncanggtntngctcaagnccatnaaggcncacatccagaccntggtctccnncgtagcgttgtaagtacgacctatgcgtcgtnactaagggcgacgacgtnttcatggncatccctatggtcangtnccgtgttgtgttcanngngctaggacgtnacccnggacgggttattcnacacg

SEQ ID NO: 6734 - DNA, 861 bp, Oryza sativa
  Clone ID: PAT_MRT4530_13396C.1
ggcgcttcaaccagacgctccgcaacgtgcaaggaatgctcaaagggcggagctttcctgggaaggtcttgctgacccgaagatcagaacctctttcacctcctgaatactccccgcgctatgagaatgatcgtgatgaatacgaacagaatgaaggctcacaagaaggaaaagggcaagcatctggaaacacagctgatagtatgagtgcaaagaaatcaaatcctccatcaacaagtagcaccaattcattaccagatgcccaaggattagtttctggggctagagctacagattctgcacgaattgctaaattcacgaacgaactatctaggccagctgttatattagacaacccacgcgtccggtcttggagtggtgttccaccttatatgcgacctaatatatggagacttcttctgggatatgcaccacctaatgcagatagaagagaaggtgttctgacgaggaaaagacttgagtacgttgaatgtgtttctcaatactatgatattcctgatactgaacgctctgatgaagagattaatatgcttcgacagattgctgttgattgcccaagaactgtgccagatgttacctttttccagcaccctcaaattcagaaatctctggagcgcattttgtatacatgggccatccgtcatccagcaagtggttatgttcaaggaataaacgaccttcttacaccattcttggtcgtattcttatcagagcatctagagggcaacatggacacctggtccatggaaaagctttctccacaggatgtttctaatattgaagcggactgttattggtgtctttcaaagtttctcgatggtatgcaagaccattacacct

SEQ ID NO: 6735 - DNA, 261 bp, Oryza sativa
  Clone ID: PAT_MRT4530_13397C.1
atggcggggcctctcaccgaccttgcgttcgggcggccaggggagccgcccatggcggcggcggcccgcgctgcttcggccggatctggcggggcggtggtggctgaaggtgacggggatggcaacgacgacagggtgtggtcctctggtgcgaaggcggcggcggtggagtctgcgacctcgggcatcactggattcgcgtcggccgccgccagatctgaagctagacgcgtcagcgagagcagagaaggcagtgagtaa

SEQ ID NO: 6736 - DNA, 187 bp, Oryza sativa
  Clone ID: PAT_MRT4530_13398C.1
tcttcatcccaaccagagagcttgcggaagcgggggtttggtgcggtcgcgcgcgtgtgaggggggagagaaggccaggaggaggcgactccgtctcctgagggaggtataaatccgatacctcctcctgccctgctcgatcgcttgctcgcctgcactgttctcactttgtcctgttcctttcttt

SEQ ID NO: 6737 - DNA, 1719 bp, Oryza sativa
  Clone ID: PAT_MRT4530_13399C.1
atggcgagggggagcaggaggaaggggtgggcgcgcggggcggtggcgttcgcggcggtggcggcggcggtggcggtggggaggcggtacgggtgggacggggaggcggcggtggcggcgttccgggggcggagggacgcgctgggcccctgggcggcgcccgcgtacgtcgcggcgcacgcgctcacgctggcgctgtgcccgccctacgccatcctgttcgagggcgccgcggcgctcctcttcggcttcctcccgggtgtcgcctgcgtcttctccgccaaggtgctcggcgcctcgctctccttctggatcgggaggagctgctgggatgaaaagctaatcagctatgcaatcttgtgtgtacaagcgtacttttgtacactgatagtagaggtcaggttggttgttgagcagcctgaagagctacaacttcacggaaaggaccttgagaggttgtgtttacaaaaggttacaaataattcgcagaatatgttcccttacaattccaatagcccccttcttgttctgggaaaagttcttacccttatttttcttaaccttgtggtccatctggcacttttcgcgtgtgctgtgtttgttcgaagttttatccgtcgatccatcgggatttctgatagggagcaataccacccacatgaagtggctgtagttgtcgacgcaaatccagacattctcatgttttgcgaaattgatcatcaatatgtcctggatacttttttttttctggttaaacaaagaaaggcaattttcagactctttacttcagcaatggattggctaaagagtaacaagtacttccatattgtggttaaaggggttgaacgtgatggctggaaatttgtgctacttgctagattctctcctctaccttcctacataattaactatgctctatctgccaccgacgttggatttttcaaagattttctacttcccacagttgttggctgcttaccgatgatcctacagaatgtttctattgttagccttgctggtgctgcagttgcctcaaccacaggatctgagaagtctcggatatactcctacttgtttccagtacttggtatcatgtctagcattctcatttcgtggaggattaagcaatattcttctgcccttgttattcctgaagagcttaaaaattcatctactaatggaaaggctaatgtggatgacaaggcagtgtctgaaaataccaactctggggaaactaggaaaaggaggtgaccatcacaatttcttgcatattactgtgaggagctactacgaattatcaaacatttagagtagatgcagatcaagattattccacattggtcaatgactatagtaaactatgttgtctgtttcatgccattgttttgggggcatttagcagatgcgcagtcagctactgtcttgtttctgccatcaagcttttctttttctgacacatgcagatgtttcaccttgcaaacatggtagaagttcatatgctgtacatctaagttgggtagttacggtggtctaggattttcttgttaaattatatctaaggaaaccggttttgatttccttccctacttgtactgaacccatatatgacttggtagaattcagtgttctaatggaccagaattcagaactgtttctgctgttgcaatgtagaacagctgtatcacacctttttatatatatatactcttctttagccac

SEQ ID NO: 6738 - DNA, 426 bp, Oryza sativa
  Clone ID: PAT_MRT4530_1339C.1
atggcggaatgcgcgtggtggggcgaggtcggcgtgagcggggtgagcgcgagctcaacggcagcagtagggcgggtgaggaagcactggctcgcgctgaggagcggggcgaacctattcatgcactcgctgaagctcgatgagccggaaaagtccgtcgtcaagagctggcggaagggcgccaacccactcccgcctcgctgcaccgtggtcgtcatccggttccgtggcaagtcccgagtcctcggcgagggcaacggtgtggtgactcctctgcatgtccctgcctccggttacccgatgatgagcatggacgagcagaccagcctcagcttcgcgctattcaaagacgtggcgttcaacgccagcatccgccgcggcgtcagggcctccgacgtcgcttgcctgcccatctccttcggctag

SEQ ID NO: 6739 - DNA, 2223 bp, Oryza sativa
  Clone ID: PAT_MRT4530_133C.1
atgaggggaccgccgccgctgccggcgaagggggccactgccattgctgggagaaggggccgctgccgctgccggaagaagggggccgccgtcgctgcaaggataagggggccaccgttgatgcctccttacagccgctgccgctgccggaagaaggggctgctgccgctgcaaggagaagggggccgccgccgctgcctccttgtggccgctgccgctgccggaagaaggggccaccgccgcttcaaagagaaggggaccgcctccgttggagaaggggccgcctccgttggagaagaggccgccgccacccccgccgccagcgcgttgctgctaggagaaggaggaggcgagagagggcgagaggggaggggggtgcaagtggatggagtgagaagtgtgaggagcgagtggatgaggctcgtggaggagcctgcgcttagcttaagtgtgttagaacccgatgttggtgttggcggcggcagtggtggtggtggtggtggtggtgaaggtgataatggtggtgttttctttgtttctcctgctggggtcgtggaacaagttggggaactagctaggtctcctgttcttgatgtcccatatgttgctattgacattgttgattgggaaagcctagacattctggcccgaaacgacgatgaagggcggttagatattgttggggacgacaaattctatgagttgctgggtttaagggctgaagatgagcaagccgagatggctagacaagctggtggcaatgggggtcaggctgctggtggtgatggggctgaagctgctgctgctggtgatggtgtgggtgatgctgctcaagacactactggggcagcaattcctgtgtctgatgaagtaccaggggagttggtgatgccctatgaccctgacaagccatgcatgaaggctggcaccatgtacccaaacatgaaggagtttaggttggctgtgaggcaatatgccataaatgaggaatttgagttgcatttgatcaaaacagatcctgaacgatatataggaggttgtatggttgatgactgcccttggcatattgttgggcataagcagcctaatcagaagacagtgatggtgacagtgctaactgaccatcatacatgtacttctagcagcagaagaagaacaactacaccaactagtaaatgggtggttgcaaaggcaattccaattcttaggaagaatccaggtatgggtcctaaagccttgcagactaggctagtagaagatcaaaagtgcacaatcaactatgacacaatatgtaagggtagactcaaggctttggatcagctgtatggaacatgggaggaaagttttcacatgctgtataggtggagggcagaggggtgtaggccatacattagtatagacagcactgctttaaatggcagatggaatggccacttagcatctgctacagctgtagatgggcataattggatgtatcctctttctattgggtttatagatttagagactgaggataactgggagtggttcatgagtcagcttcatgctgccataggagatgttaaccctctagctgtatgcactgatgcatgtaaggggttggagaaggctgtgcacactgttttcaaacatactaagcagagggagtgcttttggcatttgatgaagaattttgtgaagaggtttggaggagatgtacactcacatatgtacccagctgctagggcatataggaaagaaatttggcaaatgcacatgaaggagtggatgaggagtggtttcaacccagagattaagtgtgattacataactaacaacattgtagaggttttcaacaactggattaaggactataaagcactaccaattggtgaccttgcagacaagtatagggtgctagttatggttctttggaataagaggaggaggattggagagaaattaactggcaagatcctgccagcagttacacaacaactgaaggctatgaataggggtttaggtcacctgtcagtagtgaaagccgattccttaactgcagaggttgttgataacagcagtagtaatggcaagcatgttgtgaaggcatacaataaatattgctcttgtgaggaatggcagcacactggaaaaccatgtcagcatgcattggcattgataacagcacaacagagcagagatgtcaacattgaggactttgtaaatccatattactcagtctaa

SEQ ID NO: 6740 - DNA, 1176 bp, Oryza sativa
  Clone ID: PAT_MRT4530_13400C.1
atggcgccgttgcgcggggccaagcgccggaggaaggcggcggcggagaagaaggctgcaatggcggcggccgctgcggcgggtggcgcgcccggagcaggcggcggcgactggtgggacggcttctgcatgcggatgtcaggaaccttgtctggtatacaggatgcacaaagatttgagtttatcttcaaaatgccaaggagaaccttcaactacatctgtggtttggtgagagatgaaatgatggtgaggtctagcagctatacctttcttgatgggaaggtgctgtctttagaagatcgggtggcggtggctctgataaggttgaattctggcggatcactagtgactgtaggatctgctgttggtgtaaaccactcaaccgtgtcactgattacttggaggtttgttgaggctatggaggagcgagcaagccaccatttgcggtggccagattccagtgaagtggagaagatcaaatccatgtttgagaagatacatggtttgccaaactgctgcggtgttgtagacacaacacatatcacaatgtgcctttcttcagctgagccaaactgtaaggtctggctagaccatgagaaaaattacagcatggtcttgcaagctgttatcagtccagatatgaggttcatggacattgtgacagggtggcctggtagcatgaaagagtcgagcattttgcatagctctggtcttttcaagatgtgcgagaaaggagcacggcttaacggcagcaagatggtagtgtctgatgggtcagaaattggtgaatacataattggtgatgcaggatacccccttcttccctggcttctcacaccgtaccaagaaaaggacctctcagattctaagctggagttcaataagagacacgcagcggccataacagttgctccaagtacattggcgaacttcaaggacacatggaaattcctgcatggcgagatgtggcgccccgacaagcacaggctgcctcggataatccatgtgtgctgcatgctgcacaacataatcatatgccttcaggatgcaaccatcgacgaggcagccatgtcgaacgatcacgacgcgaattacaagcagcaggtgtgccagttagcagatgagaatgctgtgagggtgagggacaaactgtctgagcacttggtcagcaggtga

SEQ ID NO: 6741 - DNA, 672 bp, Oryza sativa
  unsure (1)..(672): unsure at all n locations
  Clone ID: PAT_MRT4530_13401C.1
gcatcgatccatacaacccacgtgccggaaggataaactatgtgtcgacatatgtccagaagtgccccatccttaacctcatccaaatagagcgcatacccgcagtagtcctcatacactatanatgctatatctctcgccgttctggcgaacgtcaatgcatcatagtgctggtctgatatcgatggtcaaggggcgatcccgtcagtccggggtacctcagacagtatgctgataggnaacagcactcgtcgttaatgaatcgagttgtcgctatcgacacccatgcnactgattcatgtgnctacgtcngccgcatccatctatgctgatgcgcgggggagngaggtgcgggaggcgtggagatcgatcgcctaatngtcattcgccggttctgaggacntacccgcttgacgacctttcgtctagcctgctctttgcatgggaacacttctcaggtattacagtcgccttgcccttcgatgtcagtgcgctaatcgcgtttcgcatgatcaaggganctcatcccgatgcctttgagaaccgctggggaaccgaatcctgtgccttctatcctagattcgacgtaattctccccggattatcatgaatcctaagcatactctatatgtattgaacctttcggtaatgtttaacctttttcctgttatg

SEQ ID NO: 6742 - DNA, 249 bp, Oryza sativa
  Clone ID: PAT_MRT4530_13402C.1
caactcatcataatgttccatccgacggagttggtgaagagggcacactgaattatccatatgagttgtccggtgaacggcggcagtccagctcatgagcagaagcagttggcctccagcaagatcgcttcgtttcaacagttcattcgcccatgacttctatgccagtgattcatggcacgtcgagcttcccggctgctgttgctcataggatcggcacactggatattagaatttttacacactgac

SEQ ID NO: 6743 - DNA, 319 bp, Oryza sativa
  Clone ID: PAT_MRT4530_13403C.1
aaaaaaaaaaaataaataaaaaatataaattaaatacaattaaaaaaaatttataacaaaaaagggagggtaaaatatataaaggttatctaacgagaacttccctaaaagtcattatttggactccttctccttacgatgatctcttttagtgttgggctcttttgaatccacttatttaccacccgtttccatgcttgaacatcttcttttctgtgccaattcataaacatacaccttctcgagattacagaaactccaatttgaaaactctttaaataaacaaataatactatattttggaaattatctttttttc

SEQ ID NO: 6744 - DNA, 530 bp, Oryza sativa
  Clone ID: PAT_MRT4530_13404C.1
cccacgcgttcggaaaaggactgtgtaacggaaagggtacaaccacctcgttctcatttgccttcagaaatgccgcaagctacggcgtttgctactctcttcatgtcatatatccttgacaggaagtctgaatggggtgccacccgccaggctgccgtcactaagccgatgactgtctccatggttgcccacgctgatgcctacgacaataaccttgacacgaccgcaaaaaccatagcgtcaccactaagggtgattcatgccatggatgactcgaacgcgacctgcggtaaaaggcttgcgtaaatcgcccttgacaacaccgaggccaaccggcaggtttacgggaccctacttgtcaccgcaccggacttgtgacaggacatcttcggcgctatgatcttggacgagactatggaccatgcaactgtaaatggcaagatgattgctgacatcatcactgagcaaaaaatcaatccaggcatcaaggtcgacaagggtgttgggtcccttgatgggtccaacaacca

SEQ ID NO: 6745 - DNA, 633 bp, Oryza sativa
  Clone ID: PAT_MRT4530_13405C.1
tcattgactgaaatggattttgatggtcgccgtgaagacggggctgtcaccggtagcagtactggcatctatcttgaacccatccgagtcggcattgcatgtgtaagctgcgttattcaccttgtcgtacaattgctcccagtcaccttggaagctgtccacacctccaacagcgcagtaggccttgttccggtagaaagagctccatggcgtgctccaggcgacgagcaggtcgcgctcgacgccgtcggcgttggtgccgcggtacacgacggcggcctcggatccggaggagtcgccggacttgtggacgtggtggaacgccgcccactggccgttgccgatctcggtggggtacggggtgcggccgatgaagccccaccagtcgtggtcggcgacgtggcggagggtggcgccggtggcgttgtagacgaggcacagcgtcgactcgccgttgccgtaccagtccttgacgccctgcacgtagctggccgccttcttgtccttgccgtcctcgttcaccaggttcatggcctcccgtgcacggtcctcctgcctcttggccttccccacgtacctctccatctcgtccagcttgtagttgtccacaacatcgccgaagcagttcgccat

SEQ ID NO: 6746 - DNA, 1257 bp, Oryza sativa
  Clone ID: PAT_MRT4530_13406C.1
atggcggcggcgcagccgccattgccgtggggggacctcccggcggacctgctgggcctcgtgctcctccgcctcccgtccctccccgaccgcgtccgcctccgcgccgtctgccgctcctggcgcgcgggcgccgcgcggggtcgccacccgcggctgcccccgccgctgccgtggctcgccctccgcgacgggggcctcgtcgacctcgacggcgagcccatccgctgccccacccccatcccccgccacggcgtcgtcggccacctcgccgtcgacaacctcgccttcctgatacaccgcgacggcggctgctcccttctgaaccccctctcctcgtctgcttcagcggcgacggcggcgatcacgcctctcccatggctgaacctcgccgccgtggacggagcgatcggccagccgggggtattcatcgggatcggggcctacgtcaacgtgtactccaaatcggtcctctcctcgccgctcgattcgtcgccggatcccctcgtcgccgtcgtcacatcgggcgggaggcacgtcgccgtcgccccttgcaagcggcgaggcgtggtcaccatcgtctccggcctcatggcgccacagattcccggactgaatcctactcggttctccgacattgcgttcttgggtggaaacctctacacgctcaccaatgcagaagggctccttgttcttgatctcggcagcaatggcgtcgacgatccaccgaacgcgtcgcatcgtcggtgcatcgccgatgatcccaaccagcatgagtattacatcgatgggagcactaagaacaagtctttggtgctgagatacctggtgggttccaatggcaggctgttgatggtgaggaggtggatgaactgtcggcagcagtattacgcgggtgacatggacaagacgcggggattcgaggtctttgcggcggtaatctctgatggccatggccagtgggtgaaggtggacagcttgggtgaccaggcaatcttccttagttcagagtgctccaagtctgtcactgctagccaatgtgcagatggaattcagcaagattgtatctacttcatgcataggatctacgacaatccgacgaaagagtgccacggcccatgtgttgatcctcttggtgactctggcgtgtacaacatgagagatgggacaatcaaccttttgcggcccagggcggtgatgtctgagctgcgctggaaacgccagtatctgacttggttcttcccttctgatgagtaa

SEQ ID NO: 6747 - DNA, 1782 bp, Oryza sativa
  Clone ID: PAT_MRT4530_13407C.1
atggcttctactgaccgcagcaagaagcttcgcgtcctgctcatcccattcttcgccaccagtcacatcggccccttcaccgacctcgccgtccgcctcgtcaccgccagaccggacgccgtcgagcccaccatcgccgtgaccccggccaatgtctccgtcgtccgatcagccctcgagcggcatggctcagcggcgaccagcgtggtcagcatcgccacctatccgttcccggaagtggccggcctccctcggggcgtcgagaacctctccactgccggcgccgatgggtggcggatcgacgtcgctgccaccaacgaggcgctgacacggccggcgcaggaggcgctcatctcgggccaatctcctgacgccctcatcacggacgcccacttcttctggaacgctggcctcgccgaggaactcggcgtgccctgcgtttcgttcagcgtcatcggtttattctccgggctcgccatgcgcttcgtcaccgccgccgccgcgaacgacgactccgattcggcggagttgactctcgcggggtttccaggggcggagctacggttccccaagtccgagttgccggatttcttgatccggcaagggaacctcgacggaatcgacccgaacaagattccccaggggcaaaggatgtgccatggtctcgccgtgaacgcgttcttgggcatggagcagccgtaccgtgagagattcttgcgcgacggcctcgcaaagcgcgtctacttggtcgggccactctcgttgccgcagccaccggccgaagctaacgccggtgaggcatcgtgcatcggttggttggactccaagccgagccggtcagtgctgtacgtatgcttcggcacgtttgctcccgtctcggaggagcagctcgaggagctggctctcgggctggaagcctccggcgatccgttcctgtgggcggtcaggaccgacgggtggtcgccaccggcggggtggcaggagcgcgttggtgataggggggtgctgttcatcgagaaaaggctggtcaccgacgtcctaaggattggcgagagggtgtgggacgggccacggagcgtgcggcacgaggaggcgatggtggtgccggcggcggcggtggcgcgagccgtggcgaggttcttggagcctggtggggcaggggacgcggcgaggctcagagcgcaggagctcgccgccgaggctcacgcggccgtggccgaaggcgggtcctcgtaccgcgatctgcgcaggctcgtcgacgatatgctattcttcgccattcttgacaatctccaagggttctcttacaacgctcgggacgagccagatcaagatcaagaaggcaacggagtggcgacggcgtgggcggtgcccggtggtgcggcgacgggcgaggccgactccgcgtggaggcgtgcgcggagcccgtgcgacggcggcagcttcggctggcgcagcattggcggggcagctcggccagcgacggcgaaacccggcacggcacagtggcggcagtgcgtggcgtggtggcggcggtgcatggcaggcggaggccggcacggtggcactggtggcggcggggtgacggctggtggcagtggtttggtcgtgggagcgaaggaggcgacggcggcgcctggtggtggtcgtggcggcgcggtgctcggtgacgacggcggcggtgtcctccagatccgtgcgactcggctggatctggagggtggctggcggtggtggctgcggcagctagcggcggcggcggaggacaaggcggcggcgtag

SEQ ID NO: 6748 - DNA, 180 bp, Oryza sativa
  Clone ID: PAT_MRT4530_13408C.1
atggccaagctcgccgcgcagctcaaggacaagttctgcggcctcatcggccgcatcaccagctgtggccgcgccgcccacaaggacgccgcacacagagataaggtcaaggggacttccaccgtctgtgtcaggagggtccaagccccataccaattaacagcgacaaattaccattga

SEQ ID NO: 6749 - DNA, 797 bp, Oryza sativa
  Clone ID: PAT_MRT4530_13409C.1
aattaagctcgccatatatagctaagctagctagctccacagctgtgagagtgtgagctttctgctacagctagcttagctccggccgccggcgccgccgctcgccatggccaagctcgccgcgcagctcaaggacaagttctgcggcctcatcggccgcatcaccagctgtggccgcgccgcccacaaggacgccgcagctggtgtaaaagagacccattcggcttcatctcagcacacagagataaggtcaaggggacttccaccgtctgtgtcaggagggtccaagccccataccaattaacagcgacaaattaccattgatcaaaatcgatagatctctctgcttaataattaatcaacgtctactcgttctaatactgtgtggtaatgcacaattcattgtgcaatagctatatgaagcttttcttcttctactatctgtttgctgtattttgagaattttggtgttgaccagttcacaggtgtggtcttcagactaaattaacttgcgaactcggggcttattcggttaatccctttaccatgtgtgaaattaaccgagcaagttaatttacaccggggattttaccggggttaacccccggctacgaaatgtatacatgtatgtgtgtatgtttagtggggttgtacagaaaacggctggttgcctaagccctccaatctcttccttaattagcatcatatatagcatgtgtgtgcatcataataagtgtggtggagttgtatgtgccatgctgcttagataatgaaaacaataagtgtattgctatttt

SEQ ID NO: 6750 - DNA, 202 bp, Oryza sativa
  Clone ID: PAT_MRT4530_1340C.1
gctctagagactgatacagtgaccagacgcaaagcagagcagtttcgctgacaaggttgttggtattgcaggagacatggcctctgaacacttgaacggattgagtgaaaactatctgcatatcacttgcaaatgtctgtcctgttacagcaaccatcgctaatacgatgttatgagtgcgtatggctgcctatgtgatatg

SEQ ID NO: 6751 - DNA, 355 bp, Oryza sativa
  Clone ID: PAT_MRT4530_13410C.1
aaaatcaatagtaatttttttttactgcgctggattgcaatttgatacatgtgatatgtgtatccaatgatacagtgaatcacgtataaaaaaattgggtatggtgaagcaggctcatgctgcaaaatgcgagagagagagagagagagaaaagaaaaagaaaacaaaatatctacaggcgtcggctctcctgttgccgcagccgcaggagctcgtcccatcctcggagcctgtggtcgccgtgatggcgctagccttcttctgtcgatctgttctaattttaatttttttattttctttaatgtttggtttggttttatttttttactaaattaattcttctttattttttttt

SEQ ID NO: 6752 - DNA, 174 bp, Oryza sativa
  Clone ID: PAT_MRT4530_13411C.1
atggcggacgaggactgcaacagcggcaatctggtggagcgcgacgcccgcggacgtggcaacggcggcttgcgcgggtgcacccatcgttcttggtgggccgacgtctcagacagagagtacacctggtgggccgacgtctcggacagagagtacagttgggtgactaattag

SEQ ID NO: 6753 - DNA, 311 bp, Oryza sativa
  Clone ID: PAT_MRT4530_13412C.1
gtctttattcacatccacgatccgcctgccgtttctgacacttaggccgaagaccgggaccgaccacatgaccgacaggaatgtcggttgcagcctatccaagcgcatgtccagcttgtgcgaatgaataagcgattccagtaacctgcggaccataacgccactcaacggcttctccaccaggctcccatatggcgagtcctactttgggcaccctaccggccgttcatgcgacgggaggcttattgtggattgcttagcggctgtcctggggcttccggacctgacggctatactgcatcctaatttta

SEQ ID NO: 6754 - DNA, 297 bp, Oryza sativa
  Clone ID: PAT_MRT4530_13413C.1
atgggctacatgccatcccggaagttggactttcccgctctaaagttgccaccgagggttagaatattgcggctggtacgggtcaccgtccttggaaccaccaccggtcgcgcgcacgcagctgcccaagatctagggcctcgacctctccatcgtgatcggcccggctacggcgccgacggaccgaccgctagctcgtcgccggccggcaagccggagatctccggctcaccgccggcagtacgctgcgctctggccggcatgtgcacccatcctattaatcaacgatgtagctag

SEQ ID NO: 6755 - DNA, 1542 bp, Oryza sativa
  Clone ID: PAT_MRT4530_13414C.1
atgtgggagcaggtgaaggcgccggtggtggtgccgctgctgcggctgtccgtggcggcgtgcctcgccatgtccgtgatgctgttcgtggagaaggtgtacatgtcggtggtcctcgtcggcgtccacctgttcggccgccgccccgaccgccgctaccggtgcgaccccatcgtcgccgccggcgccgacaatgacgaccccgagctcgccgacgccaacgccgccttccccatggtcctcatccagatccccatgtacaacgagcgcgaggtgtacaagctgtcgatcggggcagcgtgcgggctatcgtggccgtcggatcgggtgatcgtgcaggtgctcgacgactccactgaccccgtcatcaaggagatggtgcaggtggagtgcaagaggtgggagagcaagggggtgaggataaagtacgagatcagggacaacagggtggggtacaaggccggggcactgagggaaggcatgaagcacggctacgtccgcgactgcgactacgtggccatcttcgacgccgacttccagcccgaccccgacttcctcgcccgcaccatccccttcctcgtccacaaccccgacatcgccctcgtccaggcccgctggaagttcgtgaatgcaaatgaatgcctgatgacaaggatgcaggagatgtccttggattaccacttcaaagtagagcaagaagtgggttcctccacacacgccttctttggcttcaatgggactgctggtgtgtggcgcatatctgcgatgaacgaggcaggaggctggaaggacaggacaacagttgaagacatggatttggcagtcagagcaggcctcaagggatggaagtttgtctaccttggtgatctcatggtgaaaagtgaacttccaagtacattcaaagcattccggtatcaacaacacagatggtcctgcggaccggcaaacctgttcaggaaaatgttggtggagattgccacaaacaagaaagtgacattgtggaagaagatctatgtgatctacaacttctttttggtgcgcaagattattggacacattgtgacctttgtgttttactgccttgttgtcccggcaacggttttaattccagaagttgagataccaaggtggggttacgtctatttgccatccatcgtcaccattctcaattctattgggactccaaggtcattgcacttacttatcttttgggtcctcttcgagaatgttatgtcactgcatagaacaaaggccacgctgatcggcctgttagagacaggcagggtgaatgaatgggtggtgaccgaaaagcttggcgatgctctgaaattaaaattgccaggtaaagcattcaggaggccgcgcatgaggataggagacagggtgaatgcattggagcttggtttttcagcctacctgtccttctgtggatgctatgatattgcctatgggaagggctattacagtctcttcctttttctccaatccatcacctttttcatcatcggtgtgggctatgtggggacaattgtcccgcactga

SEQ ID NO: 6756 - DNA, 422 bp, Oryza sativa
  unsure (1)..(422): unsure at all n locations
  Clone ID: PAT_MRT4530_13415C.1
nncnaanttttttnttancccaggntnggnacnnctagggantcactttatntnttaagnggaaaagtnntccaccnccaagngcgccnctcnccagcgcatnatccnanatcggagtncccatnagcgaaaaagaattcncctcntgntaatcaggcaggtattnttnttcanttantccnnnttagcccnctccntaaanttcgncagctttaccctttaagantangattncgantatngatcgatcttntgaggtttcgccncnntctgtnnngcttgagcatanattcagactttcttncaantgtanatgaacngtntannnataggtntaaagcngtaccttntttaattagttgttcattanngnccaaggngataattccnngtnagcatttatttaaaaaaaaaaaaaaaaa

SEQ ID NO: 6757 - DNA, 321 bp, Oryza sativa
  Clone ID: PAT_MRT4530_13416C.1
atgccgccgcggcgcgtcgcggcctcgctcacgtggacggtggacgtggggccgttgcgtcggttccccgaaccgagcaggcgagcaggcaggcgcagcttcaccacgctcgttgacctgaccccgatagcggaagacctcgacaccactagctccttcgtcggatattcggggctgggtggcaccgccagggtagtggtgttgaggcggtcctttgaggcaaaggtaacattagtggatgaggagaaccacgacatcgggaccaccccgggaccacccgcatggccgctcaccctgtggttgagcccatcagcgggatga

SEQ ID NO: 6758 - DNA, 221 bp, Oryza sativa
  Clone ID: PAT_MRT4530_13417C.1
cttgttttttggggttttatcaaaaatagcaatagggggatgtccccttctttgttacgaagagaagatgcggagcaaaaaaatcttggttctgaacatgggtgaggggggaaaagaatctgacagaacaggaatggaaattgcctgtacctccatggggcggagggggtgctactgttatccaacgttttatcccattacaaaacctccaaactcattgg

SEQ ID NO: 6759 - DNA, 1399 bp, Oryza sativa
  Clone ID: PAT_MRT4530_13418C.1
ccgagcatgagcactctagcagctgcaaaccctagagttcacgggccacaacggcgagctcgccactctatataaccacaccgccataaaccctagatcgatcgcacaaacacttctagctcctcttcttctcccccccccccccccccccttctcaccacaacctgctagcaagctcagagctagcagcagccatggcgggcagcaccaagctgcggccattcctcctgacgctgctcctcctcctctccaccaccgtggcttccatcctcgcggagtacgacccggaatgcgactgcgacaagcccaagcaccccaagccctcgcacccttctccctctcccggccaccccaagggccccaagaaccctacccctcgcccccccaagggccccacctacccgtctccggtcacccgcccgccgccgctcgtcgcccctcccaaggtccccgtcacccacccgccgaagggccccgtcacccgtccgccgccggtcacctaccccacacctccggtcaccacccccccggtcgtcgtcggcccgccggtcacctaccccacacctccggtcaccacccctccggtcgtcgtcggccctccggtcacctacccgacgccgccggtgacatacccgacgccgccggtgacgtacccgacgccgccgacgacgacgccgtgcccgccgccgccgccggcgacgcagaggtgcccggtggactcgctgaagatcggggcgtgcgtggacctgctgggggggctggtgcacgtggggatcggcgacccggtggtgaacaagtgctgcccgctgctggaggggctcgtggagctggaggccgccgtgtgcctctgcaccaccatcaggctcaagctcctcaacatcaacatctacctgcccctcgcgctccagctcctcctcacctgcggcaagaaccctccccccggctacacctgctccatctagttcagccgccattcccctgcctcgccatggatggcgcccaagctcaagctcttgtttgttggctactcgatctcggcttattgatgtgttaatgatgagtacgaggtgtattaatttattgttggttttaatttgttagtgtgtggaaacatgagaggatgtcgtctgctagctagctagaggaacggatcaatctgctaacgatagattgatgttcgtattgctgtgttttttttttaatttgtttcaatgtttcagcttaattgcatgcttcctcttcttgattgtgtggtgtgatcaataagacagcaactgttcagaaattgtttccgtcaagatcgtatcctatcaagaaattaattaataatgcctgcagcctgacttaagcgtgtaatactacatacttccatgtccggacagtgcatgcaatctgatgt

SEQ ID NO: 6760 - DNA, 313 bp, Oryza sativa
  Clone ID: PAT_MRT4530_13419C.1
ttcctgcagcccatgtgatggaggagaacgccatggacgtcgtcgcgagctctgcgcaagaaagaacggcacagttgcttacagttgatggcggacgggcatcctcctccccttcccgtccgggcgatgttcgtgaccaagtcgcagggaccgacggcgagcgcgtcaccagctaccttacgttggggccgtccaactccggcgatgttgcgctggtggcggaagccgacgcgacggacgctgatccgacgaccaccactgctctcgccgtttcacaggagaaggaggaggagagggggcccgtccgcccgtg

SEQ ID NO: 6761 - DNA, 678 bp, Oryza sativa
  unsure (1)..(678): unsure at all n locations
  Clone ID: PAT_MRT4530_1341C.1
gcttggatctctagagcggcgcagacggctcgatctgtatggtgaagttgcaggcgttcgtggacgggtcctgctgcgtctgcacggcgaggccctggaaaccgcacgactcctccacctggttctgcacctggaagtaggcgttgaaggcgtaggaggcgttgccggcggcgtccatgccgttgcacgtcgagccgtagcccagcgaggtgcagtcggcgtacgtgcaggcgtagttgacgttgtcgccgaccctgctcatggcgtccggcgtggcgctcgggttgagcacgcaccacgcgcgcgggaggtaggcgacgccgcgcgccgccacgagcgccgtgtcccggccctgccctgcgaggtccatggagtacttgggctggccgtcgtaccggaggatgccccagtggcgctcgaagttgcccggcgccacgctcttggcgtcctcgtcgacgaggctgaacaggtacacctccacgtactggttcggccgcagcggcgtcccggcgttggacgccagcttccggagcagcccggcgtagaaccgctgcgcgaggtccgccctggcgtgcttgtcgccgtcggttggccccccgacctcggcgacgacgacgggggaggccccccgacgccggcgggcgaccagcgccgactcgagcgggntcggaagctggc

SEQ ID NO: 6762 - DNA, 2700 bp, Oryza sativa
  Clone ID: PAT_MRT4530_13420C.1
atgcagcagccacccttcctcctcgctctagccgtcctcgtcgttgtctcgtcgtgcgtgcggctcgtctccggcgccggcgatggggcggcgacctacattgtctacctgaacccggcactcaagccggccccgtacgccactcacctacactggcaccacgcccacctggcctccctctccgtcgacccctcgcgtcatctcctctactcctacacctccgccgcgccgtcagccttcgccgcgcgcctcctgccgtcgcacgtcgcggcgctccgcggccaccccgccgtcgcgtccgtccatgaagacgtcatcctcccgctccacaccacgcgctcgcctctgttcctccacctcccgccgtacgacgcccctgacgccgacggtgcgagcaccgacgtcatcattggcgtgctcgacaccggcgtctggcccgagagccccagcttcggcgacgtcggcatgggcccggtgccttcgcggtggcgcgggagctgcgagaccaatgccaccgacttcccgtcgtcgatgtgcaaccgcaagctcatcggcgcccgcgccttcttccggggatatggggccggcggcggcgggaacggttcccacgtcagcctcgagttctcctcgccgagggaccacgacggtcacggcacgcacacggcgtcgacggcggccggcgccgtcgtggccgacgcgggactcctcggctacgcggaaggcacggcccgcggcatggcgcccggtgcgcgcgtcgcggcgtacaaggtgtgctggaggcaggggtgcttcagctccgacatactagccggcatggagaaggccatcgatgacggcgtcgacgttctctcgctgtctcttggcggcggcgcgttcccgctctcgcgtgaccccatcgcggtcggcgcgctcgcggccactcgccgcggcatcgtcgtggcgtgctccgcggggaacagtggtccttctccgtcgtcgctggtgaacactgctccgtgggtgatcaccgtcggtgcaggcacgctcgacaggaacttcccggcgtacgccgagctcgggaacggcgagacccacgccggcatgtcgctctactccggcgacgggctcggcgacgagaagctcccggtcgtgtacaacaaaggcatccgcgccggcagcaatgcgagcaagctctgcatggagggcacgctggacgcggcggcggtgaagggcaaggtggtcctgtgcgaccgcggcggcaactcgagggtggagaaggggctggtggtgaagcaggccggcggcgtcggtatggtgctcgcgaacaccgcgcagagcggcgaggaggtcgtggccgacagccaccttctccccgcggtggccgtcggcgccaagagcggcgacgccataaggaggtacgtggagtcggacgccgacgccgaggtggggctaaccttcgccggcacggcgctcgacgtgcggccggcgccggtggtggccgcgttcagctcgcgtgggccgaacaggcaggtggcgcagctgctcaagccggacgtgatcgggccgggggtgaacatcctcgccggctggacggggtccgtcgggccgaccgggctcaccgtcgacgagcggcggtcgccgttcaacatcttgtcaggaacatccatgtcatgcccgcacatcagcggcctcgccgccttcgtcaaggcggcacacccggactggagccccagcgcaatcaagtcggcgctcatgaccaccgcatacaccgtcgacaacaccggctcgccgatcgtcgacgccgccagcaacaccacggcgacgccgtggtccatcggcgccggccacgtggaccccgtcaaggccctctccccgggcctcgtctacgacacctccgtcgacgactacgtcgccttcctgtgctccgtcggcacgtcgccgccgcaggtccaggccatcacggcggcgcccaacgtgacgtgccagcggaagctgtccagccccggggacctcaactacccgtcgttctccgtcgtgttcggccggcggtcgtcgtcgtcgcgcagcaccaccgtcaagtaccggcgcgagctgaccaacgtcggcgacggcaggtcggtgtacaccgcgagggtcaccgggccgagcgacatagccgtggccgtgaagccggcgaggctcgcgttcaagaaggccggggacaagctgaggtacaccgtgacgttcaagtcgacgacgcccggtggcccgacggacgccgcgttcgggtggctgacctggagcaacggcgagcacgacgtgcgcagcccgatatcgtacacgtgggggatgtgacacgtatcgattattacgggcttacggcgattaattaaccagcatgctaacatgacgggcaagatgggagattggaagtgttcgaccggaggctggaagaattctggcttcgtttatgtgttgctatgttggttgtcctggcaagctagctgggcgcgcggtcatcggtatgtgttatccggtgatatctttcagctttatgagtttcccaaagagggattataaggccgctctagttcgtcgccgtcagctggctcccggtgtagctaattttacttcacggtgttgtacttctgttaatcacggcgaagcaaagaaaataagagacatgacatgtacgtcgatccaaaaagaggcctaattagtgctaaagccggaacgccaccc

SEQ ID NO: 6763 - DNA, 369 bp, Oryza sativa
  Clone ID: PAT_MRT4530_13421C.1
atggcaagcttcactacctccacatcaatctccagggctacctgcctcgctgtgcaagagttccacttccaggaagcatgttctggtggtctgacaactaagcagggggaacgagggcagcacgatgacagaggtggtcgtcatgggacgaagatggctgatgaggagttaggtcccgatcttccgatagtttcccggcaacttagtaggaattttgatgtggaaccaaatccatcagaaagtagactccataagctttccaacaagtactcatgggccctgaaattccttctagaacagcggctaggtccgtttgaagttgatgctatcaggaggcctgaatccgaatccaaaacgtgtataacttga

SEQ ID NO: 6764 - DNA, 565 bp, Oryza sativa
  Clone ID: PAT_MRT4530_13422C.1
atggctgccaacttctcaaagtctgcccttaacttcgtaaagctccgggagagaagtgtcgccggtaccaaattgctgctagacggctgctctcagctgatgtccaaccaacaacaaccgtcagagattgcatggccatgggcccatggaggattttccaggcatgttcagccaggggcggatcgagctgctttgtgggtgaattatgaaaatatacgttaggtgaaaggagaataaatgaattaaatatgatcactcggctgccttttgatgacgacagttccgctgccggagagaaaattgccatattcgtgacaccgataattggatcggtcagaagccactgtgagtgactctcataccaagttatcacaacccgaggccatgacgggataactaagccagatctatagttagccaaaaggcccgcaacccgatagcctggcccatggcacgaagatttgccccgacctaagcacggcaccacccgactttcgtcgggcccgtgccggcctgacccaacttttgtcgggcctgtgttggctcgagctgactgttgggccat

SEQ ID NO: 6765 - DNA, 621 bp, Oryza sativa
  Clone ID: PAT_MRT4530_13423C.1
atgcaggtattgacggtcagatattatgatttaagaaccgtcaacagggtgatgaggacacaactagctcagatataaccatgactaccttatgtattaataaactaaagcatcaacttcaaatggacctagccgctgatctagaaggaatttcagggcccatgagtacttgttggaaagcttatggagtctactttcaaatggttttggtcccatgtcaaaattcctaccgagctgccgggaatctgcaaaacaagccacggattagccttctcggcgaggtcaaccgggtttcggcacgtttgataaccagaggagacgtggtgctacgattgcggggctcagtagcatgtttgttcagaagccggatcgagttgtgtcacgactccgtccaaatcgactgtttatcattacctattggaagatcgggacctaactccctcattaacgggcttgcctacgcatgcgcttgccttctccttctcatgtgcccgcactgttcctagttgggcctccagtagcgaacacaccctaagtttattttatatgtaattgattaagccaacataaattagttatatgcattattttcagcaatgggacaacttaagaatggaagaa

SEQ ID NO: 6766 - DNA, 380 bp, Oryza sativa
  Clone ID: PAT_MRT4530_13424C.1
gacgaggacacaactagctcggatataaccattactaccttatatattaatcaaccaaagcatcaacttcaaacgaacctagccgctgatctagaaagaatttcggggcccatgagtacttgttggaaagcttatggagtctactttaagatggatttggttgtgttgcaatctatcttgttcttgcttgtgttcttcgattcgcatgcagggattagccttctcggtgaggtcaaccgggtttcggcatggttgataaccagaggagacgtggtgctgcgattgcggggctcagtagcgtgttcgtttagaagccggatcgagttgtccagcgaatccacccaaattgattgtttatcaatacttatcagaagatcggg

SEQ ID NO: 6767 - DNA, 210 bp, Oryza sativa
  Clone ID: PAT_MRT4530_13425C.1
ctatcgaacaggggcagttcgacagctctgcctgtcgaacgggggctgttcgtaataaatggagaacacgaccctgtcgaactgcgccagttcgacggatatctggttaggatccaatggggggtgtgcgtagtcggccatcgccggtgcggccagtgctgccgctgccaacaccagcagcacaaccggcaggcgtggggtggttgccat

SEQ ID NO: 6768 - DNA, 629 bp, Oryza sativa
  Clone ID: PAT_MRT4530_13426C.1
agcatcaacttcaaacggacctagccactgatctataaggaatttcgaggctcatgagtacttgttggaaagcttatggagtctactttcagatggttttagtcccatgtcaaaattcctaccgagctaccgggaatctgcaaaacaagccatggattagccttctcggcgaggtcaaccgggtttaggcacggttgataaccagaggagacgtggtgctacgattgcggggctcagtagcgtgttcgttcagaagccggatcgagttgtgtcgcgactccgcccaaatcgttgtttatcaatacctatcggaagatcttgacctaacatccctcatcatatgtcaagactggtgtgattgtcttttggttcattttcggttagctgtgctaggcttggttcttttgcccctctctcaatgaacatcagaggaatgaatgttgaaaataagcttctgtctttaagacagaaaattgaagagagtagttgccaggtcttgtgtcttcaagaaacgaaaaaggagaactttgatctttctgacatcaagaaatttgcccccaagcgctttgactcatttgcttttgccccctccatgggtgcatcagggggaattttaattgtctggcctt

SEQ ID NO: 6769 - DNA, 641 bp, Oryza sativa
  Clone ID: PAT_MRT4530_13427C.1
atataagttaaaataaatggctatgaaatgatatggttttgtttaaccatcgacacagccatcgatgaggacacaactagctcggatataaccatgactaccttatatattaatcaaataaagcatcaacttcaaacggacctagccgctgttctagaaggaatttcagggcccatgagtacttgttggaaagcttatggagtctactttctgatggatttggttccacatcaaaattcctactaagttgccgggaaactgcaaaacaagccacggattagccttctcggtgaggtcaaccgggtttcggcacggttgataaccagaggagacgtggtgctgtgattgcggggttcagtagcgtgtttgttcagaagccggatcgagttgtgtcacgactccgcccaactcaactgtttatcaatacctatcggaagatcgggacctaactcctcatcagccatcttcgtcccatgacgaccacctctgtcatcgtgctgccctcccatctattcaggcggttccctccattgcaccatcagctcagccgatggcgccggcatcgactcccttgcctgctccgtcagcgatggcaccaggccagctggtgaaccctcggttgttaatgagagagcagccat

SEQ ID NO: 6770 - DNA, 480 bp, Oryza sativa
  Clone ID: PAT_MRT4530_13428C.1
gcttgtgtgctttgtttgtcgcactaataacaaaacaaatgatgagaacacaactagctcggatataacaatgactaacttatgtattaataaaccaaagcatcaacttcaaacggacctagccgctgatctagaaagaattttggggcccatgagtacttgttggaaagcttatggagtctactttcatatggttttggtcctacatcaaaattcctaccgagctgcccggaatatgcaaaacaagccacggattagccttctcggcgaggtcaaccgggtttcggcacggttgataaccagaggagacgtggtgctgcgattgcggggcttagtaacgtattcattcagaagccggatcgagttgtgtcgcgactccgtccaaatcaactgtttatcgatatctatcggaagatcggaacctaacatccctcatacactcatgattccaccaccatttcatttggtgcttctccgcgg

SEQ ID NO: 6771 - DNA, 1047 bp, Oryza sativa
  Clone ID: PAT_MRT4530_13429C.1
aaaataaaacagattggaaaacaaatgaccataataataggaaacgctactatatcgctatatgaaaaaaatcgggaacatattaataataagaaaaaactactaaatctactaaatgattataggtagggtacggccattatgatgaggacacaactagctcggatataaccatgactaccttacgtattaatcaaccaaagcattaatttcaaacggacctagccactgatctagaaggaattttagggcccatgagtacttgttggaaagcttatggagtctactttcagatggttttggtcccacgtcaaaattcctaccgagatgccgggaatctacaaaacaagccagggattagccttctcggtgaggtcaaccgggtttcggcacggttgataaccagaggagacgtggtgctgcgattgcggggcttagtagtgtgtttgtttagatgccagatcgagttgtgtcgcgactccgcccaaatcgattgtttatcagtacctatcggaagatcgggacctaactccctcatcagccatccaccccatcaccggcgaacgtcacaaggtcatcgtggacagcaccaacaacggcgatgtgtccaccctggctgaggaccacttcactgtccgcgtcgtgaggaggtacctccgtctcaaggggcggctcggtgaggtgactctctgtatgctaagcgaggagctcgtcggtgccatgaggctcgccgatgtcaagaagctcatgtttcgcatcagggcagtcagacttgctgtgctgaggcggtccaaggcagcgaggatgtccaccgcgccggagctgctgccaaagttggctcacctaggctctttcttccgtgctccagcagccctggcgacaacacaattggccatatttgcccttgaaggtttgtcccacggtccacatcggcggcacgatgtcgccgaacacgatggcgctgccatcgctggtggcgacgcgggatgagaggcccggccgtcgtcgcgggggccttgacggccggccatgggcgcggacgtccat

SEQ ID NO: 6772 - DNA, 1601 bp, Oryza sativa
  Clone ID: PAT_MRT4530_1342C.1
gagagagaactagtctcgagtttttttttaaatggtaaagagaaattgactcatcagaaatcctgcctgaaaacaaccgtgttcatgaaggattttgcatttggtgcaaggtaatacaaatgttcttcacattggctagtcaaaattttctattagatatcacagtagatggacgctacgctgacaacagttgatagggcatgtaataagatgcaagatgaaatagtacatccacctagcatgtgttatagcacaacaatgtttggaatctgttaaaataactgctcacttaatgctcgcattaggaacagaagatctacatggaccagcagatgtagtgaagggtacccctcggtatgttgcaattccatttccatcagtgtgaagatccggtgtgatcttgtcgagctgtttcttcttcggattaagaacatcttctggcttcccatcaaaccctgcaaatgaaatacgctctccaggcttagctccttctggaggaatcaatggctctacaactgtatgatcttgatttgaagcacacaagaccaatccggcagacattacgtctcgcagcttcccaggcttcacattcgtgattaatacaacatgccgattaacaagttcctctgggctgaagaacttggcaagcccactaacaacttgatgcacattgccatctcccaaatctatctcctcaaccaagaggctgtcagcagatgggtgcttccatgctttgcgaataaggccaacctgtatattcaggatactgacattgcattctgagtccttttctgcagttttctgtggagctttatccgcaactccctcatttggttttcctgcagatttctcctgggctttctttttatccccagaaggtttgttattttttgctggagtaggatttgccttattctcaggagctttattctctggtgcagctttcttggaatcaacatttgcatccgatttgcccacattcttctgtcctgaaacaactttctttgaacttggatcagtgtcacctttatctgccttctttggatgagaaggtggatcgaagacagatttggtcaagttaaccttttgtactgttgtgccaaaatcaacgatgttctggatatagtccatccaccgcaatacatgtggatatttctgcaactcgttttcaccaagatgactcacaaaaacttgtatggttgcaaacacaacaatatcagcaactgatggtttaaaaccattacccaacagaactgatttctgggacaagtcttgattcagattaccaagcaatacatgctgttctccacattttccaacaaaattgctggaaaattcaacccatttcagtacctcatcttcactcgatttcacaatatgtgagaacagggtggcaatatcactctcttcaatacttgtactggatattgtattcggatcgaggctgaggttcttgcagagcgcgtaggccatggcccgcttgctcgccgcgaagtccgccgccgccgccgccattagcacgtcgagagaggttgcgccgagcttgggggtgacggacgggtgggcggacccgtgggcggacgcgtgggcggacgcgtggg

SEQ ID NO: 6773 - DNA, 496 bp, Oryza sativa
  Clone ID: PAT_MRT4530_13430C.1
ggggggggggggagtgttaacatactggaaacaccgacatactctaccctagccattttttgctgccttatgttctcatcatcctctgccgcaggggtactgctgctgccactccaataatagctgaacaatgttctttccgacatgctgcgattcagtctacacaaacaaaatgaataagtgctaaatcaggagctaaactgctcatggactgaatcattccaaatattcaattaagtaatcacttattacaattacattacatattaacatacctttcttctgtcaagctggtctgcagccgccggactacagatgctcgcccatgggctccaggctgcgggctgctcttgctcatctgctccgttgccttcgcaagctcccgcggcggcgtgccctgctgctgctccttttgatgctcgagcggcctcaccgccgggagctccgctgctcaccaggtcctgcaagctgcccgcacacccttacacaatgctgc

SEQ ID NO: 6774 - DNA, 454 bp, Oryza sativa
  Clone ID: PAT_MRT4530_13431C.1
atgaaggaatgtagaaatatacttactcagatggagaaagacacaactagctcggatataaccatgactaccttatgtattaatcaactaaagcatcaacttcaaacggatctagccgctaatctagaaggaatttcggggcccatgagtacttgttggaaagcttatggagtctactttcatatggatttggtcccacgtcaaaattcctaccgagctgtcgagaatttgcaaaacaagccacgtatctcccttctcggcgaggtcaaccgggtttcggcatggttgataactagaggagacgtggtgctgtgattgcagggctcagtagcgtgtttgttcagaagctggatcgagttgtgtcgcaactccgcccaaatcattgtttatcagaacctttcggaagatcgggacctgacatcccctcacagccgctgctgccgtattccaacca

SEQ ID NO: 6775 - DNA, 522 bp, Oryza sativa
  Clone ID: PAT_MRT4530_13432C.1
catcaacttcaaatggacctagccgctgatctagaaggtattttggggcttatgagtacttgttggaaagcttatggagtctaccttcatatggttttggtcccacgttaaaattcctaccgagctgccgggaatctgcaaaacaagccacggattagccttcttggtgaggtcaaccgggtttcggcatggttgataaccagaggagacgtggtgctgcaattgcggggctcagtagcttgttcgttcagaagctggattgagttgtgtcgcgattccgctcaaatcaattgtttatctatacctatcgaaagatcgggacctaactccctcataagttggtatcagagcgcggttgcccgttaggtaatttatcttcccataaccagaaaattgccacacaaaaaatttattctttacctagacaatttgagccgttgcattgttctattagattttgctttgttgaattctaggttgcatcgtcatgtcgagtgctggtttagttttagatttaatttt

SEQ ID NO: 6776 - DNA, 327 bp, Oryza sativa
  Clone ID: PAT_MRT4530_13433C.1
atgacgacggttcacgtcatggtagaccacagcgccaaggacgacaaaagtggcagggattccctggatgctacgccattgcttggcgacaacaacggcgggtctttcctcacaccaaggctcggttcctcatcgggatcggtggcgacgcctgcttgccgtctctctatcacatggtgcgatggttgcgatcaccgcgtcgcgagggttgctatgctggcatcgctgccaccagctatctcctctccactgctcttcttcctaccagccgccagccgccacccgccaccgtctctcctgtccgtcacacatcctgaaaagagatga

SEQ ID NO: 6777 - DNA, 768 bp, Oryza sativa
  Clone ID: PAT_MRT4530_13434C.1
tggagtcctctaccatcgctgacggtatctgcctcccccctcccccaaccccaacgcctccccctcccccctaccccctcgcataagggagcaaggtcctcaccaaggaagccccgcctaggggtggcaacaaggcggggtgggtccaggttgagctggattgccccgcccccaccctcctacgggtatccccgccctcggccccacaatgaaagttggatgaaaagcatcacccgtcccgcccccacctccccctgccccggccccgtaggggcgggtcccaagccccgcagccgccttcctcacagctggttggcacgcaggcggtcttcttggcggcagcaaggcagcggagaaaggagactatttcttcaacatgactaatggtcaagcaattccaccgcccactcccactccactcctctcctctcctcccactctcctctcctctcctctctctccctccctctccctcccctccacgacagcacgggtgcagcgacgggaggagagcatgcggcggcggcggcggccgccgtgggcgacagcgacggtggcgcgcgccccctcgcctccttcccctaccagatccggcggagggtgggcttgggggcggcggatccggcggcgcttgccccctcccctccttccccttgcagatccggcggagagggcagcggatctggcggcggcggccacgggcgacagcggcggcggtgtgcgccccctcccctccctccccgtgcagatccagcggaggggggggct

SEQ ID NO: 6778 - DNA, 404 bp, Oryza sativa
  Clone ID: PAT_MRT4530_13435C.1
gaatagtatctacccatgtgtacaaatatgtactccccgagtcattgtaaattacctctcgatcaataaaactactctagacgcatcaccacccacttttccgaggttttcacttatcaccggtggaacttggcacctcacgtgaggctgcatcgacttcgatctccggtgaaggggtaagtcctacgttccgccagctcaggcaattgtattggctatgttggtgtgcttcaaagctgcatcacttcgatctcttggatcgctctggttcggttgatatagttgcctgcttacctatcatatatcttggctaatctagtttggtagctcgatttactcgtattggttgggatctgctttagggttttcgccggtatcaactaaattgcttttccagattagat

SEQ ID NO: 6779 - DNA, 449 bp, Oryza sativa
  Clone ID: PAT_MRT4530_13436C.1
ggaacaaatataattttcatcaagaaaattcgagttcaacaattagataattatatttaaaaaataacatagataacaaagagtaattgctatattagtctgtcttcctagtagatggcatcccaacacattattgtctgaaataaggggtaccatcagaacagtaagaacacacttgcatagattcaaaacctcaagctgcttttcatctgtcaaaatagttggaattatgctgaaaggttaaagattttttccaatgcatctgacagcaaaacattcttataagacatggcaattcagagcaaatggcttcctattagtttatacagtttaaactgtgatagtgacttatatccagaaatcatctgcttataacacatgatactgattttgactgcaatttagtcctagttcctgcactaaccaatttaggcatcccatggagaatg

SEQ ID NO: 6780 - DNA, 1684 bp, Oryza sativa
  Clone ID: PAT_MRT4530_13437C.1
atggcgtcgagtaccagcgacatccccgaggggagggagaagctgaagaggtcagggagtctggggagcagcgacacggcgtacgtgcgcgccgacaagatcgatctcaccagcctagatatccagctcgagaagcagcttaccaagacctggggcaaggccaatctcaaggcgcatggccccaaggaggactgggagatcgacctcgctaagctcgagatccggtacgtcattgctcaggggacctacggcaccgtgtatcgcggcacgtatgatggccaagatgttgcagcaaataagattttcctccaatctctgaagcttaatattccctactccatgctgcatgtctttttgctggataaagatttgctttctttgaccccatggttgtcaagtcaagtgaagctgttggattggggagaagatggttttgccacagaagctgaaactgctgctttgcggacatcatttaagcaggaggttgcagtttggcataagctcagccatcctaatgttacaaagtttgttggagcctcaatggggactacagatcttaagattccgaccaacaattccaatgctggtgcacgcaccaacttgcctgccagagcatgttgtgttgtggttgaatatctagctggaggaactttgaagcagtatctgataaagaacagtcgacggaagcttgcatacaaagttgtagttcagcttgcattggatttggccagaggattgagctatctccactctagaaagattgtacatcgtgatgtcaaaactgaaaacatgctccttgatacacagagaaaccttaaaattgctgattttggtgttgctcgggtcgaggctcagaatccaaaggatatgactggtgcgacaggcactcttggttatatggccccagaggttcttgatggtaaaccgtacaacaggaaatgtgatgtttatagttttggaatttgcttatgggaaatctattgttgtgacatgccatacccagacctaagttttgccgatgtctcatctgctgttgtccatcagaacctgcgcccagacgttcctagatgctgtccaagtgcattcgcaaatatcatgcggaaatgctgggatgcaaatcctgataagcgtcctgatatggatgaggtggtgcagcttctagaggctcttgacacaagcaaaggtggtggcatgataccagatggtcagtcatctggttgcttgtgcttcacaaaggctcgtggtccatagcttccttttcgtgatacagtcttcccttgaccgcgttttgcccatctacatgactgggaaaaaccatggcatatgcttctctttgccacctgtgcagtttggcgcttacaattccccatggctccttgccatctttgtacgttcgttgcagttgtcatatgggcctttgtggtcaacagcctttttctatagcggtgtgatattgtaacagtaattcttgagagagttggtgacactccgtcacatgtattatactagagggttatacacacacataccgggtcgtgcattcttgatacttctacgtttctgtgcgtttggtgccactggtcaatacttcttttgaatcatttttactgttcatatccaaaatgaatacaataaagggcggaaagatgtttgtgttcaaaaaaaaaaaaaaaaaaatgcagcc

SEQ ID NO: 6781 - DNA, 490 bp, Oryza sativa
  Clone ID: PAT_MRT4530_13438C.1
atgtttttcaccggaatgaaaaagttcaaaaagcaccaaaacatgatttttggacatattggagtattgggtgcgttagtggcaaaaaatcacttcgtgattcgcacggtgaacttttgtgaattaatacctatattggcacacgtgggtgcgatgtttttcactgcaatcaaaaagttcaaaaagcaccaaaacatgatttttggacatattggagtgtattggatacgttcgtggcaaaaaatcacttcgtgattcgcgtggcgaacttttgtcaattcatgccaatattgacacacgtgggtgcgatgttttttgaccggaatgaaaaagttcaaaaagcaccaaaacatgatttttggacatattggatgttgtattggatgcgttcatggcaaaaaaatcacttcgtgattcgcgcggcgaacttttctcaattcattccaatattggcatatattggcacacatgggtgcgatgtttttcaccg

SEQ ID NO: 6782 - DNA, 2559 bp, Oryza sativa
  Clone ID: PAT_MRT4530_13439C.1
atgcggcggcatccgctgctccctctcctcgccgccgtccttgtcggcgccgccgtccgcgccgggaagatcgccacggaggtggtcgtgccggacttcgtggcgtcgtacctgctgttcattgacacctacggcgtgttcctccagtccggcggcggcggcgcgttccaggccgtcgtgtacaacccggcggggcagcaggaccggtactacctcgccgtggtgcacgcgccgtccaagacctgcgtctgggtcgccaaccgcgacgcgcccatcaccgaccgcgccgcgccgctgcggctcacggcgagggggatctccgccgaggatcccaacgggaccgtccggctccccgtcgggggcttcttggcgtcggccgtgtcggactcggactacacggtgggcggctaccggctcgacgtgacggcggccgatgcggcgctgacatggaacgggtcactgtactggctcctgtccatcgacgtcaaatccaccagagatcgcgacggcgccgtggcgtctatggcggtgaacggcaccggcctgtaccttctcgccgcggacgacaccgtcctcatccagctccccttgccggacgccaagctgcgtatcgtcaagctgggcgtggaagggaagctggtcatcacaagctacgcttcggcgaacgccacgtcgccgtcgccgacggacgctgggttcgtcgcgccgaacagcgggtgcgacctgccgctctcctgcggcgcgctcgggttctgcgcgcccaacgggaacgcctccagctgcacgtgcccgccgctgttcgcgtcgtcgcatgacggtggctgcacaccggccgacggctccaaggcgatgaccgtcgcctcctgcggcggcgccggtggtgatgccgccccgacctcgtacatcagtctcggcaatggtgtcgcgtactacgccaataggttctcacggccagacatggtcggctccaacgggtcgtcgtgccaagcactctgctccggcaactgctcctgcctcggttacttctacgacgagtcgtccttgtcttgcttcttggtgcagcaccagatcggctccctggttaacgccaactcgaggcgaggcgacatggtcggtttcatcaaggtccagagctcgcagtcaccggggtcgccgagcggttcatcttccaacaacagcacgctcatcgccatcctcctgccgacgatcgtcgcgttcgtgctcgtcgtcgtcgtcggcgccgtcatcgtcgtgtcgtggcgcaagcaagagcggcgcgcggggaggcgggcctcgcgatccagggacgtgcagctccggcgccaccgctcgccggcgtccgactcggcgcaccttgtctacggcaacgacgacgacggcaacgacattgtgatccctggactcccgacccggttcacgcacgaggagatcgaggacatgaccaacagcttccgcatcaagatcggcgccggcgggttcggcgccgtgtacaaaggcgagctccccgacagctccgccgtggccgtgaagaagatcgaaggcgtcgggatgcagggcaagcgcgagttctgcacggagatcgccgtcatcggcaacatccgccacgtcaacctcgtccgcctccgcggcttctgcgtcgagggccagcgccgcctgctcgtgtacgagtacatgaaccgcggctcgctcgaccggacgctgttccggccggccgccggccagccgctcgagtggaaggagaggatggaggtggcgatcggcgcggcgagggggctcgcgtacctccacttcggctgcgaccagaggatcatccactgcgacgtcaagccggagaacatcctcctcgccgacggcggccaggtgaagattgccgacttcgggctcgcgaagctcctcacgccggagcagtcggggctcttcacgacgatgcgcggcacccgcgggtacctcgcgccggagtggctcaccaacacggcgatcaccgaccgcaccgacgtgtacagcttcgggatggtgctcctcgagctcgtgcgcggccgcaagaaccgcagcgagcacgtgagcgacggcgccggcgccgccaccggagacgactccaactcctcgaacgggacgacgggcagctcgtcgcgcggcgcccggagcgattacttcccgctcatggcgctggaggggcacgaggcggggcagtacgccgcgctggccgacccgcggctggaggggaaggtggtcgccggcgaggtggagagggtggtaaaggtggggctctgctgcctccacgaggacccgcagctgcggccgagcatggcgatggtggccggcatgctcgagggcaccatggaactgtgggagccacgcgtgcagtcgctcgggttcctccggctctacggccgggggttcgccggaccggccgacggctcgggcggcagcggcggcggcatcaagcaagccatggcgggttccaatggggaccacacaaggtcggggacgacgacggtgacgacgatgagcgggtggccgtcgtacatgtcgtcgtcgcagctctccggtccaagatag

SEQ ID NO: 6783 - DNA, 403 bp, Oryza sativa
  Clone ID: PAT_MRT4530_1343C.1
ccaagtcttacgtcttcgttggccccaccatgtcagtgacccagtcaatctccggcgatgggggccggaatgagcagcggccggcggacgagctggtacggcggcggcggcggcagcggcgtctgccggccgagagggatgctgcccctgctggcgctgcaggtgctgctcgagtacggccgcgcgggcgccagccggacccccgtgacggcggcgctgctcatcaacaacgcgctgctgaacctgcgcccatgctctgctcgacgcgctcctgccttcgctcaagctcgtccccttcaaccatcacctcatcatacactagctggacctagacacgcttcttccttgctgatttctaccacttgcgcgaaactcactacttcttcaacaagtcatctgtctt

SEQ ID NO: 6784 - DNA, 561 bp, Oryza sativa
  Clone ID: PAT_MRT4530_13440C.1
actcagctggagtgctggaggaacatgttttggtcctacatgattggtgagtgctttcactctccgtggttcgtgcaatgattgttttggggtgcgccctaagaaggacaaaaaagggggaatagtaaactcctgggtaggggagaattcacaagttttccagtttccgcttgaatgtgtttggagtttttgcgtgtggcatgcagtgggattactgccattggagtaccaaggaaaagggatgttgtacttaatgacacattgagggaacctgtgggctgttgtgctgttgtgacccaaagtgcggatgtgactgggtgtggaaacccccccatgtgtgtgtgatgtgcagttgcatgtgtgtgtgttgtggtggatgatgtgctgtgggtggtgaattttaattcagttatggcccattgggcttggtgaaatggccagtgcagtgggctcaaatgcaaatgtggctgtgcctgactgtggtgcttgcgacgtgtgatgatgaatgaaaaagatggccacccccgagcaatgttggaatgcaaaaaaaaaaaaaaaaaa

SEQ ID NO: 6785 - DNA, 2914 bp, Oryza sativa
  Clone ID: PAT_MRT4530_13441C.1
ttttgtttttttgttaaaacaggacaaaatttgtatagacctcacgaatgcacaaattaatccctctgtttacaaatcaaccaaaatgatcaatgcaaccgtataatctatctctaacaacacaatcttctcgccggtgtgcgccgccctatcttggaccggagagctgcgacgacgacatgtacgacggccacccgctcatcgtcgtcaccgtcgtcgtccccgaccttgtgtggtccccattggaacccgccatggcttgcttgatgccgccgccgctgccgcccgagccgtcggccggtccggcgaacccccggccgtagagccggaggaacccgagcgactgcacgcgtggctcccacagttccatggtgccctcgagcatgccggccaccatcgccatgctcggccgcagctgcgggtcctcgtggaggcagcagagccccacctttaccaccctctccacctcgccggcgaccaccttcccctccagccgcgggtcggccagcgcggcgtactgccccgcctcgtgcccctccagcgccatgagcgggaagtaatcgctccgggcgccgcgcgacgagctgcccgtcgtcccgttcgaggagttggagtcgtctccggtggcggcgccggcgccgtcgctcacgtgctcgctgcggttcttgcggccgcgcacgagctcgaggagcaccatcccgaagctgtacacgtcggtgcggtcggtgatcgccgtgttggtgagccactccggcgcgaggtacccgcgggtgccgcgcatcgtcgtgaagagccccgactgctccggcgtgaggagcttcgcgagcccgaagtcggcaatcttcacctggccgccgtcggcgaggaggatgttctccggcttgacgtcgcagtggatgatcctctggtcgcagccgaagtggaggtacgcgagccccctcgccgcgccgatcgccacctccatcctctccttccactcgagcggctggccggcggccggccggaacagcgtccggtcgagcgagccgcggttcatgtactcgtacacgagcaggcggcgctggccctcgacgcagaagccgcggaggcggacgaggttgacgtggcggatgttgccgatgacggcgatctccgtgcagaactcgcgcttgccctgcatcccgacgccttcgatcttcttcacggccacggcggagctgtcggggagctcgcctttgtacacggcgccgaacccgccggcgccgatcttgatgcggaagctgttggtcatgtcctcgatctcctcgtgcgtgaaccgggtcgggagtccagggatcacaatgtcgttgccgtcgtcgtcgttgccgtagacaaggtgcgccgagtcggacgccggcgagcggtggcgccggagctgcacgtccctggatcgcgaggcccgcctccccgcgcgccgctcttgcttgcgccacgacacgacgatgacggcgccgacgacgacgacgagcacgaacgcgacgatcgtcggcaggaggatggcgatgagcgtgctgttgttggaagatgaaccgctcggcgaccccggtgactgcgagctctggaccttgatgaaaccgaccatgtcgcctcgcctcgagttggcgttaaccagggagccgatctggtgctgcaccaagaagcaagacaaggacgactcgtcgtagaagtaaccgaggcaggagcagttgccggagcagagtgcttggcacgacgacccgttggagccgaccatgtctggccgtgagaacctattggcgtagtacgcgacaccattgccgagactgatgtacgaggtcggggcggcatcaccaccggcgccgccgcaggaggcgacggtcatcgccttggagccgtcggccggtgtgcagccaccgtcatgcgacgacgcgaacagcggcgggcacgtgcagctggaggcgttcccgttgggcgcgcagaacccgagcgcgccgcaggagagcggcaggtcgcacccgctgttcggcgcgacgaacccagcgtccgtcggcgacggcgacgtggcgttcgccgaagcgtagcttgtgatgaccagcttcccttccacgcccagcttgacgatacgcagcttggcgtccggcaaggggagctggatgaggacggtgtcgtccgcggcgagaaggtacaggccggtgccgttcaccgccatagacgccacggcgccgtcgcgatctctggtggatttgacgtcgatggacaggagccagtacagtgacccgttccatgtcagcgccgcatcggccgccgtcacgtcgagccggtagccgcccaccgtgtagtccgagtccgacacggccgacgccaagaagcccccgacggggagccgctgcggcgacacgagcacgtcggtgggccggtcgaacgactgccagagcgtgcggttcctcccatcgagcagcgcgaggttgccggattcgtcgagccggagcgccgccacgggggacgcgaacgccggcgtcgaccacacgacggtcccgttgggatcctcggcggagatccccctcgccgtgagccgcagcggcgcggcgcggtcggtgatgggcgcgtcgcggttggcgacccagacgcaggtcttggacggcgcgtgcaccacggcgaggtagtaccggtcctgctgccccgccgggttgtacacgacggcctggaacgcgccgccgccgccggactggaggaacacgccgtaggtgtcaatgaacagcaggtacgacgccacgaagtccggcacgaccacctccgtggcgatcttcccggcgcggacggcggcgccgacaaggacggcggcgaggagagggagcagcggatgccgccgcatcgacggtggcgagcacatgggacggcggcgggggaggggtcatctcatgggggaggcgggagcggc

SEQ ID NO: 6786 - DNA, 2253 bp, Oryza sativa
  Clone ID: PAT_MRT4530_13442C.1
atgtccgcctcgcagaatttgcatcgtctccctgagttctgtgtgatccctgcaacagcatgctcgagggagccaggacttcctaggatcgtcataagatcaaatatgggctccgatgacaataaaagatttgatgattttcatgtcatcacaaacggaccaggaagtgatgcctattctaatgaggaatccatcaatctagattcctatattgcaccaagcacatccttctgtagcaaaatctacaacccccaattatacgtggagaaaggaaatgggacaacagattggtgccaaactagtggaggagactatcctgagaaaagcagcataaattcagatataactctcagctacatagataagatactgatgcaggaggacattgatgacagaggcaatgaagatactgctcttcaagctatggaggagcccttctatgaacttcttggagaaaagtatccggcattccctcagcaacaaccactttgtgtatgtgatcacctgcagaacctcagtgccaacactgacaagtctaatggtcacgcatgcaatacctggtctgtcactagaatgacaaacattagctcaagtatgaattccaatggcaactttcaagggtttcagtttccatggagtttgtcttccattactagagagacagaacagttcactcatcactcaaatagaatggttgttggtctaaaagtggatggcctttccatttccgaaaagcctagccaggacaattgttcacttcaaattgatgcgcattacatgaggaagcatccattgtttgaggttcatgatagaaaaagttatccgtgtattgaagatcttgatttgttagaaggaaggagcaacaagcagtatgctatttactatgatgaaccgattcgggatgagatgtttgacaacgttctactatgttctgatcataagcctctagatgaaggtgttagtttgagcagagccatgacaaacaattcaagcaagtcttcacaaattggacaaggaaaaacatcagctcggcgaaagacaacaggcaaaaggatacaaaagagagatgttgtggatctaagaaccctccttatcaattgtgcacaagcagtatctgtgagcaaccatagcctagctagtgacatactgaagataataagacaccatgcttcacctaccggggatgattcccaaaggctagcactttgcctagcgtattgccttgatgtacgattaacgggaactggaagtcagatataccacaagttcatcaccaaaaggaggaatgtaaaggatattctaaaggtccacattatagattttggcatttgctttggtttccaatggccatcactatttgaagaacttgcaaaaatagaagatggaccacctaagcttcggattactggtatagaattacctgagtcaggcttccgaccatatgctagaagtaataatattgggctgcgattagctgattatgctaaaacatttaacataccctttgaatatcagcatatatcatcaaataaatgggaagccctctctcctgaagattttaatattgagaaagatgaagttctcatagtcaattgcatttacagaataaaggatcttggtgatgagacaatatcaattaacagtgcaaggagtagggtgctcaatacaattagaatgatgaagcccaaagtttttgtccaaggagtgttgaatggatcttatggtgtccccttctttttaacacgtttcaaagaggtcatgtaccactacaattcattatttgatatgcttgataaaaatattccacgagataatgagacaagaatgataatagagagagatatctatcaatatattatgctaaatgtcattgcatgtgaaggaccagagaggattgagaggccagagagttacaagaagtggaaggtaagaaaccttaaggcaggactggtgcagcttccattgaatccagccatcgtcagagaaacacaagatatgagttcagacaaggctagtataagattatgtttagtatgttacggcaacatatacgattcctaccacgtatcaggtgatactcgtgaggtatcatgtgatacctatcaggtatcagatgacttctaccacgtatcaggtgatactcgtgagatatcatgtgatacctatcaggtattagacgatttctaccacgtatcgggtgatacttacgagatatcagatgatacctaccggatatcaggtgattcctactag

SEQ ID NO: 6787 - DNA, 330 bp, Oryza sativa
  unsure (1)..(330): unsure at all n locations
  Clone ID: PAT_MRT4530_13443C.1
tagacgacgtgtcgaagaaagggacaaggcggcgagnggcatcgactcgtgcccaagttcccaacccagcagctgtcaatagatnttaaggtcaggcctaatcatttttntcttttnanaattaggnctaatcatttactatgatgcattgtatcgatatggcgacatntatcaatttgattttctcccnaagttatagtgcattgcaagttcatcattacttttgataataacaatgtcaggtgaatattgtccatgganagaagatgangggtgcggtggcaacggaaactctgctctagacttgccccggaccttgctgcngctgcn

SEQ ID NO: 6788 - DNA, 359 bp, Oryza sativa
  Clone ID: PAT_MRT4530_13444C.1
atgccgtacctcgggacacggagcgagctccagcggccgcgggaggaaaaatacgccggtgggaagtggtcgccggtgtccggagaatccgggaggcggaaggtgatcgaagatggggccagcggagccgagcaggtggggcgacgtgcgggcgaagccggcaggcgggtggagtggctgagaccagcggagccgagtgggtggcggcgagcgaaaccagtaggcgggtggagcagaccagcggagccgagcgggtggagagctggcggcggcggggcacgaagtggaggattagggggtgctgcccgtgctcgttgccgttgccgtcctcctcaccatgctccaatggccgtgaatag

SEQ ID NO: 6789 - DNA, 389 bp, Oryza sativa
  Clone ID: PAT_MRT4530_13445C.1
tatcatctatgagaggccccgttaaggattgtgcggtggcgtcatcttgtggagctcacttggagctcacttggatccaacctccgccgatgttaggattcaaagtttcgtcgtcgacgttgaagacagaggcagttcgagcaggactcaattagaaagaaagaaagatgcacgactgttcagcagctgtggacgagacaaggaaatccaaagctgggctgccccttgaaattctggcccacgtgagagatgaggttatgggtggtatggatcacaccaacgtgatgacaaagagtacgtatacacgcctcagccgaaagtcgcctctatcctgcaacgctgctccagcccaagtttcagaatttgtctccccttactctggcaacaat

SEQ ID NO: 6790 - DNA, 909 bp, Oryza sativa
  Clone ID: PAT_MRT4530_13446C.1
atggcgagacgaggacgcacatccattgttcgtgaggtaaaagagtcactgcagacaatagataaaattggtgaatcaaaacgtgatgcgaaaaaagcaggaactagtggtattcactctataaagcagatgaccaacacgatgtctgatgctcaaaattttgtgaaatggtgccgtagtgaacatggaataaagtctatctgtgaactgaatgaaaggcattatgtatcataccttgcccatttgagtgaaaagggcgtttctcaaggacatcgagtaaatgttgaaacatctcttcggttattagaaaaagggtttaaagagcgttctaagcgtttttcggatcatctctttacttcaataaggttttgtccggaaaggcgcttagaaaagcctctgacaggctctgatgctaaaaatcgttcttatacggaaaatgaagtgcaattaattcgggagaattgctctgaggaggtcacaaaggcagttgatttaatgcatgaaatgggtttgcgtgtgaaagaggctgtcaatgtacgagtagaacattttattcccaatgacaaaggcactggctggtgtttggcgatttctaatggttcaggaataacaaagggggggcgtttccgacaacttaatgtgccgcaacacttagaaaagaaactagaaagttggatagctgacaaacctccagaagaacggatagtgaacgtatcttactctacgaaacagatgatgaaccgtgtgttagaaaatagaaaaatgggacgtgctgcagactatggcattttaagtgagcgtgataagcaactgtatacaacagcaaaaagagcaatggatcaaattcattcagaattagggcatggcaagaatcgatgggctttggctatgcgctacatgggtgagtaa

SEQ ID NO: 6791 - DNA, 550 bp, Oryza sativa
  Clone ID: PAT_MRT4530_13447C.1
cccacgcgtccgcccacgcatcggcccaggcgtctgcctcaccctcttcttctccaccggacccgagccactggccgtgactcgacgtccctgtcgagcgaggattgagagccggcaggtgctgctcgctgccagatcgaggggcctgaagcgccatagagagcgcttgcgataaatcctgagaaagcccgaactgaggtacgggcatcaaggcatagcatgggacggacaggggtagctgacctcatggatggcatgggactgggagagctagctgacccaccggcggagttaaagctggaggagttatcgaacacaccagcaccacgattggatgaagcactagagatttccatggttatgcacttcgttgaagcacatgagcctaccatgcatacactcattgtattagacactgctgcaacggggcatacactcagtggataatacttgccagatatgctggatgcctctattgcgaagatctcgatgcttatgagcaagagcgcttatgcatcatcagctgttgcatcagatcttggagcagcag

SEQ ID NO: 6792 - DNA, 1242 bp, Oryza sativa
  Clone ID: PAT_MRT4530_13448C.1
atggccacccgcaagcgcctcgccggcgccgccctcggctgcctctcgctcttcctcctctcccgcgccctcctcttctcccaagacgacccggagcccgtcaagcgaccggacgaggcgtcctcaatctcattgccgcccgaccgcattgccattattgctgctgcacctgcgccgagcccagctactgctgctgcttccgatggctcgccggcgccggcccaggatgaagtccggtgcgacctgttcgacggcagctgggtgtacgacccggccggctatccgctctacgacgccggggagtgccccttcttgagcgaccaggtcacctgccggaggaacggccggccggactccggctacgagcactggcggtggcagcccaggcggtgcgccgccgctctcaggctgcgtggtggggagatgctggagcagtgccgggacaagcgagtggtgctcgtcggcgactcgctcaaccgcaacatgtgggagtcgctcgcctgcatcctctacgccgcggcgcccgaccgctcacgcgccaccgtcgacgacgccagcgccgaccacaagatcttccaagcattggattacaactgcacggtggagttctactggagcccgttcctggtggacctcgacgaccagaccagggtgctgaagctggaccgcctcccggcgacgacgtatcgccggctcgccgccgccgacgtgctggtgttcaacacgggccactggtggacgcacaccggcaagttcagggcgtgggatcacctggagaggaacgggaagaaggtggagatgggagcggaggaagccttcaaccgcgcgctccggacatggacgcggtggctcgatcgaaacgtggactctcacaagaccatggtgttcttccgcagcatctcccccgagcacaagaacaagaactggtgctacaacgagacggctccgatggcgagggcggaggagtacgtggaggcgttcccgagagggatggtgtcgatcgtggagaggaacgtgaggagggcgaggacggcggtggggtacctggacatcacccggctgtcggagctccggcgagacgcgcacccgtcagtgttcacggtcaggggagggaagctgctgacgccggagcagaggcggcagccgggatcgtacgccgactgcagccactggtgcctgcccgggctgcctgacacgtggaaccttctcctctttgcctcctggacctcgcttcgatcctga

SEQ ID NO: 6793 - DNA, 575 bp, Oryza sativa
  Clone ID: PAT_MRT4530_13449C.1
gagcgaagcaagctcgaatcgatttccaacccagaggatttgattagctttgacgcagaccaagatcatctgatcaatggcgtccatgcagaagagccgcgaggagcgcgcggaggcggcggcgcacagggcggccgacgagctcacgccgcagcgggacagcctggcgcgcgagcggatgctggcccgtcagaagcccgtcctctgggcgtcggaagatcccggcccgacgcgcctgcgcagcgcagcgcgggaggggagcgcgagcaaggcttccgcgacagcgaggcgccgccgcctccggatcgcggggagaaggcagacgacagtccgtgcacacggagaggcgcgcgccccgaaagccagagccgcgcgacagctaccgtgcgagaaaggagccacgaacattacgtcgcgcaccgcgagcgtcagcaaatacatgcgagactgtgagcaacgcccagtgcgcgcggacaggacgcgcggaggacggacacacgcggagcgcgcgagagtgatatcgtgagcgcgacaatacggcagcgttacactggcaaagggagaggacgctgcgc

SEQ ID NO: 6794 - DNA, 476 bp, Oryza sativa
  Clone ID: PAT_MRT4530_1344C.1
ttgaaggaacccgtagacgtgaaggaatgccccatatatattctgccagtcacagaccaacgtcgtaacgccgtgtctggtcagcccacccttggcacggggagaaaaactcacgtatgtgtccgtgtcccgtgccacgcgttgaatggtatggtgtgctataatgtcgtatgtctgcacgtgttccagggaggccacagccccgaagccgtcacaggaccacaccggggagagagagcccgcgtgcctctcacactcctagatttcacacacaccattatctatcccacggattatcgagatgagtccggaaagcgagaacttcacgagtaaatgtatattgagaaactagtatcggcgctagagtataaatataaaccacccacaccagtattgacaccacttggtggtgattttatttgatatccgttgtaaattaagggtaccaatttttttaaaaaaaaaaaaaaaaaaaa

SEQ ID NO: 6795 - DNA, 181 bp, Oryza sativa
  Clone ID: PAT_MRT4530_13450C.1
actgatccaattacaaactttttttgttcatcctaaatacgcatctgattgcaatgcatttataaatttatctttggatctctccacacacatctcccaactaaaggagggttgcggggcatgaggaacttatccgtacttcttttcttgggggggagtgaatgcaccaaactcatctctc

SEQ ID NO: 6796 - DNA, 1571 bp, Oryza sativa
  Clone ID: PAT_MRT4530_13451C.1
ccagagtcgggctgcggcatgcgccgcgagggagagagcggtgaaagatcacgaccattgcccactgcccactccctcctctccggtctccatctcccagtttcttcttcctctccgctctctccgctgctctcgtcccgtctctgtccggattgctccgatttcttgctctttacacctgtccatggcggggtgagtggagagcgcgaatcttggatccaacccttcgcgttcttgctcggcgaggatggaattcgggggcgccattgatgatcagagtgaaatgtggggatggcaaagtcaggagtatgatctgcagaaagatttgcttgctgaagaagctgcagatccatctagctgtttgtggagtgaagcaaatcagaatgccggtgatgcttggaccatgtttgatgagcaaactccaataaaacattgtacagacatagattttcagttctgtgatataggagatatcattgtcaaggattttgatgaaggaaaggaaactttacaagctaaacgaagacgcatgctgcagttctgttcagacaatgttgagatggattgtgctatggcagcagatggactatcggaaaatcttcaattgaatttgggtttctctgagatgactccaggtgatcagtgtttattaaactgtgatgggacagaggaactaccagaagaatggctagtagattgttcaccacaagagagtgagcctcaatgcccgcctgaagatatgtccgttcatttgagtagtcctgctgtggccatggaagaagccaatctttccgtgcacaaaaattcttcgtctcgggagcagggcaacacagtccagaagaacactgtgcaagctcgaccaacacctctgaaagctggaaaaaatattattagagcaagaaaggtgaaaacatcagtcgtctatcctttcgagcttatcaagccatgcggttttcatggtgatgtcacattgcatgatatcaatcagaggatccacgccccgcccccatacaagataaagcacaagatcgacgaggagcagctctcctatcagacttcagctatttccgggaagcctgtagtccacaagacaaagattcatacagaaggaggaaagggcagtatcacaatcacaagaactagaggttaattaggtcaatggtatgcatatatggtgccaatatggtccttgtaccatgcatttctgatatattgggttgtgtcaatgttttgtggccaaggaaatgcatgcccttgttggaatattgttagccatttttttttcactttatttcttccattgtccccccttcggaacttctttgcctgtacttgcttggttagtgtgagatagtatgataatagagtgtgtaggcagggtgtggcagtggcaaagtgtgctgcttttttggttcttggttgaagggggaaagttgatgtaatcagataagtcagtaattgtggacatattggtttggcccagattaaaaaaaaaaaaaaaaaaaaaaaaaaaaaaaaaaaaactcgaactagttctctcctcgtgccgaattcctgcagcccggggatcc

SEQ ID NO: 6797 - DNA, 696 bp, Oryza sativa
  Clone ID: PAT_MRT4530_13452C.1
atgcaagcttccgccgcggcggcggcggcggccgcggcgaggagctggccgatgctgcggcggctctggaggaaggcggtggtggcgcccgtgctctggctctaccacctcggggaggacatcatcttctacggcttcctggcggcgatgatggcggcgaacctcggcggcatcgtgcccgagatcctcggccgctgggcctgcggcgagggctccgccgtgtcggccgctggcgaggaggtcctcgcgagctccaagttcatcatagtgcgcttcctcccggctttcgtcgtccagctcttcgtgcgcatcctcgcccgcgcccggttcgaagccagggaggcgaagaaggagaaggagaagagggagaacaacgagaagacaagctcgaccgccatcagggttgaatcatctaaggaacaacgtccagaaagtcgaggagcacggcgctgggggcccaaaggcttcatgccatatgcaatctacctagcccctcctttgattcaactttcttgtcttggcattaagatgaaagcccatcatgaggaaggatctcttgaatggagggtgggctatgtgcttgatgactttgcgaggttcacttctgctattttgatttcgtttgttggtgtcccaagcatgctgctcacagcgatgattcccaaggtgaaggatgatgacacttcgtcgcagtga

SEQ ID NO: 6798 - DNA, 208 bp, Oryza sativa
  Clone ID: PAT_MRT4530_13453C.1
gcttgacttgaactctgctgctagtaaagttcatcaccggtccctaaacttgtaccgctgtgttattccggtccctaaactcgcaaatcgaccgttcagatcctcaaacttattcgactgtgtcatcccgatccctaaacttgcagatcacttgtttaggtcctccaacttgttcagttgtgtcaccctggccctaaacaggacggtc

SEQ ID NO: 6799 - DNA, 231 bp, Oryza sativa
  Clone ID: PAT_MRT4530_13454C.1
gagctgaagagccacctcctgaacaagtacagcggctacctgagcagcctatggagggagctctccaagaagaagaagaaaggcaagctgccccgggacgctcgccagaagctcctccactggtggcagcttcactaccgatggccctacccatcggagctggagaaggcggcgctggcggagtcgacggggctggacgcgaagcagatcaacaactggttcatcaaccag

SEQ ID NO: 6800 - DNA, 569 bp, Oryza sativa
  Clone ID: PAT_MRT4530_13455C.1
gcacgaggctttccccttgctgtggccgtctgcttacatagcccaccgtatggctaactgccgctccgcagcggctcacagcaaggctttcaaaacctcccccttgtctgcgccagctctgtcatgcagtccccgcaagccctcccctgctgtacagcgcagctctcgggggaacctgcgagttgctgctgccgtccaagagggtcgtagggttgcagcccacgcagtttctgcagtaccctcggaggcagcccttgagcttgtggaagcatctgatcttagcgctgccagctgtgtaagcgtgcccagccacgagccagtaccagaagaaagtcttgggcagcggctgctgcgcggctacgacgctgccctgagaagcaacccagtgcagaccaaggccctgacctcctttgtggggtttgcccttggtgacgtgctggcccagggcatccttggggacggcttcgacgttctcaggtgcttgcggctgagcttgtacgggcttctcctcgatgggcctatcggccaagcctggtaccagcagctggacagccgtgtgtaccctgacg

SEQ ID NO: 6801 - DNA, 207 bp, Oryza sativa
  Clone ID: PAT_MRT4530_13456C.1
gtcaactcgacacagtgtgttcgctggcttgcgtggggcctactttgggggatttttgggacgactaaggttagcggcccaaggccggtcccggacggaaagggcagcaaagacggtcgagcgcccatagggccaataggcaagagtgcactgggaaaagatggacgcacgccacttgagcgtgacatgacaacatcatcggacttg

SEQ ID NO: 6802 - DNA, 805 bp, Oryza sativa
  Clone ID: PAT_MRT4530_13457C.1
agtttactacttcaccatggtttgtggcaacagttgatacgtaataaatatttaggatcacaacctttatctcagtcttattggaaagcaggagactcacatttttgggctagtcttatgaaggccaaacaagattttttcggtttgggtcttttcgtattagggacggttctcaaataaggttttggaaagataagtagttgggtaatgcctcgttgagagatcaatatccttgtctctataacatagttaggcataaacaatcgacaatatcacaaatctttcaaacaaaccctccaaacttttcatggagacgagatttaattggagcaaaactagctgcttggcataatttattgcctcgcatagctgatttggtgttgacacaagagcaagatgaatttcactggaatctcacccccaatggggtcttcttggtcaattcacattacatagctcttgttcatacgggcgtcccgaatattaatagacgtatttggaagattaaagtaccgttaaaagtaaaagttttcctttgatacttacgtcggggagtaattctaaccaaggataacctagctaagcgaaattggaaaggtagtaaaaaatgttgcttttgtcataaggatgaaaccattcagcatttgttcttccaatgtcatctatctcgggatactattgcggtggtatctcgacatttggaccaggtggcacgagatgtttttacccaggagcatgggtggcgatctagtctacagattgatatgccatcttccgtcaagccgccactgctccttggtgtcga

SEQ ID NO: 6803 - DNA, 383 bp, Oryza sativa
  unsure (1)..(383): unsure at all n locations
  Clone ID: PAT_MRT4530_13458C.1
cgcggccgctgtccctttgtatatattttctttatcaaattcagtcaaatgactgaatttttgtttgatggtatagagtatagtgacatctctgactttacaattcagttatagttgtcgattaatagggaagtgatttcggaatttttgaagatttaacctcaattaagctattttgctatnnnnnnnnnnattctcggacnagagagctaataggtctggnttatgctagataaccggttgcacacatgaccttattaaggacacgttgatactcttcattgagatactacacccacattctcggattcttcatcgggttggagactggactgagaccttctttggcatgatagcttctttcccattctgtacgcagttga

SEQ ID NO: 6804 - DNA, 312 bp, Oryza sativa
  Clone ID: PAT_MRT4530_13459C.1
agctatttgactaaacgcatacataatgctggcgcacaaaccgtggacgatgaggcaagaccaggctctcaaactcagtcaatggcttttgctgtagcaaaatgagtacatgcatgcttgcgagcattgcacgatgatgctgacggcgtgcaatgtgcatatgtagcatatgcggtgaccaaggtcgccgtctttgcaccaaaggtgaggatcggtcgtgctggaaccgaagaggttctgcctatgaggcacgggaaagatgtggagagagctggcctaggagatggctaacagagagctgataggatgagc

SEQ ID NO: 6805 - DNA, 372 bp, Oryza sativa
  Clone ID: PAT_MRT4530_1345C.1
atggcgacgctgctcggcttggctcagctagcttgctcaggcgttgccatcacgcgccacctaccggacgagggagcagcagcaaagccagaagaatcaggtggcgtcttgagcggcgggcgcgacggccggggaagggaaatcgttggcgcggctgtgtggctccgattgacggcgacgacggtcgatgggccgacgtggatgggcggcgacctcgtcgccgtagcgcaccacctcccatgccctcctcggcactgcccaccatgccctccgcgccacgcgcgccgctcgccgcgccctcccgaggaggactcatcgctggccgcctgcctgagccgagagagagagatagagagcgccgcccatcgctag

SEQ ID NO: 6806 - DNA, 1933 bp, Oryza sativa
  Clone ID: PAT_MRT4530_13460C.1
gaaaaggtaacctgcattgggttcacaggtcggctgcagtaatttttttttttttttttttttatgctgaaaatctgcacttatttagccaaaacgatgtagaaaagatccatggttctttaaatccacacaagctcttttacaataaggtcacaagccctgatggccattcgaaaatctaaatagttgtacatactgcttaattttgaaagataggattgaggaaacaaagttcttgtgaaaactttgaccactagagtaatcgatttgccagaaacagcttaaaacagcaagtttataagtgcgaagcaggaacacgtagaatcatctggccacagtaaaatagttataagcatcctaatgacccatgtaatttcttcctgggcctcctggtggagtactgccatacccaccaccacccccatagccgcccaaataaccaccagcaccaggcatcccaggcaaaccactactacccagtcctgcagaagcccctgggttaggcaaccctgaaccatttgcaccaactcccaggatgttgttcagacccaaccctccaccctgggaggcaaggatagctgtcaaggcctgccccagagcaggattcacccctgggccaccagctacacctggcaatgaagtcaaactggatactggagatggcatcacatggcccccaacagcagcaccaggcaaagaatgactatgagctccataaccaccagcgcctttcctcccgcctgaagtgccagcaccatacaaacccccaagtcctccacctttgttgggctttggtccatcaattgccttctggcagtgcagcacaaccccctcgaattgcttgtgtggctcctgaagcgctttcttagcactatcgagggtcttgtagacaaatagagcaaagcccttcggcttcccggtaaccttatcgagcccaagaggaccctcctcaatctcaccatactttgaaaagaactgcagcagtttctgcgggtctatgtctgcgccgacattgctgacaaaaattttccgctgcgtgtactccgacactggcggcaatgccagctgcgctggggctggggctaccgctggggcagggttagtggccatgccgcccggcggcacaggaccaacagaggcgagctggcaggccgtggtgcggttgccaatcttcttctggggctcacggagcgccgcgcgggcgccggaccggcggctgaagaggatgaaaccgtagcccttgcacttgcccgtggcgcggtcggtgacgaccctgaggtcctcgatctcgccgtaggcgctgaacgcctcggtgagggtctccgcggtggcgtcccagccgaggccgtggacgaagatcttccgcagcgccgggtcggcgtcggccgcgcggtggacggccgtgagcacgtcctcgtggctgagcgccgcggcgctgagcagctcaacgagctggtccttggggaacgaattcagcagcgcctggatcgagtcggcgtccctctccgccgcctcctcctcctcctccccctccccctccccatcctcgtcctcgtcgacctccacctcctcctccacctcgacctcctccacctcctcttcctcgccaccgccagcctcacgggacatcatcctctcccccgcgccctcgctggataggcccaggggctgcgacgagggggccgggtcctcggctagggcttcgggctgggaggagggctcggcgacggcggcggcggcggcggcggcggctgcggctgctgcggccctggcggctgcggacctagcggcggcgggggatttggaatcgagcttccgcttcttgcccatggcgacggcgagcgcgaggcgtgggggaaccttggggctagggtttcgacggctgtggaggggaggggaaaggggggctgtgtggtgtggagtcacgcgtccg

SEQ ID NO: 6807 - DNA, 2229 bp, Oryza sativa
  Clone ID: PAT_MRT4530_13461C.1
ttacccaatcttgccagccattccacccttctttaattttgcgatcaactttcccctaccgattgaaacaaggtctgggcaatcctcaatgcataattcttggtgagaaaggttagtgaagtccgctggttcagattctccaataaatgtaagagatggacaccactttatgtctaaattctgcaggaactggttgaggtttgataacttttcacaatcagaaatgtcgaggtaggtcagcgatgagaaaacagaaatgcagccattattgttgttagcaattactcctgctatctcattacaaccattttgttcctgaaaccagcatggaagagattcccctagataatacatgagtttcagagatctaagactggtgggaggatgtaggacttggaacacttccatctcattgtgctcttgtgatatccataggcaccattgcagggtcagacttccaatatatctcttcctgtttagtttgatttcagctgcaaggtccttacttagtgcaccaagattggatagcctcaaatccccatagaattggttgaaattcttcatcaatctaacttcatgttcccaatgtgtaccgagatgcagttgtcccattcgatcgtatacaaatccctgtgatttatatctccgcagattgatcaacctatcaaagtcacaaggcaagctttcaactacacactccaaagcattaaaacaaaggtcttcaaaatactttttgctcgtatctagaattggaatgtccccttcaggttccacaaagccttcagctacccaaatttcacataaactatctttttcaaaattataatcctttgggtacacagcacaaaatgagaagcatctcttcaaatgtaagggtaagtacatgtagctcaactgaagagctggcaaaatgtcagtctcctcttgtttcaactcccacagttcactcttttgtacatttttccaatgcgtcgtgtgatggtccattcttaacaagcgtccaagagttttcgcagctagaggtgaaccctttaacttaggaagtatgcttctgccaatgcactctaactcaggatcattgtttgaactgtcagacccaaatgcacataatttgaagaaatcccaaaagatatcattctgcaaacaattcactgtgaagggttccaatgtcccgagtgcattagaaaccttggaagatctagtggtaattaacatcatgcttccctggcatacatttgctaaaggtgaacaaaacttcttccaacactgcccattttcctttaaggcatcatcccatacatcatcaagtattatcaagatcctcttatttttcacattttcacgaagaacatgctgaatagaatccaaatgatcggtttttgcctcttttccagaagcggattctatggcctccttagttaatctcttgacatcaaagtcatctgagacgaatatccaaattactgggtcaaagtgagacttaactaataggtggttgcagatatgttgggccaaagtggtctttccaacacccccaattccaactatcggcaaaataggaacactaacttggttggatgttgatgtgcttgttgatgcatcattacttcctctcttgcgtttggaatgaacaccagtataatttttaggtacactaagcaattccatcactttctccagttcattgtcacgaccgtatatttctctatcacttgggaaagagctagtttctggcctcaatgttttgtcaaaccgctggggaatttcacgtaaccctagcttctccagctcgctagaaacattatttagcctttcaatgatatcagtcactttattgaatcttccttgaataacacaatcaaagaattccaaaaaaggagattggcttgcagcattaccttccagtgccaccttttgttcgtaccatctgaactcatcgagaagatcatcagcattgtacactgcgtccttgagatttggaaggagtttggccacacagtcttcatggcttctccactctgctctatcaataagatcatacattgctggaagagtatccttgagacgttgcaggccactctgcaattgcaatacttcatcctgaagcttttgatcctgcgtgccactccatctagtgtggagagatgaaatggcagatctagcccactgaaataaatttacacactcattgacaccactaatgaacccaatggtcttggataagctcat

SEQ ID NO: 6808 - DNA, 232 bp, Oryza sativa
  unsure (1)..(232): unsure at all n locations
  Clone ID: PAT_MRT4530_13462C.1
gaatgaacaaatcaactctatacttgattaccgggttacatttcattgtgtctttactgtacacaacaccaactcgatcatcatctctnagcacttaacccatattttccaacccaaagacttacaacttacttgtcacaaatgcatccaaccacaattaaccactgcttagctacgggcccccactttacttgcccgggacaaaattggttgcgtacgcccaggcctttgt

SEQ ID NO: 6809 - DNA, 231 bp, Oryza sativa
  Clone ID: PAT_MRT4530_13463C.1
atggggaaaacagactcgctcaagtgtgaagatgctagtggcgagatacgctctagggaaggatatcactccgacgagacggtagctcggtatggcagagctcaagcttgggtgcagtggagggagatgggagcgtggatgttgatgaagaaaggcgaccgcaatgactggttggagaaggaggcgcggggcatcgtcttgagattggctgaccatggtggctgggcttga

SEQ ID NO: 6810 - DNA, 417 bp, Oryza sativa
  Clone ID: PAT_MRT4530_13464C.1
atgtggcctggtcggggtacagtttgcgatcaggaaggatcttggtgtacagcaacctgccgaagcccacgctgcggttgccaggtggtagaggggaggggattggaggcgcggtgcccggccgtcatcgtcgcggtaaccatcattgtcgtcgtggcagacgccgccagatccacctccttcaccaccgtggaggatccatcgtcgcggcggccagatccgaccctgagctcgcggcgactagcagcgaagaggagaagaccgcacgcagccatagaggagaggaggaggccgcgccccgctgccgcagagaggaggagaccgtgcgtcgccggtgggaggccggggaagaaggagaggaagcgtggggcagacatgaggagaacagccgacgctgtcggaaccgggccaccgtga

SEQ ID NO: 6811 - DNA, 1505 bp, Oryza sativa
  Clone ID: PAT_MRT4530_13465C.1
atggagatagtaggtgagtgcatctacaataatccccccgtgctggttaccccaagcaaaccaacgcccaagcttgctctgtacctctcaaacctcgatgaccaacgcctcctccacttccccatccagtacatctacgtcttcaccggcacccttgacatggatactctgaaggtggcactctctagagtccttgttgactattacccactcgctggtaggttgagggctagcaatgagcacgatggcaaactcatcattgactgcaactcagagggggttctctttgctgagggatttctgcccggcctcactgctggggacttcatcctagggcatgccaagcctcataagtcttggaagaagctgctctataaagatgagcagagctttgtgtgcacgccaccactagtcgtacaagtaactcacctcagctgcggtggcaccatcctctgcaccgccatcgcccactgcgtctccgatgccttcggtgccgcgcacttcctccgtgcctgggcgcgcgccgccatgtccgaagactccgaactcgcgcatcccgccgtcgcgccctgccacgaccgccgcgccctcgcgccgcgctgcaccccgcgcatcgcgttcgcgcacccggagtacaccgctgccagcgggggcgatgacgcctccgccgtcgcggaggcctcgtcgcgcctcttcgccccgccgctgtcgccggtttccgtgaccttcacggccgcgcacgtcgcgcggctcaagaagctgtacgcgccgtcggcgtcgcctctcgagcagtgcacgtccttcgaggcgctcgcggcgcacgtctggcgcgcgtgggtccgtgccctcgacccgccggcctcactccccatcaagctcctcttcaccatgggcatacgccggctggtcaagcccgagctgtcgggaggctgctactgcggcaacggcttcgtgctggcgtgtgccgagtcgacggccgggcagctggcggcttcggcgcccgacgcggcgaggctggtgcaggagaccaagcagcgggtcgacgacgactacgtgcggtccgtgatcgacctcctggaggtgcggcggggctgtttgccggacttggcggcgaccttcacgatctcctcgctgacgcggcaagggctggaggacatcgacttcggggcggggacgccggtccactttggcccgcttaccagcgaggtctactgcctgttcctcccggtgatcggcgacccgcgcggcgccaccgcgcttgtgtccgtcccgcaggccgccgcggacagcttcgagcgttgctgccatgatggactggatgacgtggacgtggaagacaagaatcagctgcctaacataggagatggcatggcatcctaaaatcctaggcgtttgaatgccatatctcttctagaaacaatatattcatatgtctctccatttggctccaaaataataaaataactagtatggtggtccgcgcagattacgcggctagtatcatt

SEQ ID NO: 6812 - DNA, 1600 bp, Oryza sativa
  Clone ID: PAT_MRT4530_13466C.1
ggcggggcgccattgcctagaattgatcaattgatactgcaatcaaggaagaacaccatagctgcagaggtacttatgtaggttgctgttcaggaggaggaggaggaggaggcgatctctgtacattttgaaggatttttgaagttcagtcttcagactaaaagagacacaggtggccaagatgactgctggtttccagcttggtgtgatcggatcactgacgctctcagtggcatcatcggtttccattgtcatctgcaacaaagctctcatcagcactctcggatttccatttgctactacattaacaagctggcatctcatggtgaccttctgcacccttcatgtcgcacaacgtatgcgcttttttgagccgaaagcgatcgatgggcaaactgtaatcctatttgggttgctgaatgggacatcaataggccttctcaacctcagtttaggattcaattccattggattctaccagatgacaaagttggccatcatacccttcacagtaatgttggagaccatcttcttaaagaaaagattcagtgagagtatcaagttttctctgctgatcctgctacttggagttggcattgcttctgtcactgacctcaagttaaatcttcttgggtctgtcctttctggcctcgccatcgccacaacttgtgttggccaaattgtatcctacagtttaaatacaactgttaatcattcagattccataagttgcatcttttctgctttacccattcatgctccataccgtgctattttagctgccaaacgaattctattgttgccagcgtttatccttaacccgttaaacttgaacgaagctcaccaacacaatacagaagagggtttcatcgttctgtcctgcctgatcgcggtgtccgtgaacttcagcacgttccttgtgatcgggacgacgtcgccggtgacgtaccaggtgctgggccacctcaagacgtgcctggtcctgtcgttcgggtacacgctgctgcatgaccccttcaccatgaggaacattctgggcatcctcgtcgccatattcgggatggcgctctactcctacttctcggtccgggagagcaagaagaagtcggcaggcgacccacttcccgtgtcgcagatgccggagaaggaggtggagccgctcctggcgaccaaagacgtcaacggtgacaccaagaaggcgaacggcgtgacccacgactgttgaatatatgtgtctcatttgttttagcatttagcccagcatttagctgtgtagcaccggcacacgtaagcctacccgttgtatctgaaattctgaatgccggggaacccgttcctttccatttgtcgatttcttgcgctttgtaagaagcggagtacctgtcgtcggagccggtacaggcagcagcccaaaaactcgaggcccccggcaccacgagacgtacgagactgctccggcccctgcttctggatggatgatacgcaaagccccgtgtaagaaaaagtccatttggagtccctcatattggccgaatttctattaaaaaattcattggccgaacttaatttgaatctctcatcgcaaaaaaaaaaaaaaaaa

SEQ ID NO: 6813 - DNA, 246 bp, Oryza sativa
  unsure (1)..(246): unsure at all n locations
  Clone ID: PAT_MRT4530_13467C.1
cccacgcgtccgaaagatatgggctaaaaaaggagaataattaatagcaangcgncagccggcctgcttaaatggtgtaaaggcagctagccggtgtccctcctcgcctgtgggtcgaagttcttggcaacaggtacggtgcattcttacgggacaggcaggtaacctgcttgctgtgctccttgccctcctccttctatgcatgccggctacaatgcatcgatggtatgcgagtcgctctagatc

SEQ ID NO: 6814 - DNA, 414 bp, Oryza sativa
  Clone ID: PAT_MRT4530_13468C.1
atgcgccggcaaccagggcgcccctaccaaccgcgaggcggaggcggcggggacctcgtcggcacgggcttcgcgacggtgctcacggcggtgtccttcctgaccctcaacaccatcggcggcggcggcggcgaggggggcggggcgccgccggtggaaggagccgagcagctgcagctcgtcctggcgtgcgcgatcctcgcggcggggctgctgttcatcatgtacgggatgcgggggcgcggcgccgccgcgccgccgccgccggcgggggcggtcctgttcctccgccgcgccgtggacgtggcggcggcggtcctctggaacgccggcggcgtcgagcggccgctgccgacgccggtgatggtcctgctgctgtgccctcttcttgcagaatggctcggtttcgtctga

SEQ ID NO: 6815 - DNA, 381 bp, Oryza sativa
  Clone ID: PAT_MRT4530_13469C.1
atggaaggccaagcagctgaggacctagcggcttctgccctagccgctcggggtctggtcacgccgcctggtgacctaggctttgatgccttggctgtggtagccaatggccatgtacagcagaacgccaacgctagtgctctagccgctgctagaacattgctgcccaatgctcctcttccggcggcaatggagttcaaccttcctgttcttcaagtgcaaagctggcagctgcagcaagttcaagagcggctagcagcttaccagccatcccaggcgagccagtgctctagccatggacaggcgccggccggccagccatcccaggctgcggccagccagccaggcgaccagctagcagcgtgggagcacgtcagttga

SEQ ID NO: 6816 - DNA, 2464 bp, Oryza sativa
  Clone ID: PAT_MRT4530_1346C.1
atgacctcctcctccaccgccgccgccgccattcaatccgcctcgtcctccaccctctccccgcacgcggctcccttcgccctccccgtccgcccggcccgcgcccctctccaagatggtgatgtttctaggtcgatggatggtagcattgtggtgcatggattagataataaaattttaggagatgctcatccatcatcgtcgtcagcaacatcttgctttcgaacacaatcatttgacacagttttaccagcctccacatgtggagcgaacgcaagtcagccgagggaatggccagaaattggcagcgatgcagcttatccatcctcgatttgttctacttctgtggtattttcatatccttcagtcatgatggcctccaatcataaccagaaaaatcccttgtaccctgggatgggaagtaatggaagcagatgttcaacagtcaagatagaaagcccaccaaataaaatatctgaagccaataaaatcagttgtggtttaacgagcaagtcatctatgacaaaagatgttagtaaatccaacgaagatgctgtgaaaaatgccccctttccacaaattttggaagttggtatggagatctgctccaaagaggcaagccctgtctcccatacgaggcctcttcatatttcaactgctggctctgatccatgcgattctatggctgatggtgtgaaaacagaaccatcagaatgctatgtggattcaccatgttggagaggaagaggaacttcactttctcatcaaacgtcagtgacacagttaataaatcaagaatcagaggcttttgatgctggccaaaagaagagcactagcactgttcagcattgtgaggttctgaccgcatctcaaaatttggacactatcgagaataagcaaaaccaatcccaatctcatgttgaattgtctgtgtctatgaaatctggagacaatggtaaaaaagaggaagaagtttcccacaataaggagcttgagagtgcaaaacaatgtgcagcaaaatgcaccgcagagcagaaacacagtttggagctgagagataatagcgtgaagcgatctggtctaaactttgctgctcctgattttatcccttcatcagttgggaaatcaaaaattgtcaaagggtcctgttccacgacaggaaggaacacttctggaattctcaaggcaatggggaatttgtcagaaatgcttcgcgatagctgtttgttggatgaaaatgagctcgatgagcatgagcacactctcctccaatcagtaattgagaatcttcagacatgtattgataggaaaaaaaagggtcccattaatgatgatggctctaacaaggcaggactaagggctcctcattctcagtccgccgttttaaaatcttatgcaggggactacagaggtagttgtacaaccaatggtggaaatggcataactgtaaataaatctgtgggtcctactcgtgtgctcagtgattttgggaagaacagcttgacatggtcccagccttcattcaacaatattccaaggatgatatcctgtgaagaagaccactcacagattctcatttataagaatctgtggattgatgctgagcgtacaaattgtgagttgaagtatctactgaaacagaaccgtatcaaaattggccaagaatccagtatggctcatattggtggtccaagaaatccttctttccaggcatgtgatttaggtgcaggtccaagtaattcttatggagctgccatatcttacccaccaactctgagttttcctaagggtgattctactgaagagacatcaagagcaaggaacactgacctcctttacactggtgattgcatccggttaggagataacagtgtgcctagctgctctgcaagcaccatcagccatcctactcgaccgaataattttcagggtgaccttttaacaggcttggaggaaactggcttgcatcatcatgctcagccagtaccgcaactcgcaccgagcagagttcacagggaaccgagaataagcactatggatgaagcgtcaggccactcatgcttcaccggagcagacggcattttgagtggcaattctgaatatggcttgtcatcagattgggagcatgttctgaaggaagaaatcggctggagctgaagggatctgccagccagattgctacttaatttgtacatatatatatgcttgagtaattaaagatgcaggaattctgctcatgggtttattttgagtttttttgtctgataaggctgaggatagcaggccctgcttggcaaaatggtgctttccagcctctgaaaaaacagccccacttttatgtatgcatgtctaattagcttcttatgaacaattgtataagaactcctaagtcctaacctagctgcacattttggccatggcagtgccaaattgtccctaaaaaccgaaaaaaaaaaaaaaacac

SEQ ID NO: 6817 - DNA, 1569 bp, Oryza sativa
  Clone ID: PAT_MRT4530_13470C.1
gcacgagggactcacgcacagattcttccccggccacggcaccgatcaagcacgacccccgatccccaaaccagaaacacactcgcctcgcctcctttcgctcgtttcgtccaacaccaccacccaccaccaccgatctcgatggcgcccaaggccgagaagaagcccgcggagaagaagccggcggaggagaaggccggcgagaaggcgcccgcgggccgggaagaagcccaaggccgagaagcggcctgccggcgtccaagggggagaagggcggcgagggcaagaaggagcgcggcaggaagaaggccgaagaagagcgtcgagacctatcaagatatacatccttccaaggtgctcaagcaggtgcacccggacatcgggatctcctccaaggccatgtcaatcatgaactcgttcatcaacgacatcttcgagaagctcgccggcgagcgccgccaagctcgccaggtacaacaagaagcccaccatcacctccagggagatcccagacctccgtccgcctcgtcctccccggcgagctcgccaagcacgccgtctccgagggcaccaaggccgtcaccaagttgaccagctcttaggcgctctagtgtagtaggtgtttggtgattttctcttcgtttttcgtctgtagcgagtccatggcaagcggtggttagttgccctggatcgatctctgatttctttctcttgtgtctagtgttcctgtctagtgcttgctgattactgtaagaatctcttggttgtgcccgttgagttctgatcttaaaattaatggtgatggttgcaacctctggttgctaaattgttactatcaaaaaaaaaaaaaaaaaaaaattgggaaaccatagtctgtagtcttatgttagggttggctaatacgttggcttaaggttgggcgaattacactatctggaattgtatcaactaaaccggcacaaaacataatagaaatggagcacaatcccccttttccaggcctcgcctcacagtagagccccccccccctcgccccttccccactttgtggctgcctccctggggcatcgagcccccctgctacgcgcctttgcacggtgatcggcaggcctttggccccgcctcactcatactctccccccctatgtcagccctgcggggaggcgctgtactccgcccgtgcagcagatggcgtgcctcacagtggcgagtgcgtcggcatccgcctcccccggtgctgggtgtcggtaaagggcgtggtctgcgcgcggcccctctgctgggttttgccgagcaggacggccgtcgcctcgctgttggtctccgggcagtgcggtgggcgccagctccgcggtctttgtggtgggtctacaggataattacagatgttatgcagtgggaaaatatatgttctagaataagcaagtttaagttaaacaacagcatattacatggatcatatgcaaactgtgcaaactggcgagtgatatatcttgttctgtagcacggcattgtcattttgatatggtttgacctttactggtttccactgtaacatcccttcactgg

SEQ ID NO: 6818 - DNA, 118 bp, Oryza sativa
  Clone ID: PAT_MRT4530_13471C.1
atgggcatcacaggcagctgcaaaattcagttcgctttgcccctcgagaagcgcgaaaaattccatcctccccctgattgctgccagtgcaggcccggattgggttgttgcactgcag

SEQ ID NO: 6819 - DNA, 283 bp, Oryza sativa
  Clone ID: PAT_MRT4530_13472C.1
cgtgcgcttgtcctctatattggccgccctctttttttttttttgttttgttttttttttttttttttttttttttttttaacacggttttttttattgaaccaaacaaaaaaaaatcggattatgggcaaattctctcttggttataatgaattggcagaatggaccctagaaactaaaaatggccccattaatttgagccgcccgttttttatatatgggcacggttgatagattgacccttacaaaagccgggcgggcacccccccatgctctcgaaccc

SEQ ID NO: 6820 - DNA, 255 bp, Oryza sativa
  Clone ID: PAT_MRT4530_13473C.1
atgtgcggagaaaagggatctaaccgatgggcacatacctcagcgtactcggctgatggcgcgacagacgggctggcggaggtcgacatccccgcgggcggaaatttggccggaggggagatcgcctggaaatcgccttgcgcaccgaggggatcgccggagagagagagaggacggagtttgcttcagcgtatcggagatgaagaaggaatcgaaacggagttcgagatggagatcattccggaaacagagtaa

SEQ ID NO: 6821 - DNA, 222 bp, Oryza sativa
  Clone ID: PAT_MRT4530_13474C.1
atgtccgcccgccccgccacgtcggtggcgagcgcggcgttggaccggagcaggccgcggccctccgtcaccgtcccccgcgccctcagattcgtctacaccgccagcgtgtacgtcgccgggtcacccctccaccggcgcgctgctcccaacggcgccacccccgtgccggtggctcccgacgccaccagcctcctcgactccgccgcgaccacgtggtga

SEQ ID NO: 6822 - DNA, 510 bp, Oryza sativa
  Clone ID: PAT_MRT4530_13475C.1
atggaccggggactcaggtcgcatggtccaaagaaaggttgggccaactatgaccaagtctgccacacaaaggccgagcgggtcattgtgacccgtgggagctacccgcggcttgctcaaatccctacgcgaggctgcgctggggaccccgctcagatacatgttgagacaagagagaaagggaacaaggggaggagccgaggaggggcgccgggaggagcggcgcggccggtggcttccacggccgcgtggccgccagggaggagcggcacgggcggcggcgtccacggccgcgtgggcaccggggaggaggcggcgcgggcggcggcgtccacagctggccgcgtcggcgccgggaggagaggcgcgggcggcggtgtccacggcagcggcctccacggccgcgtgggcgccggggaggagcggcgtccacggccggccgcatcggcgtcggggaggagaggcgcaagcggcggcggcgacgctggggaggagaggcgcgagcgttaa

SEQ ID NO: 6823 - DNA, 277 bp, Oryza sativa
  Clone ID: PAT_MRT4530_13476C.1
aaccaacaaaaaaggacagaataaacaccatcccattgaattgcaatgtaactttattgagcattttggtagacaataatgttaataagggacagatggagtataggaaaaggataccatagtgacaacatgctggttgcgtatcctgcgcgcgtggaaaaggtcatgaactttcacgctctggaaaaggcgcctgccttgcgactgacaaatttcattgacatgtggacacaggagcaccggctgggtgtgagagctgttattgcgagaagatagc

SEQ ID NO: 6824 - DNA, 452 bp, Oryza sativa
  Clone ID: PAT_MRT4530_13477C.1
tagtggatcccccgggctgcagggtttgcttgtgcaaattcacagcaaatgtgtaaagctttgtttacctacagcatgtgctcaccctgagggaactttgctcccgtctcctgtttgtgctgactggtatcctgatgtcactatcagtgttggtgctgttggacataatgttgttgttgttgctacatcgaatccttgttgcctttacatacttggggtcagatcattatcttcgtttcagtatgagctgtatgagatacaacatgtccagttgcattatgaagtatcttgcatatctattccacaagaggactggagactcgataattcatcttctagttgtgcaacaagtggtgattttcggaaagattttgcagctaatattcgcaagtttgctgtaattggaactcacgaaccttctgtgcatatcatttcgttggaacctggagaag

SEQ ID NO: 6825 - DNA, 984 bp, Oryza sativa
  Clone ID: PAT_MRT4530_13478C.1
atggccgccaccacccgatctccctcaccggagcttcgcaagccaaaccatcgcgccatcgagttcgcctcgacgagtggttcttatataagtcctcgcgaaggaggcaaatatatgccgcgaagggcaaatgtgatatttaccgaggcgcaggagtcggcgagctcgctgacggtgggggagcggctgtgcgcggcgttcctgccgttcgtcgccattgccgaggccgtcttcttcgcgctcaccgactgcctcgccgacctcctcccgccgtccgccgccgcctcccgccaccgccgctccgccgcttcctcctacctcgccgccgtcgccaggaaatggaaccaccagcagcgtggcagggtcggcatcggctgcacctccctcaccctccgccagctcgcccgcctcgccgacgaatccagatgcttctccgtgaacgaggtggaggcgctgttcgagctctacaagaagatcagctgctccatcatcgacgacggactcatccacaaggaagagctccagctggcattgtttaagactccaagcggccagaatctttttcttgatagggtttttgatttatttgatgaaaagaaaaatggtgtaatagagtttgatgagtttattcatgctcttagcgtcttccatccattggcaccattggaagacaagataaattttgcatttaggttgtatgacttgagacaaactgggtttattgagcgtgaggaggttatgcaaatggttatcgctattttgtcggaatctgatatgaaattgtcagaagaacttctcgaggccattattgataagacatttgaagatgctgatgctgatagggatggaaaaataaaccaacaagaatggaaggaattcgtattgcggcatcctaatctattgaagaacatgacactgccttatctaagggacatcacgacagttttccctagttttgtcttcaacaccgcggttgaagattga

SEQ ID NO: 6826 - DNA, 329 bp, Oryza sativa
  unsure (1)..(329): unsure at all n locations
  Clone ID: PAT_MRT4530_13479C.1
cgggagtgggtccctgctttttttccagctttccttttggggggtcgtttttttttttggggtgggtnggaattaaaaagttcttgcgggaaattggtttccattgtgtgagccggcgtgctttttaacggatccaactaagttttttggcggggggccctttgttgaatgcaggggggtttttttgggggggcttttctattatttttccgggcgggtatcgtggttgagccggctggttttttgaatggaggagggccttttttttaaagagtcaggatggggttcttcgggtggctttttttttcccaaaggggaagggttttttt

SEQ ID NO: 6827 - DNA, 227 bp, Oryza sativa
  unsure (1)..(227): unsure at all n locations
  Clone ID: PAT_MRT4530_1347C.1
caaatacaaatgcattgcagagatatactgtttgtcgnttgtgnttgtaaaaaaaaaactcgtaggggcagaaagagacacctgattgcgtcttgttcagcaagtttgtttggggaggatgtactggaataagggtatagtagtagtaggaattattatggcacatttgcatgctttggcatatgccncncctgagttttattaaaaaaaaaaaaaaaaaaaaaaaa

SEQ ID NO: 6828 - DNA, 455 bp, Oryza sativa
  Clone ID: PAT_MRT4530_13480C.1
gggggccaaaattgatttttttgggggggggttttttcggttgggggggccgggttttttcacacccttgttaccggttgggggggggccagggggactgggtgtgggttgccgggccccctttcacacgaaggccggaggggccctttagcgaggggctggggggccccttgggattccccgggcctttggtgattgaacccaggctttttttattgagaatgggtttttgggttttgggggtttttatcatttgggtcctggaaatttggacctttttggtgttaaaaatttggtggggggggttttaccttcccattgggggaatttttttttacctgaccggcccagggggggtcaactggcaggggcctttttgccaaggggttttggccaaagctccgggggagaaattttcccccttttaagggttgggtgtcccaaatttaaggggg

SEQ ID NO: 6829 - DNA, 453 bp, Oryza sativa
  Clone ID: PAT_MRT4530_13481C.1
atggccatgatcagcgccaagaggattgctcagctagcaaagaaatggcgaaggatggcagcactggggaggaagaggcttacaatgtcgtcgacggcgatggcgacggaagaagcccaaggttgctccacggcggtggccggcaagggtcactgcgccatctacaccgccgacggcgcgcggttcgaggtgccattggcgtacctcggcacggcggtcttgggcgagctcctgaccatgtctcgggaggagtacggcttctccggcgacggcaagatcacgctgccgtgtgacgccatggtgatggagtacgtgttgtgcttgctcggaagaaacgcttcggcagaggttgagaaggcgttcttgagctccatggtgatgccgtgccactatgcaagctgtgtgacaccatctctgggagcttgtcagcaagttgctgtttgcagtaactag

SEQ ID NO: 6830 - DNA, 247 bp, Oryza sativa
  Clone ID: PAT_MRT4530_13482C.1
ccgtgatccgccgccgctccggtcgtcgtcgtcactcgggaaggccaccgtcgggttcgccaagtcatcgccatcctcgtcccatcctccgttttgccgaagaccaccggaacaccgctgttgtcgtcaagccgaaggtcgccgccgcttcttcctcgacgccgtcgccgtccgagcaccagactgtgaagtggcgaagataagcccacgggggtcgctggggagtccatgccttgtttgcaagggg

SEQ ID NO: 6831 - DNA, 104 bp, Oryza sativa
  Clone ID: PAT_MRT4530_13483C.1
tcctgcctggcattcatggtgcaccttgtctctctgtggacagcctgctggtccaaggtgtctactatggctcttttctacacctcctgacttgctgcttctct

SEQ ID NO: 6832 - DNA, 159 bp, Oryza sativa
  Clone ID: PAT_MRT4530_13484C.1
atgggcgcatgcggcggctacgaccgcggcgcgcgtgaagggcgcgtgcagcggcggcgccaattagccaaaacttcggggctaggcacaggtgacggcatcggtggccagggcatggacggcggcgtcgactgccaggcacggcgacggcggcagtag

SEQ ID NO: 6833 - DNA, 276 bp, Oryza sativa
  Clone ID: PAT_MRT4530_13485C.1
atgcccattgatgtggtgtggggaaggggaaagaggatgtgggatgtcatcgtgttggggatgatggcgatcggtcctccagcaaagggagcgtcggtcaacatcgtgctctcccgcgccaaccccttcctcacacagcggatggctggccagctccgacaggtgcggtggcaagaggatgtgatggagctggcggcgatgcttggtgaagaagatgctgcttttgatctggatgcgtcggggaccggagacaagggcaagcaatgtcatgtttaa

SEQ ID NO: 6834 - DNA, 320 bp, Oryza sativa
  Clone ID: PAT_MRT4530_13486C.1
ataacattatgttcaattgttttctaaacttttgaaaaaaaaaaaaagaaattgtggtgggccctaaaaagaaaccccctggggggaaaccgtttaaccccacccacaatgtacccccgggggaaaaaaaaaaaaatgggcccctccaaaaagccccacaaccccaaaaattttcccagggggccggaaccttaaaattttaaggggggaaaacgggggaagaaaaaaccacaccctgggtccgggggggacacccgggggggcaaccacaaccccaaaggtgcaatgaattggcatccataaagccaccacgccggagg

SEQ ID NO: 6835 - DNA, 1242 bp, Oryza sativa
  Clone ID: PAT_MRT4530_13487C.1
atgctctaccacgacgtcacggcgtcactccgagcgccggggcggcatcccgtcaccaagctgtccgtgctcgcgacggggagcgaagaacgacgctgccaggaggtcctggccagcggcgaccgatacagccaccacgagttctgcgtgattgacggcgtgctcttcgaacaggcgatgcaccgtaccgaggagctgcgcgtgcagatcgactgcggcaatgacgacaggagctccctgacctacgtataccgtctccgccttattagctccatccccggcgacaccatccgcatcttggagctcgcgagctgccggatcgagctgccgccgccggaccacgccgcgccattccccttcccacgccttgctgtgctgcggctggagaggtgctcgtcgccaatgcgcgatctggcgaccctgatctccgccgcgccgaacctggccaccctgcacatcgcccgccataacttctgctggtaccccgaacgcgacttcgacgacggccgcttcgtcctccactgcccaagtctaacgtccctcacgctggacaacgacataacatgcatcgaaggcatcagagacgccattgcctctacgttctggaaatttcttggcagccttcgcaacacgaagtcactcaaattgaatgttccagcaatgggaagcattccattactcgataatggcgacaatattgtgtttgaaaatctgaaacatctggaggtggaatgtgaccctgagacagatggctggcaccacagcaagaaaggttcagccatgtctgttgcaaccttgctccgttgcttccctgtaatccatgaactgaaactcgcattggagagtacgagtagcaagtttatgtcctttagaagtcgccgtgcccgtggaagaaagtcgctactatttacggaatttaatacttccagggatctcttcaacaatagaagaactatgcttgacgacgatgatgaatcgtctgaatttgaagaagttgccgacctgcctggtttgactggctgcgggttcgactgcttgcagaatcatctgaaacgtgtggttttgcagtttcagatggaggatgtgaattgctttggggttcgcctcgccaagttcttcgccgaaacttgcaaggttctggatgttctgcaagttgatgatggtgtccacaatttcagaagacatatcaacaacaatgtggacaaatggagagataatgaatccgaaaaacaaaaaaggtga

SEQ ID NO: 6836 - DNA, 2394 bp, Oryza sativa
  Clone ID: PAT_MRT4530_13488C.1
atgctttccgtccacgtattcatcgggctgcttctcctctccctgcacgctcctccatattccgctgccgtcgacgatactctcgcagcgggtcaagtgctcgccgtcggtgagaagctcgtctcgaggaacggcaagttcgcgctcggcttcttccagccaagtgcaatagccatcagtaagtcatccaactacactaacgccctcggttggtaccttgccatttggttcaacaagatcccggttttcaccactgtatgggtcgccaatagggagaggccaatcaccgttcctcggctcaattcaacatggctaaaaatgtcaggagatggcaacctctacatcctagaccatgccactaattccatcatctggtccactgatcacgtcgttaatacgacaacggaaaccggcatgaacacgagtgccactctcctgaatagcggaaacctcgtaatacgaaacccgtcaggtgtagtctcgtggcagagcttcgacaacccaactgacgttgttcttcccggtgccaagtttggctggaacaaggccactgggttgaatcgccttgggatatcaaagaagagcctcatcgatccaggccttggatcatacagtgttgaactagacacgactggtgccagagggctgatcctcaagcatcgcaacccttccatggagtactggtcatctgatagagcactgattataccggtacttaagtctttgtttgagatggatccacggaccagaggcttgattaccccggcatacgtcgataatagtgaagaggagtactatatctacactatgtcggatgaatcatcctctgtgtttgtgtcgttagatgttaatgggcagatcaagatgtatgtatggtcacgagcaaaccagtcttggcaaagcatatatgcacagcctgttgatccttgcaccccctctgctacctgtggacctttcaccatctgcaatggtaattccactcaaacatgtgactgtatggagagtttttctgtgaagtcactgtgggattgggagcttgatgatagaacaggagggtgcatcagagataccccattgcattgtgtaagtgacaaaaacatgacaagttcaactgacatgttccaacctataggtcttgttacattgccctatgacccccaaattatgcaagatgctacaactcagggtgaatgtgcacaagcttgtctcagtgattgctcttgcacagcttattcttatcaaaatagtagatgctctgtctggcatgggaaattacttaatgtaaataaaaatgatggcatttacattaatgcggacaatgttctgcaccttcgtcttgctgccacagatttccaagatttgagtaaaaacaaaagaaaaacaaatgttgaacttgttgtgggcgcaagcattgttagttttgtgttagcattgatcatgatactgctaatgattagagggaacaaattcaagtgttgtggtgcaccattccatgacaatgaaggccgtggtggaataatagcctttcgatacactgatttagctcatgctactaaaaacttctcggaaaaattaggagcaggtgggtttggctcagtattcaaaggagtgttaactaacatggctaccatagcagtgaaaaagcttgatggtgcccatcaaggtgagaagcaatttagagctgaggtgagctccattggaattatccaacatatcaacttagtcaaattgatcggctattgttgtgagggtgataagagattgctggtatatgaacacatgttaaatggttctcttgatgttcatctatttcagagccatgcagctgtcctaaattggattaccatgcaccaaatagccataggagttgctagaggattgtcttacttgcatgagagttgtcgtgaatgcatcatacattgtgacattaaaccagaaaacatacttctcgatatatcatattttccaaaacttgcagactttgggatggcaacatttgtaggaagagattttagccgagttctaactacttttagaggaactgtaggctttggtatggtgctatttgaaatcatatcgggaaggaggaattctcctgaagtacacactagtggtaattatgatgctacttatttccctgtgcgagcgattaataagctgcatgagggagacatgagtagtttagtggacccaagattacatggtgactacaatttggatgaggttgtcagggtctgcaaagttgcttgttggtgtatccaagatgatgagttcgatcggcccacaatgcgtgaagtggtccgggttcttgagggtctacaagagcttgatatgcccccaatgccaaggctacttgcgactttaacaaacttctctgctgtggcttcaatgtaa

SEQ ID NO: 6837 - DNA, 627 bp, Oryza sativa
  Clone ID: PAT_MRT4530_13489C.1
atggtgttggcaaccagccaaggagtcaagccatcaagggctcaagcggatatatgcatgaagagtcaacagagcaaaagtggcatgatacatactggtattctgtcctacagccttaccattaccattgagttctgcaaactatgtggcttagaacttagggccgggttgcccttatcgtttttggagggtttaccaccatcccgcggtagggcggttacagcggtaaccgctgaaacccgggcaaaatttacctccaaaaatttgaattcaaaaatcggtggtttcacgatcaacagttatctgttggttggaattgggtggtcatcaaaggctagcgggtgctacagattgaaggccggcaggacattcacaaatcggcggctgtgccggtccggcgccgggggtgatgacgactcgaatgcagcgtggattggacgtccaaggaggattcgtgctcccactggctggagttcatttggtggctgtgggtggctggaagatcgtccgccagctacgcgtttaaagcagatcgaaggccgatcatctgcggcgtggtcaggcgctcgggagtggaacacatctagcgacaacagctcgacactttcatcgtcgaacgcgggatag

SEQ ID NO: 6838 - DNA, 497 bp, Oryza sativa
  Clone ID: PAT_MRT4530_1348C.1
ccagattggaatcagatatatattgctcggggggtaagatggcccgcttacagtgacaaaccttccaaaacgattcatatggtaaacaggtaacccccttgtgacttcccccaatcaagcccctttattattttccccgtgaataaacttccggttgtagcttgttattttccccgttttttccaccccttaggggaggatttttttttttcccccaaaaaaaaaattttgacttgccttaacaaatctttttaattttgcccccacaatggcccaaggggcttttttggttgccccggggattaattttccccaccccctttttaattggaaaccaaaaacttgtaatgttccccccaagcctcttaaaaggggtctttttgaaaatttaataacccccttttgttttttaaaggcccccgccctttttttttgcccaaaatttttcggttaaaaaccccactgttttttttgggcaaagctttttttttttgaaa

SEQ ID NO: 6839 - DNA, 497 bp, Oryza sativa
  Clone ID: PAT_MRT4530_13490C.1
gcgttgcgtttcccatggagttccaatcgaaaagtgagcactcgattctacggagaggggaccccactctccccaatccccaacctcggcggtagtctgcggaggtggtgcgcgtcgcagatgctgtagtttccggtgctgatgcggtagtggccgtcgccgtcgctgatcccggtgtccacgctgctccccggccccgccaccacccaggaggacgagctcctcctctccatggccgagtgcgacctgcgaggactagctgaacgagatctgcgagaccaacagtaacctggtgatgataggcaagccaaccggtgacgcctaggaggagtacgacgacgaggccgaggatgacgatgccgaccacgttcaggagtgcgacggacacgacttcgatcaggagagcggctgagtcggtccccgattcctactccttcactatcaggtttgcaccgtgctggccatgccgccatatagccttatcttctctgctccca

SEQ ID NO: 6840 - DNA, 2666 bp, Oryza sativa
  Clone ID: PAT_MRT4530_13491C.1
cgggctgcaggaattcggcacgagggttccccaattcgtttcgaaatcgaattccaaatcgaaatcgaaatcgaatcgattcgtccgtgcgtgcgtgcgtgcgcgactcgctctcacacacttcgcctccaccgacctctctctctctcactcgctagggtttcgaggcgacgacgatgtcgctgcggccgagcgagcgggcggaggtgcggcggagcaggtacaaggtggcggtggacgcggacgaggggcggagacggagggaggacaacatggtggagatccgcaagagccggcgcgaggagagcctcctgaagaagcgccgcgacggcctccccgccgccgccgcggccgccgcggcggcgtccccgctgctcgcccactcctccgcgctccagcagaagttggaggggttgccggcgatggtgcaggcggtgcagtccgacgacagcgccgtgcagctggaggccaccacgcagttccggaagctgctctccatcgagcggagtcctccaattgaggaggtgatcaacacaggggtggtgcctcgctttattgccttcctccaacgtgaggattatccccaactccagtttgaggctgcatgggcactcactaacattgcatcaggcacatcagataacaccaaagtggtagttgagtctggtgctgtgcccatctttgtcaaactgcttagctcccccagtgaggatgtccgtgagcaggctgtatgggctctgggaaatgtggctggtgactcaccaaaatgccgtgacctggtgcttgcaagtggtgggttatacccattgttgcaacagcttaatgagcacgccaagctctcaatgctcaggaatgccacatggacactgtcaaacttctgccgtgggaagcctcagcctaattttgagcaggtcaaaccagcgctttctgcactgcagcgcctcatccattctcaggacgaggaggtcctgactgatgcctgctgggctctttcttatttgtctgatggaactaatgataagatccaagctgtgatagaatcaggagtgttcccaaggcttgtggaacttctcatgcatccttcggcttcagtgctcattccagctttgcgcacggtgggtaacatcgtcactggggatgacatgcagactcagtgtgtcatcgatcatcaagctcttccatgtctcttgaacctcttgaccaacaatcataagaaaagcatcaagaaagaagcatgctggactatctcaaacatcactgctggcaatagggaacagattcaggctgtgatcaatgcaaacataattgctcctctagtacatctgctgcaaactgctgaatttgacatcaagaaagaggctgcgtgggcaatctcaaatgccacttctggtggaacacatgatcagattaagtaccttgttgcccagggttgcatcaagccactctgtgatctgcttgtttgcccagatcccaggatcgtgacagtttgcttggaaggtcttgagaacatcttgaaggttggagaggcagaaaagaaccttggggcaggggatgtcaattcctatgctcagatgattgatgatgctgagggactggagaagattgagaaccttcagagccatgacaacactgaaatatatgagaaggcagttaaaatgctcgagtcctactggttggaggaggaagatgatgccatgccctcaggtgacaacgctcaaaacggcttcaactttggaaaccagcagcccaatgttccatcgggtggattcaactttggctgaagatacctatctggaatgatgtaccactgttccttagctacttgcttggggctagtcagagttgggggagtcttgtcgttggagtcttggttgggtcctggcggtctggtctcaggcagtcgtaatgtcagtcccagtccttgggcttgcatcatcgccagtggtgcagcttggtcagtggtcagtcttgaaggtcatccagttggatttacttgggctctgtctcacctgtggtgggagcatgggggagagggcgtccagagccgcaggtgttgtcgggagagagttaccagttggcttttgcctcctatatagcatgaatgaattatattatcatctgttttgaggtaaaaagaaccttgaaagatagggtttattcatggttgtgtcagtttttgtcaagtctctatgtgctgtattaacatgtcagaagagtattggcacaacttataaacatcaaatagcaactgggtttttggtggagtcccatgctggtctgtctattcattggtttgttgttgtaatgtttttaatgtcatggttttgtcgcgtcaaagtttgtcggtggttgtttgcgtacttgctgttgttgttgtcgttgtcgttttgagattcatgttgttatgtctgtcttctgtctagaaaactgaaaactcaggagaaccgcctagggaaaaagaccgcctattttggcgatgagttttggttgagttcttggtgtcatgtgtggagtgtaaaagggaagatgatggttcctagttttaccccctggaacccggtttatgattgtatgattattacgttatgaaccatatgcacatgataaaaggaagagaagggagctgtcccacttcatatttccctaaaaaaaaaaaaaaaaaaaaa

SEQ ID NO: 6841 - DNA, 2253 bp, Oryza sativa
  Clone ID: PAT_MRT4530_13492C.1
accgccggtaccgcaggatcggcgggagggagagtgtgattgttttttttttttttttttttttttttttaacaggaatttctttctccgatttaaggaatgcaagtcataaagctaatactagtgttgctgcttaatcaaagttccggtagccgtccagtacgaggtacattaataaaacgaacagcagctaaccccgcagaacgtgggatcccaaaatgctgatacaatacacagaacgagaaacctcatcgtgcccctaaatcaaacatataaaagcggcacattttcaaactaaaaccagaaaaaaccctggaggcttagccaagaacaaacattcaagaaacacaactcgcaaaagcttcacatgtcaaactagccgttctcccttcatgggcttactctggctttagagcataacatcgccagtgcaggctcctcacaccaacagcacacaagttctactctgggatcatctgctcattgtccgcgtcaccctcctgttcgatctgaggctgtttaggagctgaggctccaggagcctgcttcttcttgataccgctgacgatgtcgtcgatcctaagaagcatgcaagctgcctcgatagctgtcttgaacgtttgtgccttgacactgtaagaatcccagatcttccgctctttcatgtcaacaatgtcaccgctccttccgtcaatgccaacccacgcattttcaccatttgcatgctttccctggagttgtgtcattatcctgatgacattcaacccacaattttgagccaaagttcttggaattgcttcaaatgctaaagcagcagcttcatagggccacttttctacaccttcaactgaagaactcttttgcttcagtgctgctgatacagtcagctcggtagcaccacctccaggtaaaagttttgggtttttcaaaatgttccttgcaacagacatggcatcctgaaggttcctctcaacctcattcaggacatccttgcttgctcccctcaaaagaacagtgcatgccttgggatctttgcagtcgacaatgaaggtaaagaattcatcacctatcttcttgacctcaaagaggccagctcttgttccaacatccgattcttgaagctcctctggcctgttcactatgactgctccacaagccttagcaatcctgttgttatcagtcttccttagcctacgaattgcactaacaccagccttgcttaggtaatggatagcaagatcactgagacctttctctgtgacaactaaatcaggcttgaattttaaaatctgcgcacagaggttctttatgtattcttcctccatctctagcagaacctgccaatcttcttccttcatcagttcagcattggtctggttttctcctttcttgtactcaacagggcaatccagaaggataatgcgggggttgactatcttccttctcatttttccaggagctacaacatctttattgaacataactcctttaagaacccgtgaatcctctaactgaccaccaggaaccttctccactttgatatatttcttgatatcaacttcacgcataccttgacctaggtcaacacctgctgttgtagtagcatcaatagcaaggtcagcaataaggtcaccaaactgacccgtgaattttgtaccaatagagctcttcactagccctagcatagcagcacggtcattcacgtcaacatgcattgcaattttgtcaaggacagctaaagcatcctcaagagctttggtgtatgctcggcaaataacagttgggtggtagtgcttatcaatgaatgcttctgcaacatggagcatctcaccagctaaaacaatgacagatgttgtgccatcaccaacttcttcatcctgtgtacggcttagctcaatcatagacttggcagcaggatgtgcaatatctatttctcgcaatatagcattgccatcattagtaaccacaatacctccagaagcatccagaagcatcttcaacatggaccgaggaccgagtgtagtacggatgatgtctgccacagccttggcggcctggatgttggcatggtgaaccttcgtgccggactcccgcttcagcgagtccttcagcacgaggacgggggcgttcaatgccatggcgcgatcccgcgggaggcgaggcggcggcggcggcggagtgggggcgagaggcggcaagggagaggaagggggtgaggcgccgcgggggatcgagctcgacgagggtttgtcc

SEQ ID NO: 6842 - DNA, 2310 bp, Oryza sativa
  Clone ID: PAT_MRT4530_13493C.1
atggcggtcgtcgccgctttctccatcagggagtacacggcaagcataaggggagcggcgggggcagaagggaggaggctatacggcctcggtgcgggggatctgccgccgatggaggcgaggaggttccggtggtgggcagacgagctggccacggcgccgccccttcctccctggtcgctgtccccatccccgtccccgccgccgccgccaacgaagccgtcaaggaggacgctggggaaggcgagggcgccgaagaagcggtccatatcggatctgttcgcggcggcgcctcccctcgcgcttccctcctccgattcgggcggcggcgggaacgacaacgacgacgatgaggcgctctgcgcgatcatgcggcgagctagggagaagaagcggaagcggaggctgcaggaggaggaggaggaggaggcgggggctgcttctgcttcggtgacggcggcggcagcggcagagacgtgtgattccgagggaaacttcactataaaggaagcacttgacaagacaaatttgcctggtggattggatactcctcaagcgtcaaggagacctgatggtgtacaccatgcaagaacagacgaggaaaggtctccagactcaaagagaaggaagaaggtaaagatcactaacttagataagaacaacaacaagaagattgataagaaaaggtacagcgagagtaaaagcgctaccaacaaggtggggaaacagcatgacctgaagaaaatgctccctttgcatagtattctgaagaaatacacaaggcacacatctgtcaaaatggtcaaggagaaacatggcgacccaaaaggcacagaagtcattgaagtctgccgcaaatcggtgaagcgtgtaaaattctcagaagttgatgatgtgcttggtattaacaagcaaaatatctgcaagctgttctcggatgctttggcgtcatcgtcgtcatcatccacggacatgtccagtgaaggggacaagcacatagctgcagaaagctgtagttctcatatgccggagacagcaactaaagaagcaagcaagagtacagatcatgaggattctcttgagctcaccagcacacagttgtcctccaatttgtttgatctgaatgaggcactgccagaatctactgatttgaactacccatatgtgtcaaatccagaggatccaaatcatgagcctagacagcatgagcctttagactctgatgtgcaagttattgacgagggacgacaaaaccagcaggatctgtctttggattcacatggacttcaatgtcagtccgttcctgagtctgggttagaaagagctagaagttcaatatcgccaggcacatttttgcacggtgagttcatggaagtgtctgacacattttttgttggttcttcacggaagttgacaggagaacttgctgagtctcatggtgattatgccttcaatctgaatcttggaggcagccagccctccaatgaaggagaagttcctccccaagattgtaatgcatcaactggagtggcttcaagttctcattctgaaatgggtgtgcagcaggagtgtaggcctgctgctggacaaactgtgcgtctaatgggcaaagatctctcagtatctacaaccagaggagagtatgtgtctgggacacatttctatactgaagaccatcccacaaagttgttcttggaattgccgcgacaaggacggccttatctctctttacaagctcaaagtgtgcccaatgtttcagcaaattctgcaagcccaagtcaatcacatatcaggtacactgcccctcagaatttgagccactcattccccacgaccaatgcattatctggagatcgattgcgatacgacgatcgattcagctacttgtcaggctcacagcaccatggaaatgttctgctggggagtccatctcttacaagtgatgctaatttgcctcggtcatatggtgtggtctcagctggatcatcggttcacccccacaactctccaagctttgcattcactcatccaagacggatgatagttgaagaagcttctggcagcagaagagatgcagcatgtccatctagaaatgcagaaaatgttgctgcaagagctgccattcctgaaatgcaagcgcaaagaactggtctgatgaagctcactcctggggccaagcatatcctgatgccgagtgacaccacaggggacggcacctccatgccagtgtactcctgtgtttctttcgggagtaggagaggaaatgcttcagcaactcgcaacatgggagccgagctgtacaagttatag

SEQ ID NO: 6843 - DNA, 513 bp, Oryza sativa
  Clone ID: PAT_MRT4530_13494C.1
gccgcccttttttttttttttttttttggactccaccaaaaacccagttgctatttgatgtttataagttgtgccaatactcttctgacatgttaatacagcacatagagacttgacaaaaactgacacaaccatgaataaaccctatctttcaaggttctttttacctcaaaacagatgataatataattcattcatgctatataggaggcaaaagccaactggtaactctctcccgacaacacctgcggctctggacgccctctcccccatgctcccaccacaggtgagacagagcccaagtaaatccaactggatgaccttcaagactgaccactgaccaagctgcaccactggcgatgatgcaagcccaaggactgggactgacattacgactgcctgagaccagaccgccaggacccaaccaagactccaacgacaagactcccccaactctgactagccccaagcaagtagctaaggaacagtggtacatcattccagataggtatc

SEQ ID NO: 6844 - DNA, 648 bp, Oryza sativa
  unsure (1)..(648): unsure at all n locations
  Clone ID: PAT_MRT4530_13495C.1
tttcctgagctgttgaggaggagtaagctgtaggttgaagatgggtttcgtctttgcgcacggctgcctgcatcaacactcatgtagagtaggtggtcaatccaagaagatgatgctgctgctgctgcatagtgctataaaaataccagcacataatgctgctggcctggactagtctttcactatctttgtactcccaattctcaaacagatagctttgcaattgagtcagggagagagatggctgggagagaggatggagcagcagcaggagccatggaagaagggcaagacagcaaggaggtgaagtgtgagaattcagaggatggaagcaacaccagcagaagatgccaaggcaacgacatgatctccgtccaattcatgcagaagattcttacggaaattctggggacatatttcatgatatttgccgggtgcggcgcggtggtggtgaacctgagcaccggcggcgcggtgatgttcccggggatctgcgtcgtgtgggggctcgtcgtcacggtgctggtctactccgtcggccacatctncggcacccacctcaaccccggcgttaccgtcgccttcgccacgtaggatgcttcccgtggaagcaggtaacaaaccattttcttggatcttgaaatgaca

SEQ ID NO: 6845 - DNA, 1656 bp, Oryza sativa
  Clone ID: PAT_MRT4530_13496C.1
atgtcgctgcggccgagcgagcgggcggaggtgcggcggagcaggtacaaggtggcggtggacgcggacgaggggcggaggcggagggaggacaacatggtggagatccgcaagagccggcgcgaggagagcctcctgaagaagcgccgcgacggcctccccgccgccgccgcggccgccgcggcggcgtccccgctgctcgcccactcctccgcgctccagcagaagttggaggggttgccggcgatggtgcaggcggtgcagtccgacgacagcgccgtgcagctggaggccaccacgcagttccggaagctgctctccatcgagcggagtcctccaattgaggaggtgatcaacacaggggtggtgcctcgctttattgccttcctccaacgtgaggattatccccaactccagtttgaggctgcatgggcactcactaacattgcatcaggcacatcagataacaccaaagtggtagttgagtctggtgctgtgcccatctttgtcaaactgcttagctcccccagtgaggatgtccgtgagcaggctgtatgggctctgggaaatgtggctggtgactcaccaaaatgccgtgacctggtgcttgcaagtggtgggttatacccattgttgcaacagcttaatgagcacgccaagctctcaatgctcaggaatgccacatggacactgtcaaacttctgccgtgggaagcctcagcctaattttgagcaggtcaaaccagcgctttctgcactgcagcgcctcatccattctcaggacgaggaggtcctgactgatgcctgctgggctctttcttatttgtctgatggaactaatgataagatccaagctgtgatagaatcaggagtgttcccaaggcttgtggaacttctcatgcatccttcggcttcagtgctcattccagctttgcgcacggtgggtaacatcgtcactggggatgacatgcagactcagtgtgtcatcgatcatcaagctcttccatgtctcttgaacctcttgaccaacaatcataagaaaagcatcaagaaagaagcatgctggactatctcaaacatcactgctggcaatagggaacagattcaggctgtgatcaatgcaaacataattgctcctctagtacatctgctgcaaactgctgaatttgacatcaagaaagaggctgcgtgggcaatctcaaatgccacttctggtggaacacatgatcagattaaaatttttcattgtcattatggtttgctcacaacatatgaaatgtcgaccaggtaccttgttgcccagggttgcatcaagccactctgtgatctgcttgtttgcccagatcccaggatcgtgacagtttgcttggaaggtcttgagaacatcttgaaggttggagaggcagaaaagaaccttggggcaggggatgtcaattcctatgctcagatgattgatgatgctgagggactggagaagattgagaaccttcagagccatgacaacactgaaatatatgagaaggcagttaaaatgctcgagtcctactggttggaggaggaagatgatgccatgccctcaggtgacaacgctcaaaacggcttcaactttggaaaccagcagcccaatgttccatcgggtggattcaactttggctga

SEQ ID NO: 6846 - DNA, 556 bp, Oryza sativa
  unsure (1)..(556): unsure at all n locations
  Clone ID: PAT_MRT4530_13497C.1
ccatgttcacctgacctccccctgccatgttggatgacggggtgggtccggagggaaggaggggttggatctgtgagtcctgccctttcctgctcgtgtggaattgaggaccagtagggttgcaccaagctaattgtgtttgaccacagcacgaatgggtagaaggtagctgaagcgattgtgagtttgctgggggtgtgtgagctcagtttcgagagggagtgggtggagcttgatttgggaaggaggcactggggaagaagaattgagaagaagatggagtggtcgaagtcacggggtaaaagtaagaggatgttttttagtgtccaaaggtaatttccccgtaacttagttccgggtttagaggtaagatggttaaacgatcattataaggctgtgttcgttagtcaccgttgagaactttctccctccgcatggaaaacgaggtatcccnttagcgcttgattaattattaactaaaaaaacttgaaaatggtttgatatgattttttacggccacttttctatagaaattttttgcaaaaaaaaaaaaaaa

SEQ ID NO: 6847 - DNA, 3233 bp, Oryza sativa
  Clone ID: PAT_MRT4530_13498C.1
atggcggtcgtcgccggtttctccatcagggagtacacggcgagcatgaggggagcggcgggggcggaggggaggaggctgtacggcctcggcgctggggatctgccgccgatggaggcgaggaggttccggtggtgggcggacgagctggccgcggcgccgccccttcctccccggtcgccgtccccgtccccgtccccgccgccgccgccgccgacgaagccgtcgaggaggacgctggggaaggcgagggcgccgaagaagcggtccatatcggatctgttcgcggcggcgcctcccctcgcgcttccctcctccgattcgggcggcggcgggaacgacgatgacgacgacgacgaggcgctctgcgcgatcatgcggcgagctagggagaagaagcggaagcggaggctgcaggaggaggcggcgggggctgcttctgctccggtggcggcggcggcggcggcggcggagacgcgtgattccgagggaaacttcaccagaaaggaagcacatgacaagacaaatttgcctggtggattggatactcctcaagcgtcaaggagacctgatggtgtacaccatgcaagaacagacgaggaaaggtctccagactcaaagagaaggaagaaggtaaagatcactaacttagataagaacaacaacaagaagattgataagaaaaggtacagcgagagtaaaagggctaccaataaggtggggaaacagcatgacctgaagaaaatgctccctttgcatagtattctgaagaaatacacaaagcacacatccgtcaaaatggtcaaggagaaacatggcgacccaaaaggcacagaagtcattgaagtctgccgcaaatcagtgaagcgtgtaaaattctcagaagttaatgatgtgcttggtattaacaagcaaaatatctgcaagctgttctcggatgctttggcgtcatcgtcgtcatcatccacggacatgtccagtgaaggggacaagcacatagctgcagaaagctgtagttctcatatgccggagacagcaactaaagaagccaagcaagagtacagatcatgaggattctcttgagctcaccagcacacagttgtcctccaatttgtttgatctgaatgaggcactgccagaatctactgatttgaactacccatatgtgtcaaatccagaggagccaaatcatgagcctagacagcatgagcctttagactctgatgtgcaagttattgacgaaggaggacaaaaccagcaggatctgtctttggattcacatggacttcaatgtcagtccgttcctgagtctgggttagaaagagctagaagttcaatatcgccaggcacatttttgcacggtgagttcatggaagtgtctgacacattttttgttggttcttcacggaagttgacagaacttgctgagtctcatggtgattgtagtagtggttcggttaaagatgctatgacaaaggggaagtcaccttgtgcattgcccaatcatacagttcaggactcatttcagcagcaccagaggtattatgccttcaatctgaatcttggaggcagtcagccctccaatgaaggggaagttcctccccaagactgtaatgcatctgccggagcggcttcaagttctcatgctgaaatgggtgtgcagcaggggtgtaggcctgctccaggacaaactgtgcgtctaatgggcaaagatcttgcagtatctacaaccagaggagagtatgtgtctgggacacattcctatactgaagaccatcccacaaagttgttcttggaattgccgcgacaaggacggccttatctctctttacaagctcaaagtgtgcccaatgtttcagcaaattctgcaagcccaagtcaatcacatatcaggtacactgccccacagaatttgagccactcattccccatggccaatgcattatctggagatcgattgcaatacgacgatcggttcagctacttgtcaggctcacagcaccatggaaatgttctgctggggagtccatcacttacaagtcatggcagtgcagcgctccgtcagaatttgccgtatgtttggagccgttactctgatccttcttcatccagtactgcatcaccctcagcaccaattttgcctacgacggcacagcatgtgacaccatcttcagtttatcatgctaatttgcctcggtcatatggtgtggtctcagctggatcgtcggttcacccccacaactctccaagctttacattcactcgtccaagacggatagttgaagaagcttctggcagcagaagagatgcagcatgtccatctagaaatgcagaaaatgttgctgcaagagctgccattcctgaaatgcctagctcttcctctggtggccggcatgcgcgaagaactggtccgatgaagctcactcctggggccaagcatatcctgatgccgagtgacaccacaggggacggcacctccatgccagtgtactcttgtgtttctttcggaagtaagagtggaaatgcttcagcaactcgcaacatgggagctgggctgtacaagttatagtccaaataatgcttaaacttggacatgtttttcctgagctgttgaggaggagtaagctgtaggttgaagatgggtttcgtctttgcgcacggctgcctgcatcaacactcatgtagttaatcttgacttgtggtgttcgagaaaccacccctgatttcttaacatttggtacaagccaattaattaaaaacatattataaaaaaaaaaaaaaaaaaaaaaaaaaaagtgaggtggtcaatccaagaagatgatgctgctgctgctgcatagtgctataaaaataccagcacataatgctgctggcctggactagtctttcactatctttgtactcccaattctcaaacagatagctttgcaattgagtcagggagagagatggctgggagagaggatggagcagcagcaggagccatggaagaagggcaagacagcaaggaggtgaagtgtgagaattcagaggatggaagcaacaccagcagaagatgccaaggcaacgacatgatctccgtccaattcatgcagaaggtacgtatggtgatggtcgttgagaacttgcgatacacagtctcctgggattaccccaatgccgtacctaaactcgcaaactgaaactctgaacttgacacccgtgtcaaaagcatatggtttctgactttcttc

SEQ ID NO: 6848 - DNA, 526 bp, Oryza sativa
  Clone ID: PAT_MRT4530_13499C.1
gttccaacttccaagcagtttcaattccatttcatctaggagtatcaaaattggttgtctgtaaatacatcgagtgtggagtggaaggccaacaagggcaaagcataagatcatctttctccaccttgacagattatcatcagagcagtgatctcacatcactgccaaaggttgatctggcgagctcaagacaaatgatccatggcatggagctgatgattctattgtggtgtgctagatcatggctacaaaggggcttcttgttccaatcagattactcctctgcaggtggcggttggagcgcagagtttccaccagattgtttagctgcgagcaccttgtccaaggtctcgtcgggtaccttgattccatttgtctccatttctgctaccaccgcaatggccgcgtcgatctcctccagatcaaggcacagcaagatcgcctcgtcgtacagagggcttccaaatttgtagccaaggctatgcgttgtttgcaatattgtcataaatgcagacgggagcggcac

SEQ ID NO: 6849 - DNA, 126 bp, Oryza sativa
  Clone ID: PAT_MRT4530_1349C.1
atatttctacaatcagtaaatttttttatgatcaaacatgaaacaaacgcagaaaagggtgtacctttgcttacccgggtaccatatggaaagatttttccatgacatcactagcctttccagccc

SEQ ID NO: 6850 - DNA, 220 bp, Oryza sativa
  Clone ID: PAT_MRT4530_134C.1
ccccacttggtttggcgtgctcggatccgaatccaaaccctcctccaagccctaatccaatccacccaacggtctcctcctcctcccctttccgtttcccccccgaaaccctaaaccccaacctcctcccccaacccgcggtttcccgcccgatccccaccgccgcgcgctcaatccgggttcgaattcgaatcccagctcgaggcgcccgctcgattcg

SEQ ID NO: 6851 - DNA, 1066 bp, Oryza sativa
  Clone ID: PAT_MRT4530_13500C.1
atggccggggtcaccagcaagcgccgatcctcctccgcctccacctcctcctcctccggcgacggcgccgccgtctccgaccggccgcggggggtgacccggaagcgcaggtccggcggccgttgcccccgccccgccgcctccctgaggccggccgcgccccgaccctcctctagcgatgcacgtgcaagaactaggcacaaatcggggatatgtgttcttagtggagtaatttctattactaatggtgggtataactggtgtaggaaggtaaacatgttggatttgaatagagctatccttgattcagatcaccacactgctggattgagagtaattctgcaaaaggaactacggtacagcgacgtaagccagctagggagaattgttctcccgaaggtattggcccaacaacaagagcaggatgtcatcggagcaaagaaggcaggtgatcaacaagctgccactgtgccacaagttgacgagcatatctctaccctcttccccatttttccaattgcacaagtcgatgactatctctctcccatggcaccacaagttgatatctctgccttcgtgccacatgctgatgagaaccatgagatatttgacgggatactgaattctctgccagagataccagtagccaatgtgaggtattctgacttcttcgacccattcgatgatggtatggacatggcaaacactctgaacgccaacgccaaccagtctgctagtctgcatgtcactgatgataagtctgggcattccttgattcccaacccaaagtctgggcctcacatgtgagactgacagggaagtggtatttcataccatggtcagtttgtatgaagctcagaaaccccttccctggcgccattgttgtacatccaaataattggtgtccttattttgacgctgtatatgctaactgctacatgcagttttatgtgtaaaatattttgttcacaacccaactggaggtttaatcagatgaaacattgtaactctgttcagttcagctcagaaatgtaattgtttctttcagtaaaaaaaaaaaaaaaaa

SEQ ID NO: 6852 - DNA, 249 bp, Oryza sativa
  Clone ID: PAT_MRT4530_13501C.1
atggtcgtcgtgctcgccgagctgaacgacctggccgccattgatcagggcgttgcgaagctaggtccaagagaggcgctggttctagagaagatccctgccacgctgcatgattgcatgcaccgccgcttctctgccttattgtcaaagagtaacagcaaccgtaccatgcgatcagcaagcataccggactgcgataaaactggaaacttgcaacgaattgtgccagatgaatctgctttgagttag

SEQ ID NO: 6853 - DNA, 194 bp, Oryza sativa
  Clone ID: PAT_MRT4530_13502C.1
gttgttgttggccctatctttcggtgagttgagataactacgatttgggagaaacattgacgacctgacaataaccatacaagacgttacgttgcgccttagcgatcgatacacctctccgtgggttgttgatcttgccggtgcaaatcaagcctaatcctgcaagcaaatcgaagaaacaagcaagaacaaga

SEQ ID NO: 6854 - DNA, 300 bp, Oryza sativa
  Clone ID: PAT_MRT4530_13503C.1
atggcgaggggatgcgtcatgcgtggtgccggtgcgctgcccctagcgtcctgccgcctccctatatgtgatatgggtgcgcgcacgggagatgagatggggagaccagagactgaagagataaggctagggtttcgtgggacctggctccatggagaaattaccatttctactttaagatatgtatatggtgttattgttggcacaacggagcttcacaaacatgacgccagatttaacggcgttgtgctttcagtagtaggcgatgtacccgtcgacaacgaggtgcctgtgggatga

SEQ ID NO: 6855 - DNA, 690 bp, Oryza sativa
  unsure (1)..(690): unsure at all n locations
  Clone ID: PAT_MRT4530_13504C.1
ccggccgggctctcgatcgtcttctccacctgcgccgccgcagcctcctcaactcaactctcttcggcagcgagcagcagcgccttccaccatgccgaagcagatccacgagatcaaggacttcctcctgacggcgaggaggaaggacgcgaggtcggtgcggatcaagaggaccaaggacgccgtcaagttcaaggtgcgctgctccaagtacctctacaccctctgcgtcttcgacgccgacaaggccaacaagctcaagcagtcgcttcccccgggtccgtattccgttatccactgcctgtgtattctcttcctttcatttttattgatgctgttcttaagtaaggaaacgtccgctgctgtgtccgaaatcacgtgttttgttggaacgaatcgttaaatcctttcatgctttaggatttaaaaagaatgtggtatggaatggttatgcatgttctttgtgaatttagtttggtctagcatgctaatcgnggtggagctgttgataaattggccttccatttagtctggaaattgcattgtgtgcaatgatacccaattagtgcctcccaagatagtcatggaaatcttactggtagatatgtgcaagtctggaacttctcctgngatgaagattgcgcagttgcaatcatcttcctcttttgtatagcttttaaatgtcatttc

SEQ ID NO: 6856 - DNA, 209 bp, Oryza sativa
  Clone ID: PAT_MRT4530_13505C.1
ccacgggcaacccacacaactcccccattgataaatttgccggaaaaaaacccggggtctttcaatcataaaactttctccggggaaacacccatattttccgaaggaaacacgatttttttttaatccaaagcacacgggtttattttccacttaattaaccaccccccaaccccccctcttatgggggggcttttttgggcacaact

SEQ ID NO: 6857 - DNA, 1230 bp, Oryza sativa
  Clone ID: PAT_MRT4530_13506C.1
atggccagggacggtttgacgaagggaaggctgacgacgagcgcgaccgggaacgacgagaggatgacaacggcggggttcggccgaagggaggcgaccgaaggtggtggtggttcagccgaccggcgcacgggcgaggaggaagggcgaccggaagaactccgccgaggagaatggactagcctggccgaggaagaggatggtgccgcagtggcgggagaggcggcgatgatgacagccggctcatgggcgaggcggcacgaccggctggaggcagccggtgccggggaggtgaggggagggagccagccatgggagaggcggggaacggcggcgagatttggggccggcggccatggaaggtggccggaattggtgcggccgttccgggtgcaatacggcgcggtgttcgatcgtggtccccctagccccgccccctcccctgccgcgtgcgccgcgtcgcccgcccgtcgtgcgcgccgccgccgctgccgcgccgtcaccgtcacgtcgccgtcgcctcacgcctcgagccgccgcgcgcccgtcccctcacgcctgcgccccgccgcgcggccgtcccctcgccgtcgccctgcgccgctgccgcgccgcccgttccatcgcgccgagccccgtgccgccgcgcgcgtcgcgtcgccccgcctgtcacgccgctcgctcgccacccgccgcatcgccgtcccattgccgcgcgccgtcaccatcgccgcgtcgagccccacgccacccgtcgcgtcgcccgcctcgagccccgcaccgccgcccgtcgcatcgccgctccgagccccgcgccgccatcgtgtcgcagctcgcgcgtcgctgtcgtcccgccccgagcgccgccgtcgcgtcgccattacgccgccgcccctccccctctccttctcccctctctacaaataccccccctccctccattttcctccaccccatctcacccttcctcccctcttccctctccactgcgccaccgctctcgtgccaccgcgccgccgttcccgtgccgccgcgccgcctctctcgtgccgccgcgccgccgttcccgtgccgccgtgctgccgctcccgtgccgccgcgccgccgctcccgtgccgccgcgtcgccgctcccgcgccgccgtgcgccaccgtcgccaccgccgtcgtcgccgctgtcgccgccgtggatgtacactttacccgcactccgcgactgcccaacacatga

SEQ ID NO: 6858 - DNA, 1419 bp, Oryza sativa
  Clone ID: PAT_MRT4530_13507C.1
atgaagcccgggggcgcggcgtcgtcggtactccccgccgcgcgcaggggcggccgcatcgccgccgtgatcgcgccgctgctcctcttcctcgcggccgcgctctccttcccctcctccatcggccgcatcccgtcgctcgtcgcgctgggacggaggcacgctccgtctccgcccccgccgccgccgccgccgcgggtggccgtgtgtttggtgggtggcgcgcggcggttcgagctcacggggccctccatcgcgcgccacgtcctcgccccgctcgtcgcgcatcagcaggagaagaaggaaggcgaaggcggcgcgcccgtcgtcgacgtgttcctccacagcccgctcgacgccgacgcctacaagctctccctcctcgcccgcgccgctccgccgggatccaggctcgccgccgtgcgggtgttccggccggagcgcatcgccgagacgcccgagcgcgcccgcgtgctcaccgccagcaactcgcccaacggcatccagggattgctgcaatattttcggttggtggaagggtgcttggacctgatccgcgagcgcgaatctcgaggcaacttcacgtacgattgggtggtccgtacgcgggtcgacggcttctggaccggcccgctcgccgccgccgacgcgttcccggccggcggcgcctacgtcgtccccaaggggtcccggttcgggggcctcaacgaccgcctcggcgccggcggccgccacgcgtcccgcgtcgcgctgtccaggctctcgctgatccctcgcctcgacgtcgcgggctaccaggagctcaactcggaggcggcgttccaggcgcagctgaaggtggccggcgtcaaggcgagggagcggcggctgccgttctgcgtgctgagcgaccggaggtactcgttcccgccggcgccgtacggcgtgcccgtggcgtcgctggggagccccggcccgctgagcggcgccaagtgccggccgtgccggccggcgtgccgcggcggcgagtgcgcgtcggcggcgcggctggtgcgcgggtggagctggacggagtggcggaacgggacgctggagatgtgcgacgcgagcgtgccgtgggagcaagggtgggaggcgctgtttgacgaggtcgccggcgaggaggcggcggcggtgcggcggagggtggcgaccatgggcgcggacgattgcgtggcggaggtggcggcgctcatgacgcgcgccgagcggtgggacgcgcccgcccccgccgagatctgccgcgccggccgcctccgcctcgccactcgctccgcttctgccaatgccactgtcactgccaagcccaaccaaaattgatttgaccatttttttccctcaggaacaccaaaccaaaggcagaaaaggaatagaaagaaagaagagaatacaagttggata

SEQ ID NO: 6859 - DNA, 577 bp, Oryza sativa
  Clone ID: PAT_MRT4530_13508C.1
atgtctccacatgccgcatctcaattaccttcccaaagcggcggcggcagtggacgcgagggggaaggaggacggcttaccggcggcggcagcggcgacgacggcggcggcgacggtggcgcacggcggcacgggaacggcggcgcggcggcacgagagcggcggcgcggcggcacgggaacggcggcgcggtggtacgagagtggcagcgcagtggagagggaagaggggaggaaggggcgggacgatggcgacgcgcgggcggcttcgcgatggcggcgcggggctcggagcggcgatgcgacgggcggcggtgcggggctcgagacgggcgacgtgacgggtggcgtggggctccgacgcggcgatggtgacggcgcgcggcgatgggacggcgacgcggcgggtggcgagcgagcggcgtgacaggcgaggcgacgcgacgcgcacggcgtcacggggctcggcgcgatggaacgggcggcgcggcagtggcgcagggcgacggcgaggggacggccgcgcggcggggcgcaggcgcgaggggacgggcgcgcggcggctcaaggcgcgaggc

SEQ ID NO: 6860 - DNA, 1365 bp, Oryza sativa
  Clone ID: PAT_MRT4530_13509C.1
atggccagggacggtttgacgaagggaaggctgacgacgagcgcgaccgggaacgacgagaggatgacaacggcggggttcggccgaagggaggcgaccgaaggtggtggtggttcagccgaccggcgcacgggcgaggaggaagggcgaccggaagaactccgccgaggagaatggactaggtggcacggcggactcaggaccaaaccgagggcagtctggggtggagggcgacgctgcgatgccggaggaggctgcgacgttagcctggccgaggaagaggatggtgccgcagtggcgggagaggcggcgatgatgacagccggctcatgggcgaggcggcacgaccggctggaggcagccggtgccggggaggtagaggaaggaggcagggaggaacggtgcagccacggggagactccggaggaggcaaaaacgagagaacgcaaggaggggtctccatttataggtgaggggagggagccagccatgggagaggcgcggaccggcggcgagatttggggccggcggccatggaaggtgttcgatcgtggtccccctagccccgccccctcccctgccgcgtgcgccgcgtcgcccgcccgtcgtgcgcgccgccgccgctgccgcgccgtcaccgtcacgtcgccgtcgcctcacgcctcgagccgccgcgcgcccgtcccctcacgcctgcgccccgccgcgcggccgtcccctcgccgtcgccctgcgccgctgccgcgccgcccgttccatcgcgccgagccccgtgccgccgcgcgcgtcgcgtcgccccgcctgtcacgccgctcgctcgccacccgccgcatcgccgtcccattgccgcgcgccgtcaccatcgccgcgtcgagccccacgccacccgtcgcgtcgcccgcctcgagccccgcaccgccgcccgtcgcatcgccgctccgagccccgcgccgccatcgtgtcgcagctcgcgcgtcgctgtcgtcccgccccgagcgccgccgtcgcgtcgccattacgccgccgcccctccccctctccttctcccctctctacaaataccccccctccctccattttcctccaccccatctcacccttcctcccctcttccctctccactgcgccaccgctctcgtgccaccgcgccgccgttcccgtgccgccgcgccgcctctctcgtgccgccgcgccgccgttcccgtgccgccgtgctgccgctcccgtgccgccgcgccgccgctcccgtgccgccgcgtcgccgctcccgcgccgccgtgcgccaccgtcgccaccgccgtcgtcgccgctgtcgccgccgtggatgtacactttacccgcactccgcgactgcccaacacatga

SEQ ID NO: 6861 - DNA, 882 bp, Oryza sativa
  Clone ID: PAT_MRT4530_1350C.1
atggcgactaggcttggcagggaagccaggggggagcggtgggttcaggggatagcggcctacgtgcatgggggtggcaggctaggaacacctgacagggagaggtggcggtggggagaggtgacacggttgaggaagggggctgaggtagggagagagtacgggcggagcaggtgggagtacgacgggcaggagacgttgcctggggacgggaccccgaccccctggtacagtacgggcatacgtactatgagggtgccggcggcggtgacgggagggtgcggatgcggtgtcgacggcggcggaggttgctgccgcggtggtggcaagctcgccgactgggaggaggggaaggatgatgagatgaagagtgtcgtcgtcaagggctggacgaggatggcgcaagtggtgccgctgcacgacaacgcatcggcagaggacgacgacgacgacgaagaagacgatgacgaagatgatgatgatgatgacgacgaggacgatgaggaggaggcggcgccgccgtacgtgatggccgtcgatgacagctccgtcgaccgcgccgtcatcacggcgctgctccggcgatccaagtaccgcgtcactgccgtagacagtgggaaaagggcgctggagatattgggctcggaacctaatgtgagcatgatcatcacggactactggatgccggagatgaccgggtacgacctgctcaagaagatcaaggaatcgtctgagctgaagcagatcccggtggtgataatgtcgtcagagaacgtgcccacaaggatcagcagatgcttggaagaaggcgcggaggacttcctgctcaagcccgtccgaccggcggacatctcccgcataaccagccggatgctgcagtga

SEQ ID NO: 6862 - DNA, 733 bp, Oryza sativa
  Clone ID: PAT_MRT4530_13510C.1
tgcaaacctagctgctgatgacaagtgtagcatggaagttgcaaaggctggtggtgtccatgctttggtcatgcttgctcgatcatgtaaacttgagggtgtcctagaacaggctgcaagggcattagctaacttagccgcacatggagataacaacaataataatgccgctgtgggtcaggaagcaggggctcttgaggcattagtgcagctaacaagctctcaaaatgagggtgtaagacaagaagctgctggtgctctgtggaatctgtcatttgatgatagaaaccgtgaaggcattgctgctgcgggtggcgttgaagctttggtttcacttgcacaagaatgtttgaatgcttcggaaggccttcaggagagagctgctggcgcattatggggactatctgtttcagaagctaacagtatggcaattggacaggagggtggtgtcgcacctttgctcacactggcacaatcagatgttgaagatgttcacgagacagctgcaggggcactatggaatcttgctttctattctggtaatgctctctgtattgttgaagaaggtggggttcctattctagtgcggctttgctcatcatcagggtcaaaaatggcacgtttcatgtctgcgctagcccttgcttatatgttcgatggaagaatggatgaggttgcattggttgggacgtcatcagagggcagttccaagagtgttaatgttgagggagct

SEQ ID NO: 6863 - DNA, 472 bp, Oryza sativa
  Clone ID: PAT_MRT4530_13511C.1
catcggcgtaatggcgacgcgcacggcggcgctcggggcgggacgacggcgacgcgcgggtggtgacgcgatggcggcgcggggctcggagcggcgatgcgacgggtggcgtggggctcgacgtggcgatggtgacggcgcgcggcgatgggacagcgacgcggcgagtggcgagcgagcggcgtgacaggcggggcgacgcgacgcgcgcggcggcacggggctcggcgcgatggaacgggcggcgtggcattcggcgcagggcgacggcgaaggggacggccactcggtggggcgcaggcgcgaggggacgggcacgcggcggctcgaggcgcgaggccgacggcgacgcgacggtgacggcgcggcagcggcagcggcgcgcgcgacgggcgggcgacgcggcgcacgcggcaggggagggggcggggctagggggaccacgatcgaacacctatgccgcaatgaacag

SEQ ID NO: 6864 - DNA, 3494 bp, Oryza sativa
  Clone ID: PAT_MRT4530_13512C.1
ttttcccttcattttttttttttttttttttccagaaacataaactttatatagtaatcagtacatttacaaagttacagcgcaggtggagcagcctagtctggcaccaccacacctcattaatcaacaaataaacttactgtataccgcatgaaggtcctgaattcccatcgccggtgacatttcaaagttacttttacacaccaaatgaataaaagaaaattgcacacgccccccacgtcgcaaacaaaaaaggcaagaaaaactactctatgggttcccctcatggagaggcatgaagcgactccccaaccctcccgattgcctcgttcatgtttactcagctcacagctctctttaggtgattctacctacatcccgaaacaaacagcctgcacatgccgagtggtaatgtgacacaagctttgaaagccaaaacattaccttgggccgcaattttgcgatgttttgaacaggctgagaaggctgctgaagaaatgccttgttggaagattagcataagctccactgctgtgctttcatgttgaagtccctgtctgatggtgttccaaatttctgaggacaattcttgcaaagactttggcttcgatagaagcggtcgtggctgctgctgctgcgcgcaagactcgagctgcccctgctttctgcaggagacccgcatggtgcactgcgtgccgacctccagggattgtgaactgaagaagggcaaaggcagcacaagcgcgaagaattgatgcaggattccggagcatggcaacaaatctagcgatctcggcaccactgcatctcaggtgtccagcttcttgtataaacactgcatcagcaatctgagatagtgctgctgaggctgaggaggtggaagccgtagtgaaaacttgtgggtccgaaaatgtcagaacaaaagtctgtatatgcttcaaagccattctcctagctccctcaacattaacactcttggaactgccctctgatgacgtcccaaccaatgcaacctcatccattcttccatcgaacatataagcaagggctagcgcagacatgaaacgtgccatttttgaccctgatgatgagcaaagccgcactagaataggaaccccaccttcttcaacaatacagagagcattaccagaatagaaagcaagattccatagtgcccctgcagctgtctcgtgaacatcttcaacatctgattgtgccagtgtgagcaaaggtgcgacaccaccctcctgtccaattgccatacatccaccatctaaaacagacaagccatcaagagcgccagcattgagtgcgagattgaagtgttcaagtgtggtcctgttagcttctgaaacagatagtccccataatgcgccagcagctctctcctgaaggccttccgaagcattcaaacattcttgtgcaagtgaaaccaaagcttcaacgccacccgcagcagcaatgccttcacggtttctatcatcaaatgacagattccacagagcaccagcagcttcttgtcttacaccctcattttgagagcttgttagctgcactaatgcctcaagagcccctgcttcctgacccacagcggcattattattgttgttatctccatgtgcggctaagttagctaatgcccttgcagcctgttctaggacaccctcaagtttacatgatcgagcaagcatgaccaaagcatggacaccaccagcctttgcaacttccatgctacacttgtcatcagcagctaggtttgcaagtgccccagcagcacgttcaagaactccatcagtcccagcaggccagcggagtatgagatcgaccaaagcctttataccaccagctgctgcaatggctgccagcaacacatcagacattgcaatcagagtattcagcatccaaggagtgacaaccttgtgctcctcacccacggagagattccaaaggccaccagcagcttcttcagcaacaagccgattcattgacctggccaaattggttagtattgtgatacctccctcgtctgcaactgcctttgcaaccttggcattcaccgataagttggcaatagcctttgctgcttctgactgtgcactctcccttgaacaccttgcaaggtccagtagcattggaatgcccccaacacgcatcactgcctctgatcttgcagcatccacattcgcgctctcgtcatcaataaccacaaacgtagcaagtgtggtagctgcacgctcctgtacatcctcctgagagctcttcaccaaactcagcagcatatctgcgccctgctgcagccagaagtcatccattccttgcgggttggactccgctatccgtagaagtgtctgcgacaggatccactcgagccagctcatcatatcaccaagtgcattgtctttgcccttccagttacattcattgaacacctcattctccttcacaaccttatcaggaaaaagtgagacgaccgatttgaaaatgtggcttgtaatggtgagtacaagcttgcccttggagttgctaaatgctccaggattgtgtgcctgttcctcctcaacagatttgcagttaagcgtgcatataagcttgagggttttggagtgggagatgagcctagagatggcacttggtgagacatcggtgcgggacacatcaacggcaacaagggagggcagctgagcccaggaggtggatgctgtagcccatttcaggttgtgacatccagcgacggagaggaaccggagggataggatgccggcgatggcggcctcatctacggatccgcagtcgaggaaggcgacgtcttctaggagggggcagtagcgcgcgagcgctccgatggcgtccgcgtcggcatcgcggagacccgagaggcgcaggcggcggaggcgcgagcagcagaaggctacttggcggagggcgtcgctggagatgcgttcgagtgggtcgggcccgatctggaggctctcgagggcctcgtgccgcgccgcgaggacggcgagcgtggcgtccgtgaggccgcggcagccgtcggccaccacctcccggagcccccgcgcgcggaggcccgaggctgccgccgccgcctcgtgcccccgcagccgcagccgccgcaggctcccgcaccgcgacgagagcgacgacgccacctcggcgtcgcaccggtgcgcgcggaggtcgagcgcgctccacaggcacggcgacgcccccaggtccctccacgtcctgcacgcggccgccatgctcgcccggtcgcggtagttcagtcgcccgaacagctgcagcaccgtgtcatccggcagcgtcctccagtccaccacgcagctcccgctcccgccaccgccaccccccctcgccgccaccgccacccccaaacccccccgccgccgactcgacgacgagcagctcaccagctccctctcctcatccgccgccacatccttacccttcccaccgtccttgcacagccggcggcgcacccggcgcgtcat

SEQ ID NO: 6865 - DNA, 882 bp, Oryza sativa
  Clone ID: PAT_MRT4530_13513C.1
atggcgacgcgacggcggcgctcagggcgggacgacggcgacgcgcgggcggcgacgcgatggcggcgcggggctcggagcggcgatgcgacgggcggcggtgcggggctcgagacgggcgacgcgacgggtggagtggggctcgacgcggcgatggcggggcgacgcgacgcgcgcggcggcacggggctcggcgcgatggaacgggcggcgcggcagcggcgcagggcgacggcgaggggacggccgtgcggcggggcgcaggcgcgaggggacgagcgcgaggccgacggcgacgcgacggtgatggcgcggcagcggcggcggcgcgcgcgatgggcaggcgacgcggcgcacgcggcaggggagggggcggggctaggaggaccacgatcgaacacctatgccgcaatgaacaggtgttacaccatcctagccctttaccgccaagccaccgtgtcagccatacctctgggggtcccgttctatcctactccgccacactttggaactgcgcttcagcaacttcatcttgaagttgatggcgaaagagaggaggtagaggttctagagcaggttgtcgccggtgttgcggtgacagaggcactgagaccgccggcttcttcttcttctgcggtggtggaggaggacccacctgcactcaccggcaaggaggtggcgggagcagcatgcaaggacgatggcactgaagaagcggcgtcgcagcgagcggatgacggcgtcgaggaggcacgacgagatcaccctcgacaccgccccgacctcgccgacgccgtgccgtcgttgtccacctcggccgccgaagacgacgacccctttcttctagctggcttcatctccatgcctttggacttctcctga

SEQ ID NO: 6866 - DNA, 429 bp, Oryza sativa
  Clone ID: PAT_MRT4530_13514C.1
ctaaaatcgggataaataggaaaagttactgttcattgcggcataggtgttcgatcgtggtccccctggccccgcccccttccctgccgcgtgcgccgcgtcgcccgcccgtcgcgcgcgccgccgccgctgccgcgccgtcaccgtcgcgtcgccgtcggcctcgcgccttgtgccgccgcgcgcccgtcccctcgcgcctgcgccccgccgcgcggccgtcccctcgccgtcaccctgccgcgtcgccgtcccatcgccgcgcgccgtcaccatcgccgcatcgagccccacgccacccgtcgcgtcgcccgtctcgagccccgcaccgtcgcccgtcgcatcgccgctccgagccccgcgccgccatcgcgtcgccgcccgcgcgtcgccgtcgtcccgccccgagcgccgccgtcgcgtcgccat

SEQ ID NO: 6867 - DNA, 677 bp, Oryza sativa
  Clone ID: PAT_MRT4530_13515C.1
acggcggtgcggtggcacgagagaggcggcgcggcggcacgggaacggcggcgcggtggcacgagagcggcggcgcagtggagagggaagaggggaggaagggtgagattgggtggaggaaaatggagggagggggggtatttgtagagaggggagaaggagagggggaggggcggcggcgtaatggcgacgcgacggcggcgctcagggcgggacgacggcgatgcgcgggctgcgacacgatggtggcgcggggctcggagcggcgatgcgacgggcggcggtgcggggctcgaggcgggcgacgcgacgggtggcgtggggctcgacgcggcgatggtgacggcgcgcggcgatgggacggcgacgcagcgggtggcgagcgagcggcgtgacaggcggggtgacgcgacgcgcgcggcggcacggggctcggcgcgatggaacgggcggcgcggcagcggcgcagggcgacggcgaggggacggccgcgcggcggggcgcaggcgcgaggggacgggcgcgcggcggctcgaggcgtgaggcgacggcgacgtgacggtgacggcgcggcagcggcggcggcgcgcacgacgggcgggcgacgcggcgcacgcggcagggcagggggcggggctagggggaccacgatcgaacacctatgccgcaatgaacag

SEQ ID NO: 6868 - DNA, 2355 bp, Oryza sativa
  Clone ID: PAT_MRT4530_13516C.1
atggctgtaggaacagagagtggctcgggcggcgtagccgagagcgccccctcgacgccaatgtcggcaatgacaacaacgcccatatcggcgaggtcggtgaggtgggagagcgacatgccggacatcgaggagggaggcggcgggctggagcggccgctgctgcgccgccgcggcaccaacaccacgtcgcagatggccatcgtcggcgccaacgtctgccccatcgagagcctcgattacgaacttgtggagaatgaagtgtacaagcaggactggagatcaagggggaaattgcaaatcttccactatcagatccttaaatgggtcctagcacttcttgttggattaatagttggcctaataggattcttcaacaacattgccgtcgaaaacatagccgggttcaagctgctcctgacgaccaatctaatgctccagaacaggtacaaggcggcctttctatggtttatcagctgcaatgcaatgttggcagcagccgctgcagcattgtgcgcttactttggcccagcggctgccggatctggcatacctgaggtgaaggcctatctgaatggtgtcgacgcgccgtccatcttagcgcccagtaccctcttcgtcaagattgttgggtctatatttggggtgtctgctgggtttgtgctgggcaaggaaggtcctatggtgcacactggggcttgtgttgcctcctttctaggacaaggcgggtcgcgcaagtatggcttcacttggaattggctcaggtacttcaagaatgatttggaccgcagggatctgatcacctgtggagctgcagcaggagttacagcagccttccgcgcccctgtcggcggtgtcctcttcgcacttgaagaagcaacatcctggtggcggagcgcgcttctctggaggacattctccacgacagcagtggcggcaatggtgctaaggtccctaatagagtactgccgcagcggcaactgtggcctgttcgggaaaggagggctgatcatgttcgacgtaagttcacaggtgacatcatacaccaccatggatctcgccgcggttgtgctgctcgccatcgtcggcgggctacttggagcactcttcaacttcctcctcaatcggatccttcgtgtgtatagctacatcaacgagaaaggcgcgccgtacaagatcattcttacggtggtcatctcgctggtcacctcgtgctgctccttcggcttgccgtggctgacggcgtgcacgccatgcccgccggagctggccgccagcggccactgcccgaccatcggccgctccggcaacttcaagaacttccggtgtccgccggggcagtacaacgccatggcgtcgctgttcctcaacaccaacgacgacgccatccgcaacctcttcagcggcggcacggagagcgagttcggcgtgcccatgctgctcgcgttcttcaccgccgtctactcgctcggcctggtcacctacggcgtggccgtgccgtcgggcctcttcatccccgtgatcctctccggcgcgtcgttcggccggctgctcgggaagctgctcggcgtgctcaccggcctcgacacggggctcttcgcgctgctcggcgcggcgtccttcctcggcgggacgatgcggatgacggtgtcggtgtgcgtcatcctcctggagctcaccaacgacctcctgctgctgccgctcatcatgctggtgctgctcgtctccaagacggtggccgactgcttcaacaagggcgtgtacgagcagatggtgcgcatgaaggggctcccttacctggaggcgcacgccgagccgtgcatgcgcagcctggtcgccggcgacgtcgtgtccgcgccgctcatcgccttctccagcgtcgagagcgtcggcaccgtcgtggacacgctgcgccgcacggggcacaacgggttcccggtgatcgaggacgcgccgttcgcgccggagccggagctgtgcggcctcgtgctgcgctcccacctcctcgtgctcctccgcgccaagaccttcaccgccgaccgcgtcaagaccggcgccgccgaggtgttccgcaagctcgcgccgttcgacttcgccaagcccgggtcgggcaagggcctcaccgtcgacgacctggacctcaccgaggaggagatggccatgtacgtcgacctccacccgatcgccaaccgctcgccgtacaccgtagtggagaacatgtcgctggccaaggccgccgtgctcttccgccagctcggcctccgccacatgtgcgtcgtgccgaggacgccgggggtaatagagcttaccaacttagctgaatcctacatgcttttccgccatttttgcatctga

SEQ ID NO: 6869 - DNA, 634 bp, Oryza sativa
  Clone ID: PAT_MRT4530_13517C.1
atggcaacgcgacggcggcgctcggggcgggacaacggcgacgcgcgggcggcgacgcgatggcggcgcggggctcggagcggcgatgcgacgggcggcggtgcggggctcgagacgggcgacgcgacgggtggcgtggggctcgacgcggcaatggtgacggcgcgcggcgatgggacggcgacgcggcgggtggcgagcgagcggcgtgacaggcggggcgacaagacgcgcgcggcggcacggggctcggtgcgatggaacgggcgtcgcggcagcggcgcagggcgacggcgaggggacggccgcgcggcggggcgcaggcgcgaggggacgggcgcgcggcggctcgaggcgcgaggccgacggcgacacgacggtgacagcgcggcagcggcggcggcgcgcgcaacgggcgggcgacgcggcgcacgcggcaggggagggggcggggctagggggaccacgatcgaacacctatgccgcaatgaacattgagatagtcgaggaggagccgcctccaccgctcgccgcctccgccactcaagctcctccgccccactgttgttgtcctcttcacgtgctggtggaggccgtggagaagccacgcggccgtcaagtaggcgcgcactga

SEQ ID NO: 6870 - DNA, 1686 bp, Oryza sativa
  Clone ID: PAT_MRT4530_13518C.1
ctaaaatcgggataaataggaaaagttactgttcattgcggcataggtgttcgatcgtggtccccctagccccgccccctcccttgccgcgtgcgccgcgtcgcccgcccgtcgcgcgcgccgccgccgctgccgcgccgtcactgtcgcgtcgccgtcggcctcgcgccttgagccgctgtgcgcccgtcccctcgcgcctacgccccgccgcgtggccgtcccctcgccgtcgccctgcgccgctgccgcgccgcccgttccatcgcgccgagccccgtgccaccgcgcgcgtcgcgtcgccccgcctgtcacgccgcacgctcgccacccgccgcgtcgccgtcccatcgccgcgtcgagccccacgccacccgtcgcgtcgcccgtctcgagccccgcaccgccgcccgtcgcatcgccgctccgagccccgcgctgccatcgcgtcgccgcccgcgcgtcgccgtcgtcccgttccgtgtttttttttttttttttttttttttttcgtgcacttgtcgacgtgttttaaataagtggataggtatacagcaattgacatatatgtatggaccagacattaattgaccactccccgtgtacggggatggtgccccgccgccgcctggcgcacacactgacgacggatccgtcgctgcacccgtcatgggagttgacgaacacgctggcccgggagtcgatgacgccctagtcgacaccatcccacaaatcttcgacgcacttgtaaggcccattgtcacagatgaactgcattccaggcaggcccctcagctgggggagttggctgattttgtctctctcttcctcagtgagctcccagtcgaaaatatccagattctccttcatcctcttctcattgtatgtcttcactaacaaaacatcaccctgctcgtacatccacctcaaacaaatctgagcaagcgtcttgcccttggtttgggcgatgtcgtgcaggacgccggagtccatcaccgcggcgctgccccacggcgtgcccttcgcccccagcggcgagtacccgcacagctgcaccccctctcgccggcacacctcccgcagcgtcctctgctgccacatcgggttcatctccacctggttcgccgccggccgaaccacggcgaacgacagcagctgctccagcttcttggcggagaagttactgacgccgatggcgcgcgcgaggcccagccggtggcactcctccatgccgcgccacacgccctccatgtcgaacgccggcgccatctcctccttggggaacgggaagtcgtagctgcccggcgccacggtcgccggccagtggacgaggagcaggtcgacgtagtccattccgaggttgcggagcgtctccctcgccgccggcacgacgcggccggcgtgcaggtcgctgcaccagagcttggaggtgacgaacacgtcggcgcgggaggcgacgaggccgcgccggacggcctccgcgacggcctcgctgacgcagccctccgtcgcgtacagcctcgccgtgtcgaagtggcggtagccgagctcgatggcgcggagcagcgccgccgtggtttcctcggaggaggtgaaggggaacgccgccgtgcccatgccgatgcgcggcatggtcgggagcagcgcgctcgcaggcacctccgggatggtcgccattgccatagc

SEQ ID NO: 6871 - DNA, 444 bp, Oryza sativa
  Clone ID: PAT_MRT4530_13519C.1
ggctgagagaactatccctggaagagcagaaccgggctcttgctaactgatcgaaatgcatgtatcgcgctgcgtacgggctgaggacgggcaccaacccgatcaagacgtacgtcgcgtgcatgatgatctttggtatgtgcactcgcttcatcatccccaccatcggctcgggtaatggcatgatcaaggtccgcgtgctgtgatccttctgctgtacatgtggcatgatggtcgggttatcacatctgtaaatgttgtgaggttggtacttgctgacaataaactcctcactgggaccactgcactcctaccgggagccctgaagagtaaaatttcatagagatcttgagcataccgagacggaatgtatgtgataaacaaggtccttttttcccagtactgaaaatctggcagtaattacaggtcatattaacatgcttc

SEQ ID NO: 6872 - DNA, 324 bp, Oryza sativa
  Clone ID: PAT_MRT4530_1351C.1
cgcttgatgactgcctcatcactatggccgaatccggccccgacaccaatccgccgctggatgtgaagccaacggcccagatggaggccaacggtgccaaggcgcaggccacgcgtgtagggctggccgttccgctcctcgcccgttcccagaagcgccgcttatcctcaagccgagtggccgacagcgccgcccaggagtcgaggagtcgtagctcgtagcgccacccttccttgcgcgcgcggttgtgccctttctcgccgccggtcttcccgtcccctgtggcccggccgtcctccgcggttggcttggcctgctttttgg

SEQ ID NO: 6873 - DNA, 324 bp, Oryza sativa
  Clone ID: PAT_MRT4530_13520C.1
gttattttgttatatgtttaatttgttacataatgcgagtgcgagtgtgatgcggagcaagggcaagccatggacgcacttagaggcgtgaggccaaatgtgtattgaatgatcgatgccaataagcaactaatgatggctaaagatgccagtggacattgtatgtgagctgttgagcgacaatatgataaagacagcattctatatcatctaagaataccgggtgcatgtttcactcatccagtgattacactgggtgctctgacagagcctcaagtgcaagataaggatgctatagtacgaccggtgattagtggggctaag

SEQ ID NO: 6874 - DNA, 372 bp, Oryza sativa
  Clone ID: PAT_MRT4530_13521C.1
atggcacatgcgctggcactacacacagacgtggccaagaggggacgttcctggcctggggttgaccaacgaggacgtcggtgttttaaggggacgaggattgtgacatcccggcccagggcttataggattactagaatacttatatcaacaagttacaactttttttctgcaagccgatcttcaaagaacttcagggttaagcgtgcttggcttggagcaatttcgagatgggtgaccgactggaaaattctttctgaggacaaagtgtgcagaaaagacatgtggtggcctttacaatctaaagaacctctacactttgcagatagggttgaccctgcaaaggtttgggatgccatgaacctgacataa

SEQ ID NO: 6875 - DNA, 372 bp, Oryza sativa
  unsure (1)..(372): unsure at all n locations
  Clone ID: PAT_MRT4530_13522C.1
tgagtgtttttttttcataaagagcaaaatttantgttgctgggacttttatctggaattgttagcactcagcagaagcaactgcatacccttacaattgaactaaggtagcactgattccgttagaaaccaccaatttggtttgaggagaacggagctcattttatgcttggttaatgcgcttacgggaactggggatagtgcttgcactgggtttgcagaccattgtttcatcaaactaacccagtgctatttgcagaaaccaaatggataataatggatcatcgtttggcatatttagtaccagagcacttccgatgcatttcttcgtattaatgcgatatacagtttgcttgcttttacactttctgg

SEQ ID NO: 6876 - DNA, 1866 bp, Oryza sativa
  Clone ID: PAT_MRT4530_13523C.1
atggctctacgccgagccgcctccctcctcctccggccacggctccgagctcccgttccgatccccacacccaaaaccccaaaccctctcctcctcccgccccgccgccacttctcccagctcccgccgcctccagtccccgcctccgcggccgccgccgccgcggccgttgcggaggaggcggaggaggccttcgaggcggcgaaggggaccaaggacctgctcgccgccttctcccgcctcgaggccgtcatgccgccctccgacaagcgcctcgccctcgcctgcatcaagctcggccagcacctcgaggcctccggcgctgccgacccctcccgcgtcctcgccctcgccctccgatccctcggcatcctcgaggccacccctaactccgccacctcgacgacggcctcccactccgatgccgtctcgctcgccatggccctccacctcgccggctccgcctccttcgacctctcccgcttccacgacgcactctccttcctcacccgctccctccgcctcgtctccccactcctcccctcctcctcctccgccgccgccgcctctggtgacgacgacgctcaagggttcgacgtgaggcccgtggcgcacgcggtgcgcctgcagctggccaacgtgaagacggcgctggggcggcgggaggaggccctagctgacatgcgtgcgtgccttgacctcaaggagtccatcctgccgccgggtagccgggagctcggcgccgcgtaccgggaccttgcggaggcgtactccaccgtgctagatttcaaagaggcgctcccattgtgcgagaaggcgctcgaactgcatcagtcgacgctaggcaaaaattcggtggaggttgcgcatgataggcggctgcttggggtgatatacaccggcctggagcagcatgagcaggccctgcagcagaatgagatgtcacagaaggtgatgaagagctggggcgtggctggcgacgagctcctgcacgcggagattgatgcggcgaacatcaagatcgctttgggcaagtgcgacgaggccgttactgtgttgaggaatgtctctaagcaggtggagaaggatagcgagatacgagctctagtgtttatatctatggcaaaggctcttgctaaccaggagaaggccggtgatacaaagaggtgcttggagattgcttgtgacatactggagaagaaggaattggctgcaccagacaaggtggccgaagcatatgtggaggtatcctcactgtatgagatggtgaatgagtttgacaaagcgatatcattgctgaagaggagcttggggatgcttgagaggatacctcaggcacaacacatggaagggaatgttgcggctcggattgggtggctattgcttctgacagggaaggtgtcggaggctgtcccatacttggaggatgcagtggagaggatgaaggacagctttggaccaaagcattacggggtagggtatgtgtataacaatttgggggctgcatatatggagatcggccgaccacagtctgctgcgcagatgtttgcgcttgcaaaggaagtcatggatgtttccttggggccgcaccattcagataccatagaggcctgccagagccttgccaatgcatacaacgcaatgggaagctatgctctggctatggagttccaaaagcgagtggtggattcttggcgaaaccatggtcccagtgctagggacgagctcaaggaagctattcgtctctatgagcagataaagataaaggctctttcatgcctatcgcctgaaaattcagcaattgcattgcctgaacctctggaaaaggaggttgattctgattctaccagagttgctcaacaataa

SEQ ID NO: 6877 - DNA, 273 bp, Oryza sativa
  Clone ID: PAT_MRT4530_13524C.1
atgagcctcacccgccgcccgcgtgacttcccaccttgcctcacccgaccatgccgggcctcgccgccgccgaccatgagcgaactccacgagcagcgccagcgaccgacccacgctgcccggatcggaggcgaaggacaacagcccggggccgccttcatcgacgccgaggcgaacgggagcaagtatcagcagcagaagctgggtgatgtgccctcgtcgcagccgcatcatctgaatatctattacaagatttgttttggtgaggaataa

SEQ ID NO: 6878 - DNA, 157 bp, Oryza sativa
  Clone ID: PAT_MRT4530_13525C.1
gatcttggcaatgtaaccaattaaatgggcacattgatcctttttgaattttaaattacttacaacaattttgatttttaaaagcaaataaaacctaaatacggatttaggactttaaaacaaaaacgttagaggctttgatgctttctactaaaaa

SEQ ID NO: 6879 - DNA, 1130 bp, Oryza sativa
  Clone ID: PAT_MRT4530_13526C.1
cagatgaaacttctctacttcaaatggtcatcgcaactgacatgctcatttcacacttttacactgtgggcacagtaatgagagcggtccactgttccaacaccacagcgaaaaaacgttctcatgtcaattgtcaatacagtttcaactcaaaagcctacccagatcttagaaacaatgcaccaggctactagaactactaccccaaagaccaggggtggtcacacgctaaaattatagtacatgccttcagatttacataatcaaacgtggaaaatgataaggtacaaaatggcaattacaaggattgcctgataggcttagttgagcagtaagtgatgttttcaaccaatgtgtgtacagttggcgccaagagtcagaatcaggggtgcatttcctgtccttcgtgtcatccgtgttcctagcggatatttccgtgttaagatgtgtattcacagttgttaagatgacttggttctcttgtgttgagcctggccttggaggcacagcctgaatcgctgggttaggctctcccccatctcttgcctctcctgtttgagcctcttccatagagatcgattcttcctctcctttggtatagcgagcggtttccttcgtatccgtctcagtggtgttgccaaggcccgtagcgtcatgctcttatgcttatgactaggaatttcagggcgctcgcctagggatgatccatcactcgctgcccccaaggaagaacatcttccccagctctctcggtttgaacttgtgtatgagcagcactcctcattttgcctgtgagatttatcctctaaatgagactcagcagtgtgagtgtccatctcagtgaggttatgattttcatccaaaagaaaatccaagtcattatctgttttaatagacaactgattgaccctctctgtcagcaattcaaccactgattttgtagcatttgtgaagttagctgcagctgccgatgaactgcctgcatcaggaccagcagcccttagaccattgatgatttcatacagtaagctctcatttgttccagctccaaccttaaaagcaccaaggttgtagtacttatctaacttatttgagcataccggacgcgtgggtcgaggcgggaattccgg

SEQ ID NO: 6880 - DNA, 306 bp, Oryza sativa
  Clone ID: PAT_MRT4530_13527C.1
atgcatttcttcaatagaaattcgttttggtttaacttggacgagttcgccgcgctgaaaattgaaaaagatacattttctccgcacaagctaagctactgccgtacgtacgcacaccgagcagcacacattaacaaccggttcccctacgacgcaggcagagccaacgatcaagtgttaggagaagggcagcagttgactcggctacaacgacataactgttgtttatatgtggcccaagaggcccaaactacacccctaacatacgcgttttactgccttctacgcttgctctaccccaagtat

SEQ ID NO: 6881 - DNA, 433 bp, Oryza sativa
  Clone ID: PAT_MRT4530_13528C.1
aaaagccccctgggtccggggggaaaattcccttggaaacgaatccttaaaacagttttacccacaggtttttgccgaaggcaaaaacttttccaaatttttttttaattggggcttttaaacaaaaggccaaaaggggttaacttaacccaactttttagggccccccattgtttgatttttgaaccccaaatgggcaagctacaaatttgggccccatttcctaaacaaaaaaggttttatgatcgttacggaaacaactagcggaaaactttttttaattcctaatttttttccaaacggaaaccaccaccggggttggcttttttggggtttttccgtttaaccctaccgggggggcctccaccaaaggggctttgaagaaaaaaataaatgggtttttaaaactcacccctcaccaggaaggaggggg

SEQ ID NO: 6882 - DNA, 336 bp, Oryza sativa
  Clone ID: PAT_MRT4530_13529C.1
atgacggcgaatgtgctcaagctgatgaaggtgccggcggctaccaaggttggcgcgggtggcaccggcacggaggccggtgccgggtgttcctggatcggtggccggcggaggctagcgcggcgcaaggacacgcgactggcggtggaggctggcacagtgcgacgagggtggccgtgtggcggcacgcggaggctagccggcggatggtgccgatgcagcgggggcctgtcgagtgaaaacctagtcctggtctccctgagacctcgacggacgacgacggcggtgctttcgccgctcctctccctggagacattgtctaggcacacctcttga

SEQ ID NO: 6883 - DNA, 195 bp, Oryza sativa
  Clone ID: PAT_MRT4530_1352C.1
atggctccgggtagcggagctccgaaggaagccaagggctccggggctgtccgtaggctccgaaactgttcaagggctccggagccgaataaggcctccggagccatctattgctccggaaccgttcaaggcttccggggctggtcaaaggccccggatgaagctagggcttcaagagccctgggcataagatag

SEQ ID NO: 6884 - DNA, 476 bp, Oryza sativa
  Clone ID: PAT_MRT4530_13530C.1
tccacgcgtccagccacgcgttcgaccacgcgtccgtgaccaggtaacacaggccaatggactgatctcccccctcgacttactcatctccaaaggcagggtcctgaggctcggcttcttcttctcaacagactacatccagagcttcttgctcacgatctggtaccacaaccatctccgactccgagcgcacgtacgtttgattcgccaacctcgacatcacaatcaccacccattcattcgtagcgctagccatcagcaacagctctaacctctgccctggcggattccaccaatcacaccctttgtacaacgaacgctactggcaccggagagcacggatcttacgcggcgctggtcgactccatgtactaggatctccagcagccaactggcacaaccatatggcagatgtgggatcacccagactgacacccttcagatgggcatgaggttcttggtgagctacgaggcac

SEQ ID NO: 6885 - DNA, 433 bp, Oryza sativa
  Clone ID: PAT_MRT4530_13531C.1
atggcgcagctatatgtggtgaacttacaaggatgcgaggccatgcgtagcacggccgccgcctgcgtgcgaggccctgccgagcgcccgccgccgctggccgcctgcacgcactcgcactcgccggcgccgcccggcctgccgctcgcccgcgccggccaccgcctggcccgcgctcccctcgccggcgctgcccggcttgccgctcgcccgcgccggccgccggccgcctgcccgcgatcatccgcgcttgccgatgctcgcccctcgcccgcgccggccgccgcctggcccgatgttcgcccgtgctggccgcggctcggcccgccgctcaccgctcgctcgcgccggccgccgccggcctccacctggcccggcgctcgcccgcgccggctgcggctcagcccgccgctcggccttgctgagggaggag

SEQ ID NO: 6886 - DNA, 1510 bp, Oryza sativa
  Clone ID: PAT_MRT4530_13532C.1
cacgaggcatgcgcggctggtggcgagccgagccggcacccggcagatcgggcgcgcctcacgtctatatagacactcacgggggccgcgtcgtctccatgccctcaccctcgcgcactcccatccacgcgtccgacatcccgcgccatcgacctcctctccccgggaccgcgtcgctcgcgcgttgcctccacctccagtagcaagtatcaatggcggactccggcaagaagcgggacgggtcggccaacggcgccgagaagaaggcgtcgccgacgccgaagccgccgtcctcctccacatccggtttctccaagaatgtccccctcctcgtgtttgtgttattgctggggctgctgtaccggcagcttcagcctccggttccgaaaatctgtggaactccgggaggccctccggtgaccgggccaagattgcagctcaaggatgggaggcacctggcctaccacgagtacggcgtccctaaggatcaggccaagcacaagatcatcttcgtccatggcttcgactcctgcagatacgacgccctccaagtgtcacctgagctcgcagaagagctgggtgtctacatggtctcgttcgatcgtcctgggtatggagagagcgacccacaccccggtagaacggaggacagcattgcgttcgacatcgaagggctcgccgacgggctgcagctcggccccaagttctacctcatcggctactccatgggcggggaaatcatgtggagctgcctcaaaaacatccctcacaggctcgcgggggtgtcaatcctggggccggtggggaactactggtggtcgggttacccgtcgaacgtgtcgacggaggcgtggtacgtgcagctcccgcaggaccagtgggccgtccgcgtggcgcaccacgccccctggctcgcctactggtggaacacccagaagctcttcccggcctccagcgtcatctccttcaaccccgccatcctctcccgggaagacttgaccgtcatccccaagttcgcctaccgcacctacgccgggcaggtgaggcagcagggggagcacgagagcctgcaccgggacatgctggtggggttcgggaagtgggggtggagcccgctggagatggagaacccgttcccggcgggcgaggcggcggtgcacctgtggcacggcgcggaggacctcatcgtgcccgtgcagctgtcgcggcacatcgcgcagcggctgccgtgggtgcggtaccacgagctgcccacggcgggccacctgttccccatcaccgaagggatgccggacctcatcgtcaggtcgatgctgctcaccgacgagtgagatcaccgaccgaccgaccgagacgcgcatctctctgttttttttggtttttggaattttgggtactgtcacgtaccgacgtacggtggtacgcgtagttgcttgctcctattatcctatcctatatagagaaatgacaataatattttgcggagtcaaaaaaaaaaaaaaaaactacc

SEQ ID NO: 6887 - DNA, 4188 bp, Oryza sativa
  Clone ID: PAT_MRT4530_13533C.1
atgccacagcaacctcaaggaacacctcaacaacgaccatgggcagatttgattgcagatgtcatgaaggagcagtttgggcttaggccgaaagatgctggaaatttgtatcgacaaccctatcctgaatggtttgagagggttccactacccaatcggtttaaggcaccagaattttcaaaattttcaggacaagatagtacatcgacttacgagcacattagccgatttttagcccagtgtggtgaagcatcggctgtggatgccctgaggagacatgatgagcctgtgcatgagtatattcagagattcagggagatgaggaataagtgctacagcttaagtttgactgatgcccagttagccgatttagcttttcagggtatgattgctccaattagggagaaattctcatctgaggattttgaaagcttgtcccatctcacacagaaggtaaccttgcatgaacaaagatttgcagaggctaggaagaattctaggaaggttaatcatgtatgtccttacatgtatgggtcggacgatgaggatgatgattctgagatagctgcagccgaatgggtaaggagcaaaaagattataccatgccaatgggtaaagaactctagaaaagaggagaggtatgactttgatatcactaaggctgacaagatttttgacttgttactccggaagaagcagattcaacttcctactggtcacacaattccatcggctgaggaattgggcaagaaaagatattgcaagtggcataattctgggtctcatacgactaatgattgcaaggtcttcaggcagcagatccaagcggctattgaagggggcaaaatcaaatttgatgactctaagaggccgatgaaggttgatggcaatcctttcctgttaatatggtgcatacagctggccgaacaaccgataggggtcgtgcaagaggttttcagaggaggtatgaaaagtagcaggagaagcattatgaagaagatgacgatggctttgatcctcattggggttgcgagttctttagattttgctggaatgaacgaggacgatgaaaataggaaaactcaatggtgtccttccggtatctttacggagaatcaaaagagaagggttcaaagattgaggagcagggagcactttcaggaagtcgagcaggaaatcaaccatcggttgaagaagacaaagccgaagcaggagtggcgtgttaagaatcaagttcctgtagctgaggaagccacagccgatgaagcaaaaaggttggccaaaggaaaaagtgttgtagctgcttcggtcatcatggttttcacattgcctgccgaatctgggattaagcaagaagatattgacgaagttgaagaagaatcggctaagttgattttttcaccagagcaggcagttttcgagaagccagaggggacggagaatcggcatcttaagccattgtatataaatggttatgtcaatgggaagccgatgtccaaggtgatggtcgatggtggggctgcagtaaatttgatgccttacactacgtttaggaagttgggcagaaatgctgaagatctcatcaagacaaacatggtgctcaaagactttggcggcaatccatcagaaaccaagggagttttgaatgtggagctgacagtcggcaacaaaaccatccctacaatgttctttgtcatcgatgggaagggttcttatagcttgttgcttggaagggattggattcatgctaattgttgcattcattcaaccatgcatcaaggcttgattcagtggcaaggtgacaagattgaaattgtgctagccgacagccaattgaagatggagaacccaagctattattttgagggcattgtggagggttcagatgtctacaacaaggacacagtagatgatctcgatgacaaacaaggacagggttttatgtcggccgatgattgggaagaaattgatataggtccaggtgatcgacctaggccgacatttattagtaagaatttatctgcagaatttagaaccaagttgatagagctgttgagagaattcatagattgcttcgcttgggagtattatgaaatgcctggactcagccgatcgattgttgaacatcggctacctatcaaaccaggggttaggccacaccaacaacctccgaggagatgcaaagctgatatgcttgaacctgtcaaggctgagattaaacaattatatgatgctggttttattcgtccttgccgatatgctgagtgggtttctagtatagttcctcatataagaaaaacgatttttatggccgaagaagacattcataagacagcttttagatgtcctggtgcaatcggcttatttgaatgggttgtgatgactttcggcttgaagagtgcaggagctacatatcaacgagccatgaattatatataccatgatctaatcggctggttggttgaggtccacattgatgatgtggttgttaaatctaaggaaatagaagaccatatagctgatttaaggaaagtctttgagagaaccagaaaatatggcctgaagatgaacccgacaaaatgtgcttttggtgtatcggctggccagtttttgagatttcttgttcatgagagggggatcgaggtgactcagaggagtgttaatgcgatcaagaagattcagcctccagagaacaagacagaactacaagagatgatcggcaagataaattttgttagaaggtttatttctaatttgtctggaaggttagagcctattacaccattgttgagattgaaagccaatcagcagtttacttggggggcagagcaacaaaaggctttggataatattaaggaatatcttaactctcctcttgttttaattcctccacagaagggaataccttttagattatatctatcggccggtgagaagtcaatcggcttagttttgattcaggagcttgaagcaaaagaaagagttatattctatatcagtcgtcggctcttggatgcagaaattagatattcccctgtggagaagttatgcttgtgcttatatttttcatgtacaaggttgaggcattatctgctatccaatgagtgcactgtcatatgtaaggccgatgttgtcaagtatatgttattggctccgattttgaaaggaagggttggaaagtggatattttccttaactgagtttgatcttcgatatgagtcgccgaaggcaattaaagggcaagctatagccgattttattgtggaacatcgtgatgattcaatcggctcagttgaaattgtgccatggactttattctttgatggatcagtgtgtactcatggttgtggtatcggattagttataatttcccctaggaggacatgtttcgagtttgcttatactatcaaaccttatgcaactaataatcaagctgagtatgaggcagtgctcaaagggttgcaattactcaaggaagttgaagccgatgctattgaaataatgggggattctttgctagtaatcattcaattggcaagagaatatgaatgcaaaaatgatacattaatggtttgtaatgagaagtgccaagaattgatgaaagaatttaggctggttactttaaagcatgtgtcccgagaacagaatattgaagctaatgatttggcgcaaggggcgtcggggtataagccgatgatcaaagatgttaaggtcgaagtcgcagcaataacagctgatgattggaggtatgatgtgcatcaatatttactgaatccatctcaatcggcttctaggaaattaagatataaggcattgaagtacactttattggatgatgagctttattatcggacaattgatggggtgttgcttaagtgtttgagtgccgatcaggctaaagttgcaatcggtgaagttcatgaaggaatttgtggtactcatcaatcggctcataagatgaagtggttacttcagcgtgcaagatatttttggccgacaatgctggaggattgttttagatattacaaaggatgtcaagattgtcagaaatttggagcaattcagcgagcaccggcgtcagctatgaatcctatgtcacgcccagaatttctatccaaaattccaaacgcttacatgcgtgttaaatccacctccaggaatcagccgaggcacacaataacaaattga

SEQ ID NO: 6888 - DNA, 375 bp, Oryza sativa
  Clone ID: PAT_MRT4530_13534C.1
cagtaagataaaacactggtgagaccctgggaaagtttaacccccggggggtctggccaaaaaaaatttaccacttaaattaccccctcacccatggattcagaaccatggaggggggaaacaatttcccaaaaaaacacagggagggtgaattttataccaccccaaaatgtttttttttccgcccccccaattaattaacatactgagaacggtttccccccaaaaaaaaaagggagaaacatggaggggacctttttcatgggccaaaaattgggttaaccaggctgaacgcataaaggtccttgagaagcccggggcctggtgaaaaggaacacaccctcaacctgacaaggtttggaagatggggttggg

SEQ ID NO: 6889 - DNA, 552 bp, Oryza sativa
  Clone ID: PAT_MRT4530_13535C.1
ggggcatgtttcgagtttgcttataccattaaaccgtatgcgactaataatcaagctgagtatgaggcagtgctcaaagggttgcaattactcaaggaagttgaagccgataccattgaaatcatgggggattctttgctagtaatcagtcaattggcaggagagtatgaatgcaagaatgatacattgatggtttataatgagaagtgccaccacctaatgaaggagtttcggctagttactttaaagcatgtctctcgagaacaaaatattgaagctaatgatttggcccaaggggcatcagggtataagctcatgatcaaagatgttaaggttgaaattgcagcaatgacagccgatgattggagaggttggggaattgatatgatcggtatgataaacccaccatcaagtaaaggacataagtttatattggtggcgactgattatttcaccaagtgggtggaggccattcctttgaagaaagttgattctggggatacaactcaatttgttcaagaacatataatctaccgatttggtattccttaa

SEQ ID NO: 6890 - DNA, 4293 bp, Oryza sativa
  Clone ID: PAT_MRT4530_13536C.1
atgcagcaacaatcgcaaggagcagctcaacaacgaccgtgggccgatgtaattgctgacgtgatgagggaacagttcaagcttaaaccgaaagatactgggagtttataccgacaaccgtatcctgaatggtttgaaagagtccctctccctaaccggttcaaagttatagatttttcaaagttctcagggcaagataatgccttgagggttagattgtttcggttgtctttggctggatcggcttttacttggttttccgctttaccgtgtggatcgagtaacagctgggccgatctggagaagcagtttcatagctatttctatagtggggtacatgagatgaagttgtccgatttgacagcaatcaagcaaaggcatgacgagcccgtgcatgaatatattcagaggttcaaagagatgaggaataagtgcttcagcttgagtttaaccgatgcccagttagccgatttggcttttcagggtatgattgctccgatcaaggagaaattctcatctgaggactttgaaagcttatcgcatcttacacaaaaggtaactttgcacgagcagaggtttgctaaagctaggaggaattctaggaaggtaaatcacgtttgttcttatatgtgtggatcgaatgatgaggatgatgatgaccctgaaatagctgcagccgaatgggtaaggagcaaaaaggttataccaggccaatgggtgaagaattctggaaaagaggagaggtatgattttgacattaccaaagctgacaagatttttgatctgttactccaagaaaagcagattcaactccctactggtcatactatcgaggattgtcctgaatgcggtggtgttacaaggggttcaagccggtcgtatattaaaggcaatcggctgaaacatgcaagggttcctcctcatcaaagattgggcccggtaaatcaggatcatgacccggacgatgacgaggataggaaaattcagtggtatcatgctagtatttttacaaagaatcagaaaagaagggttcaaagattgataaaccgggaacgttttcaggaagtcgagcaggaaatcaatcatcggctaaagaaaacaaagccaaagcaagaatggcgcgttaagaaacaagctactgtagccgatgatgttgcagccgacgaggcaaaaaggaagttgggcagaaacgtcgaagatctcatcaaaacaaacatggtgctcaaaggctttggtggcaatccatcagaaaccaagggtgttctaaatgtggagctgacagtcggcagtaagacttcctactacgttttttgtcatcgatgggaagggttcttacagtttgttgcttggaagtgcttgattcaatggcaaggcgacaagatagaaatcgcgccagccgatagccgatggaagatggagaacccaagttactactttgagggcgtcgtggagggttcaaacgtctacagcaaggacacggtagatgatctcgatgataaacaaggacagggttttatgtcggccgatgatttggaagaaatagatataggtccaggcgatcggccaaggccgacatttattagtaagaatttacctatagaatttagaaccaagttgatagagctattgaaagaattcagagattgcttcgcttgggagtattatgaaatgccaggactcagccgatcaatcgttgaacattggctacctcttaaaccggggaaaaacggcaaggtcaaggtatgcattgatttccgagatttgaataaagctaccccaaaggacgaatatccaatgccagtagccgatcaactagttgatgctgcttcgggacataagattttgagttttatggatggaaacgcaggatataatcagatcttcatggctgcggaagatattcataaaacggcttttaggtgtcctggtgcaatcagcttatttgaatgggttgtgataactttcggcttaaagagtaccggagctacttatcaacgagttatgaattacatttaccatgatctaatcggctggttggttgaagtctattttgatgatgtggttgttaagtctaaagaaatagaggaccacatagccgatttgagaaacgttttcgagaggaccaggaagtatggcttgaagatgaatccgacaaagtgtgcttttggtgtatcggctggccagttcttgggatttcttgttcatgagagggggattgaaataactcagagaagtatcaatgcaatcaagaagattaaacctccagaggacaagacagaattgcaggagatgatcggcaaaattaattttgttcgaaggtttatttctaatttgtctagaaggttagaaccttttacaccattattgagattgaaggccgatcagcagtttacttgggtggcagaacaacagaaggctttggatagtattaaggaatatttgagttcccctccagttttgattcctccacataaaggaataccttttcggttatatttatcggccggcgataagtcaatcggctcggtcttgattcaggagctcgagggaaaagagagggttgtgttctatttgagtcgtcggctcttggatgcagagactagatattcccctgtggagaagtcagtctgtactcatggttgtggcatcggcttggttataatctcccctcggggggcatgctttgagtttgcctatactattacaccttatgcaactaataatcaagcagggtatgaggcagttctcaaggggttgcagctactccaggaagttgaagccgatactattgaaatcatgggggattctttgttggtgatcagtcaattggcaggagaatatgagtgcaagaatgatatgttgctagtttataatgagaagtgccaagaactgatgaagaagtttcggctagtaactttgaagcatgtgtctcgagagcagaatattgaagctaatgatttagcccaagggtcatcgggatataagccgatgatcaaagatgttcagattgaagtcgctgccataatagccgatgattggagatatgctgtctatcggtatttatgggatccatctcagtcggcttctcggaagttaagatataaagcattgaagtatacattgttggatgatgagctttattatcggacgattgatggggtgttgcttaattgtttgagtatcgatcaggcaaaagttgcaattagtgaagttcatgaagggatatgtggcactcatcagtcggctcataaaatgaagtggctgcttcgatgtgctggatatttttggccgacaatgctggaggattgtttcagatattataaaggttgtcaagattgtcagaaatttggagcaatccagagagcgccagcgtcggctatgaatcctactattaaaccatggccgtttagaggatggggaattgatatgatcggtatgattaatccaccgtcgagtaaaggacataagtttatattggtggcaaccgattattttaccaagtgggtagaggcgattcctttgaagaaagttgattctggggatgctatacagtttgttcaagagcatataatttaccgatttggtattcctcaaaccattacaaccgatcaaggttcaatctttgtgtccgatgagtttgttcagtttgccgatagcatgggaatcaaattgttgaattcttcaccgtattatgcacaagctaatggacaggctgaggcatataacaagagcttgatcaagttgattaagaggaagatttccgattatcctcggcaatggcatactcgtttagccgaagcattgtggtcttatcggatggcttgtcatgggtcgatacagttttctccttataaacttgtttatggacatgaagctgtttttccatgggaagttagaatcagctctagaagaacggaattgcaaaatgatttaacagccgatgaatattacaaccttatggccgatgagagggaggatctggttcaatcacggttacgagcccttgcaaaggttaccaaggatcaggagcgagttgctcggcattataataagaaagtagtacccaaagatttttcggaaggtgaacttgtgtggaagttgattttgccgattgggactcgagatagcaaattcggcaagtgttcgccgaattgggaaggaccgttccaaattcataaagtggtatctaagggagcttacatgttgcaaggactcgatggcgaagtttatggcagagcgctaaatggcaaatacttgaagaaatattacccaagtgtttgggttaatgagtga

SEQ ID NO: 6891 - DNA, 579 bp, Oryza sativa
  Clone ID: PAT_MRT4530_13537C.1
atggcgaccttctggggtaaaaacttatttgaagggaaaaatgtgtcgtggcgagagcggaaattttccctaaagcgtggtgagatacccccatctgcgcggcctgcttcgcgtccccctgaccctggaggggaatcctgggctgcctgggagcccaacgctttggttgggctacacccatgccgtcccgcgttctcagcccagcctttgggtttctatatcgatgaccttttcccgaaagcctcaatgtctccaagccgctggctgtgggtgagaaaagggaggggtctcgatccggagctagggttccctgcttcctcctcagatattcatcgatttggggacagtgcgagggagatttggagggttgaggagaagaagcgagatcaccgctcctacgcaaaagtggtgatggatcggcgtcccctgcaaccgcatgttgaccaagagctgtacaagcgtcgtatgatggatctggatgcagagaagagaaccattgccagcgaaaatggaccattgtcagcggcccgcataagacaactgccagcgaaaatccgttttcactggcggcccatgtaa

SEQ ID NO: 6892 - DNA, 2052 bp, Oryza sativa
  Clone ID: PAT_MRT4530_13538C.1
atgaagggaatattgtggctgttgatccggaaaagctcacacctgaccagaaagaaggatttcgaagcaatgatgcaacaagcacgagaacagttctttaggtcgttcacacagactcgcaagggaacatttgttcaaaagtacaaggtaaaggtggttcccgatgagccggagaccagtatctctaaggagggagaagaaaaaagagttttagatggctcggctcaagagaatcaaggtgacggctctcagggggtacatgcagttcaaggtgatggtgctcatgagccacaaggaggaaatcttaatcggaatggtcagccgattaatcctcggctattgatgagggagcagccacagcatagcgggcaaacgactccactaaggcagcaggttgtgcagccagttcagccaacacctccaggacaacaaactatacagccgattccgcagcaagctttgatgaatcaatcggctgggcaatcggctgggcacgccctgaatcaggttattccagaacatttggttcaccatatacagccagatggtacggcgatgcctcggattatgccggagcacttggtgcaaagtattcaaccaagttaccaaaattgccaagggggtaatatgaattatcaatatcagcctttttcccctcaagttcagtatcagcaaggagggctaacccaacctcagtttgcttctcaatataatcagtttgaaccaacacagcaacagtcgcaagaagcagctcaacagcgaccatgggctgatgtaattgccgatgtgatgaaagaacaatttgggcttaagccgagagatactgggaaattgtatcggcaaccttaccctgagtggtttgagaaaactcctcttccaaaccggtttaaaatcccagacttctccaaattttcgggacaagatggtgtgtcaacttatgaacacattagccgatttttagctcagtgcggcgaagcatcggctgtggacgctctcagagttagattattccggttgtccttgtctgggtcggcttttacatggttttcttctttgccgtatgggtcagtcaatagttgggccgacttggagaagcaatttcatagctatttctatagtggagttcatgagatgaagttatctgacttaacagcaatcaagcaaaggcatgatgaacctgtacatgagtatattcagagaatcagggagatgaggaacaagtgctttagcttaagtttgactgatgcccaattagccgatttggcttttcaaggcatgattcctccgattagggagaaattctcatctgaagattttgatagcctgtcgcatctcgtacagaaggtgacattgcatgaacagaggtttgcagaggccaggagaagctctaagagggttaatcatgtctgtccttacatgtatggatcggatgatgatgacgatgactctgaaatagctgcagccgaatgggtctttagacagcagattcaagtagccattgaaggggggaagattaagtttgatgattccaaaaagccgatgaaggtcgatggaatgaggctaccatctattgaagactgtcatgggtgcagtgatattacagagagttcaagccgatcgtacaacagaggcaattggctgaagcaagctagagttcccgttcatcaaaggttgggcccggtaaatcaaaatgattacttgaagaaagacgagaacgcgaagactcagtggtgtccttctggtatttttacaaagaatcagaaaagaagggttcaaaggttgaggagcagggagcgctttcaggaggtcgaacaagaaattggtcatcggctgaggaaagcaaagccaaggaaggagtggcgtgttaagaatcaagttcttggagccgatgatattgcagccgacgaagcaaagaggttggcaaaagggaaaagtattgtaacagcgccaattaacatggtctttactttgccagccgaattcgggattgatcaggccgatgttgacgaactggaagaggaatcggccaagttggttctatcaccagaatga

SEQ ID NO: 6893 - DNA, 568 bp, Oryza sativa
  Clone ID: PAT_MRT4530_13539C.1
tggtgaaagccctagaggctacagcaacagcaagcctacggggacggtggagggttggtggaggagaagggtgataggattcaagactgtggaaaagtggaggagaagggtggtgggattcatgattgtgaggggagaatgtcggtgagattcaagattgtagggaagtggagaagggtggtgtgatatgtggcaacagtagcatggtgcactcacatcatggggggatatggcctcctagccggaggtgcgggcaatagctttgaggcaagtggtttgatcataaatctggccactttttagaagaaggcaataatgtaatctatacacaggatgggtttgatttggatgagtacgagttctggtctgatttggatgatgaaggcgacgacttgatagttgattgcttcaatgattttgtgccctagaaaatggtgcactatggtgttgtacttgttgggaagggaggcaatgaaattggcgagctgatgagctgcgatgtggctcttggcatgggacaagctaactcgaccgttaccaaggtgtcctcttcgtcagatgcttcttt

SEQ ID NO: 6894 - DNA, 588 bp, Oryza sativa
  Clone ID: PAT_MRT4530_13540C.1
atggagggagtagatcgtattggctggaacttgggcttgggcttccttaggaaagaacggccgccggtgcatggggacagcggcggcagcggtggaagcaacagcaacgatgggaagtggaaggggaaggagaaggtggtgccggagtacggcaagaaccggcacggcatgcctgtcggcttctacttcgtccccaaggacctggagctcctcgccatcctcatgtgcaagctcgtccgaggcaaggtccccggcgccctcaacaacgtcttcaagcatatcaggatattgaattccaccccgccctcctccatgacgtatatcgagactatggaggacgggtacatctatttctttagcaagaggcaattcgcaacgaaggctaggaacaagaggcggccgatgagggtggcagacggcgggacgtggaaggcgtccggtgggagcaagaaggtcggtggcatcgatgtcagtcagaagttcaccatggtgttctacgagcgtaggtttgagggcgaccgaaatcccgtcaagaccaactggggcatgcacgagttcaccaagatcattcctggcaccaaaaactag

SEQ ID NO: 6895 - DNA, 2440 bp, Oryza sativa
  Clone ID: PAT_MRT4530_13541C.1
tcacgagagctcggccatggtctccccctcgtcgagctcccctcccatctggtcagcgagcagccggagcacctcccaaatctccacgcgctgcgggtgcgcctggtcgtcggcgacgaacgagctcaccacgccgtcgacctccacctcaacaagcaaaactcgccagcagctgataaccaacactgaaagattgactacacgatgatacccgaacatcatcgaaagactacaggatacctttgggaaaaaggcattatgctcacaaccaaacctcgcgctcagggaaaacaacgcaccaaacatgagggctcccaacacataaatagataacttttttccctgatatttaaataaagcatgcacttaaatatcaccagtagcccatggattctcctcacccatctgctcactgcttggatcttcagtttcctcgcccaccacggccacccattcttccccgcccgcggccgccatatccccttccaccaggaaaaccgccacctctgcctcgttcgtacccgccacggtaattccaattgcccctcccgcgcatgccaccccgtcctcggttatatccaccattttcttggtagtttccatatctgccttggttgtagccatatccaccaccaccatatcccccttgattatcatagccaccatatcctccctgattatcatagccaccatacccaccttggttatcatagtacccaccaccttggttgtacccaccttgattgtttccatatccaccataaccaccataacctcctctaccccaaccccttccacgtccacgcccccttcctctgccacgaccccggacataggagtcttcataatcaggtggtggttgacgaacttggcgctgtggtggtggtggcgcctgctggaggcgcggctgttgccggggttgttcaacataaactggggtttggtacccaggagagttcttgtccagatctctgggagataaggtaattgaaatcatcgaaacatgacgagtcatctctagtggaacaaggccttcttcaataggttcccagacatcagtgatgctgacagaactgatgttggtatcttgataaagcccagggactcttttcttgataatttctgcaacagcaacagatttgctgattgcctgccccatggccttcagaacaatctctttaatcctccgatcctggaggagggacgtggcgtaggagacgtagttgcggatgagcccctgcgcggtgatgcggatctcgttctcctcgatggccgactccggccgcggccgctccgcccgcgggtaccggtccatctccgccgcccccgcgcctgcgcctgcgccgccggcgccgcccgctcgtcgccgccgcggcgaggtgctggaagggattgcgacgcgtgctcgcccggcgcgcgcggttggaatggccgtttgtttagcttggagccctccagtagcccatggattctcctcacccatctgctcactgcttggatcttcagtttcctcgtccaccacggccacccattcttccccgcccgcggccgccatatccccttccaccaggaaaaccgccacctctgcctcgttcgtacccgccacggtaattccaattgcccctcccgcgcatgccaccccgtcctcggttatatccaccattttcttggtagtttccatatctgccttggttgtagccatatccaccaccaccatatcccccttgattatcatagccaccatatcctccctgattatcatagccaccatacccaccttggttatcatagtacccaccaccttggttgtacccaccttgattgtttccatatccaccataaccaccataacctcctctaccccaaccccttccacgtccacgcccccttcctcttcataatcaggtggtggttgacgaacttggcgctgtggtggtggtggcgcctgctggaggcgcggctgttgccggggttgttcaacataaactggggtttggtacccaggagagttcttgtccagatctctgggagataaggtaattgaaatcatcgaaacatgacgagtcatctctagtggaacaaggccttcttcaataggttcccagacatcagtgatgctgacagaactgatgttggtatcttgataaagcccagggactcttttcttgataatttctgcaacagcaacagatttgctgattgcctgccccatggccttcagaacaatctctttaatcctccgatcccgctggatgacacagaatcgcagaatctcaacatcggatacatcaaattgggtttccaggtgaattaacagctggaggagggacgtggcgtaggagacgtagttgcggatgagcccctgcgcggtgatgcggatctcgttctcctcgatggccgactccggccgcggccgctccaccctctggtaccggtccat

SEQ ID NO: 6896 - DNA, 402 bp, Oryza sativa
  Clone ID: PAT_MRT4530_13542C.1
atggacgacaagccgccagcgtcgccgtcctcgtctagccccgattttgttaaagagaagattcagcagttgggcctatccgaggttaatgaaagcaacatcgtgaccatcactccagacaagctgacatccgatcaaacgaaggattttgaagcgatgatgcagcaagcacggaaccagttcttgagctcatttatgcaaacccgcaagggaacagtggtgcagaagtataagatggttctcaaggaaatcaaggtgacaactcccaaggagtacagggagttcaaggtgatggtactcagggggttcaaggtgaaggccctaatcaagacgacaatacagcacagttgccgttcaacaacttccaagatcaagttgactatgctgtacaccatgctttga

SEQ ID NO: 6897 - DNA, 492 bp, Oryza sativa
  Clone ID: PAT_MRT4530_13543C.1
atgtccaacggcggtggcggaaaccctctgggcgctggtgacgaaaaccctaggggcggcggtggtgaaaacactatgggtaccagtggcggaaaccctaggggctacggtggcagaggccctaggggttgcagtggtgaaagccctagaggctacagcaacagcaagcctacggggacggtggagggttgggttgcggcgcgcttaggcaagtgggtggcttgtggcggtgatgacggcggtgggtttgcaaagtgcctcctagatgcagagtttgtgcccaagactgagttccaggaatgtgggggagtggaggagaagggtgataggattcaagactgtggaaaagtggaggagaagggtggtgggattcatgattgtgaggggagaatgtcggatgggtttgatttggatgagtacgagttctggtctgatttggatgatgaaggcgacgacttgatagttgattgcttcaatgattttgtgccctag

SEQ ID NO: 6898 - DNA, 3657 bp, Oryza sativa
  Clone ID: PAT_MRT4530_13544C.1
atggagtcgaaggcggagatcgattcgagaatagaagatatgtttggtcaaaagtctgccgcaaagacttatggtatcttagagtttgttagagataagagtcgtgtccgttgggctgatctagagaagcaatttcatagctatttctatagtgggattcatgagatgaaattgtccgatctaacgtcgatcaagcagaagcatgatgagccggtgcatgagtatattcagagattcagggagatgagaaataagtatgacagcctaagtttgattgctgcccagttagccgatttggcttttcagggtatgattgctccaattagggagaagttctcatctgaagactttgaaagcttgtcacaccttacacagaaggtagccttgcatgaacaaagtgggtatgactttgacatcactaaggctgacaagattttcgacttgctactccgagagaagcagattgcaactgtgcctgccagtgcaatacaattgccatcgcgctggaagaattggggcaagaaaatggtgagtgcaaatggcataatgtctgggtctcatacgactaatgattgcaagggcttcaggcagcagatccaagcggctattgaagggggcaaaatcaagtttgacgactctaagaggccgatgaaggttgatggcaatccttttcctgttaatatggtgcacacagctggccgaacagccgatgggggccgtgcaaggggaagtatgacaagtagcaggagaagcatcatgaagaagatgacgatggctttgatcctcattggggttgtgagttctttagattctgttggaatggcggcaaaaaggttagctaaaggaaaaggcgtcgtaactgctttggtcaacatggttttcacgttgcctaccgagtttgggatgaagcaagccgatgccgatgaagttgaagaagaatcggctaaattgattttgtcaccagagcaggcggtttttgagaagccagaggggacagagaatcggcatcttaagccattgtatataaatggttatgtcaatgggaagccaatgtccaagatgatggtcgatggtggggctgtggtaaacttgatgccttacgctacatttagaaagttgggtagaaacgctgaagatctcatcaagacaaacatggtgcttaaagactttggcggtaatccatcagaaaccaaaggaggtttgaatgtggagctgacagtcggcaacaaaaccatccctacaacattctttgtcatcgacgggaagggttcttatagcttgttgcttggaagggattggattcatgctaattgttgcattccttcagccatgcatcaatgcttgattaagtggcaaggcgacaagattgaaattgtgccaaccgatagctattattttgagggcgtcgtggagggttcagatgtctacaacaaggacacagtagatgatttcgatgacaaacaaggacagggttttatgtcggctgatgatttggaagaaattgatataggtccaggtgatcgaccaaggccgacatttattagtaagaatttatctgcagaatttagaaccaagttaatagagcagttgaaagaattcagagattgctttgcttgggagtattatgagatgcctggactcagccgatcgattgttgaacatcggctacctattaaaccaggggttaggccacaccagcaacctccgagaagatgtaaagccgatatgcttgaacctgtcaaggctgagattaaacgattatatgatgctggttttattcgtccttgccgatatgctgaatgggtttctagtatagttcctattatcaagaaaaacggcaagtttttgggatttcttgttcatgagaggggaatcgaggtgactcaaaggagtgttaatgcgatcaagaagattcagcctccggagaacaagacagaactacaggagatgatcggcaagataaattttgttagaaggtttatttctaatctgtctggaaggttgaggcattatctactatccaacgagtgtactatcatatgcaaggccgatgttgtcaaatacatgttatcagctccaattttgaaaggaagggttggaaagtggatattctctttaactgagtttgatcttctgtatgagtcgccgaaggcaattaagggacaagctatagccgattttattgtgggacatcgtgatgattcattcggctcggtcgagattgtgccatggactttattctttgatgggtcggtatgtactcatggttgtggcatcggcttggttataatttcccctcgaggggtatgttttgagtttgcttatactattaaaccttatgcgactaacaatcaagctgagtatgaggcagtgcttaaagggttgcaattactcaaggaagttgaagccgatgctattgaaatcttggtggattctttgctagtaattagtcaattgtcaggagaatatgaatgcaagaatgatacattaatggtttataatgagaagtgccaagaattgatgaaggagtttcggctggttactttaaagcatgctaaagttgcaatcggcaaagttcatgagggaatttgtggtactcatcaatcggctcataaaatgaagtggttacttcagcgtgcaggatatttttggccgacaatgctggaagattgttttagatattacaaagggtgtcaagactgtcaaaagtttggggcaattcagcgagcaccggcgtcggctatgaatcctatcattaagccatggccatttagaggttggggaattgatatgatcggtatgataaatccaccatcgagtaaaggacatgagtttatattggtggcgactgattacttcaccaagtgggtagaggcgattcctttgaagaaggttgattctggggatgcaattcaatttgttcaagagcatataatctaccggtttggtattcttcaaactattacaactgatcaaggctcaattttcgtgtccgatgagtttgttcagtttgccgatagcacgggtatcaaattgttgaattcttcaccatattatatacaagctaatgggcaagccggggcatctaacaagagcttgatcaaattgattaagagaaaaatttctgattatcctcggcaatggcatattcggttggccgaagcattgtggtcttatcggatggcgtgtcatggatcgatccaagttcctccttataaacttgtttatggacatgaggttgttttgccatgggaagttaggatcgtctctagaagaatggaattacaaaatgatttaacagccgatgaatattacaaccttatggccgatgagagggaagatctggttcagtcacgattgcgagcccttgcaaaacttactaaagataaggagcgtgttgctcggcattacaataagaaagtagtccccaacgatttttcggagggagaacttgtatggaaattgattttgccgattggaactcaggatagcaaattcggcaagtggtcgccgaattgggaaggaccgtttcaaatttataaagttgtgtctaaaggagcttacatgttgcaaggacttgatagacaagtttatggtagagcactgaatggtaaatatttgaagaaatattacccaagtgtttgggttaatgcatga

SEQ ID NO: 6899 - DNA, 1872 bp, Oryza sativa
  unsure (1)..(1872): unsure at all n locations
  Clone ID: PAT_MRT4530_13545C.1
cagcaacaagcgattcagcagacacccacanttcagctggttgtccaccaatccagcaacaggtcgtgcaagcaagcagcttttcaagcggattcagcaacaccaccaagcagcaagcttctgcagcggatccacaagactccgttaagacagcaaatcgtcaagccgattaagcaccaggggtcaataagtgcatcggccgggtttgcaacgcctggtggtcagcctgtacaacaatttgtaaaccaagttgtcccagaacatttgtttcaccacgtacagcgggacggcacagtaatgcctcaggttgttcctgagcacttgttcgagcccatgcagcaacagccacaaggagcagctcagcaacgaccgtgggctgatgtgattgctgatgtgatgagggaacagtttgggcttaaaccaaaagagactggaagcttgtatcggcagccttaccctgagtggtttgagacagttcctcttcccaatcagttcaaagttccggacttctccaaattttcaagacaagatgatgtgtcgacttatgagcacattagccgattcctggctcagtgtgcgcatgatgaacctgtgcacgagtatattcagagattcagggagatgaggaacaaatgcttcagcttgagtttaactgatgcccagttagccgatctggcctttcagggtatgattgctctgattagggagaagttctcatctgaagactttgatagcttgtcacatctgatacagaaagatgataatgaggatgattctgaaatagctgcggccgaatgggtaaggagtaaaaaggtcataccatgccaatgggtgaaaagttctggaaaagaagagaaatacgattttgatattactaaagctgacaagatctttgatctgctactccgagagaagcaaattcaacttcctgctggaaatacaatcccatcggccgaggagttaggcaaaaagaggtattgcaaatggcataattttgggtctcattctactaacgattgcaaggtttttagacatcagatccaggtggccattgaggggggcaagattaagtttgatgattccaaaaaaccgatgaaggtcgatggtaatccttttcctgttaatatggtgcatacagctggccagacagccgataggacccgcgcaaggggttttcaagtgaattcggctaagattatcaacaaatatcagaggaaatatgacaagcagcaagagaagcattatgaagaatacgatgatggttttgatcctcattggggttgtgaattttttagattctgctggaatgaaggcatgaggttgccatctattgaaaactgccctgggtgcagtgatattgtcgagagctcaagccgatcatataataggggtaatcggctaaggcagacaagggtttttgttcatcaaagattaggtcctgtgaatcaagaacatggccaagaagacggtgtggttaggaagaatcaatggtgtccttctggtattttcacgaagaatcagaagagaagggttcaaagattgaggaacagagaacgccttcaggaggttgaacaagaaattaatcatcggctgaggaaagcaaaaccgaggcaggagtggcgtgttaagaatcaggttcctctagccgatgatgttgcagccgatgaggcaaaaaggttggcaaaagggaagagtgttgtgacggcacccattaacatggtctttaccttgccagccgaattcgggatcgatcaagtcgatgtcgacgaggtggaagaggaatcggctaagttggttctttcaccggaaccagcaattgttcgagaaaccctgaggggacagataattcgcatctttaaccattggttataa

SEQ ID NO: 6900 - DNA, 362 bp, Oryza sativa
  unsure (1)..(362): unsure at all n locations
  Clone ID: PAT_MRT4530_13546C.1
gattatgataatctggcttacagattataataatctatcatgctaatctatctgtttgtttcagcttactactaataatctagnttataataancctaagctgaatcaaatagggcctaagatttgtgatgatgcgtatttttatagcatttgcttttgctaatattgatgctcttgtggataaactgaaatgtctgtacaatgaggaatattgggttatgctagctaggctttgtttaaataccacactgtaaaaaagattcgataaaatatcactctcaaccagcgtttttatgttgaaatactatttcggacattccctttgggctcctcttcttccttcaaaaaaaaaaaaaaaaaaa

SEQ ID NO: 6901 - DNA, 2193 bp, Oryza sativa
  Clone ID: PAT_MRT4530_13547C.1
atgacgggtgggccccacccgtcaggtatgattgctccaatcagggagaaattctcatctgaggactttgaaagcttgtcccatcttacacagaaggtaaccttgcatgagcaaaggtttgcagaggctaagacgaattctaggaaggttaatcatgtttgtccttatatgtatggatcggatgatgaggatgatgattctgagatagctgcagccgagtgggtatggagcaaaaaggttataccatgccaatgggtaaagaacttaggaaaagaggagaggtatgactttgatatcactaaggctgacaagatttttgagttgctactccgagagaagcagattcaacttcatgccggtcacacaattccatcggctgaagaattgggcaagaaaagggttgcgagttctttagattttgttggaatgaagtttgggatcaagcaagccgatattgacgaggttgaagaagaatcggctaagctaattttgtcaccagaacaggcagttttccagaagccagagggaacagagaatcggcatcttaagccattgtatataaatggttatgtcaatgggaagccgatgtccaagatgatggtcgatggtggggctacagtaaccttgatgccttacactacattcaggaagttgggcagaaacgctgaagatctcatcaagacaaacatggtgctcaaagattttggcggcaatccattagaaaccaaaggagttttgaatgtggagctgacagtcggcaacaaaaccatccctacaacgttctttgtcatcaatgggaagggttcttatagcttgttgcttggaagggattggattcatgataattgttgcattccttcaaccatgcatcaatgcttgattcagtggcagggcgacaagattgaaattgtgccagccgacagccaattgaagatggagaacccaagctattattttgagggcgtcgtggagggttcagatgtctacaacaaggacacagtggatgatctcgatgacaaacaaggacagggttttatgtcagctgatgatttggaagaaattgatataggtccaggtgatcgaccaaggctgacatttattagtaagaatttatctgcagaatttagaatcaagttgatagcgctgttgaaagaattcagagattgcttcgcttgggagtattgtgagatgcctggactcagccgatcgattgttgaacatcggctacctatcaaaccaggggttaggccacatcaacaacctccgaggagatgcaaagccgacatgcttgaacctgtcaaggctgaaattaaacgattatatgatgctgttcctgttattaagaagaacggcaaggtcagggtgtgcattgatttccgagacctgaataaagctaccccgaaggacgaatatccaatgccgataaaggaccacatagccgatttgaggaacgttttcgagagaaccagaaaatatggcttaaagatgaacccgacaaaatgtgcttttggtgtattggctggccagtttttaggatttcttgttcatgagagggggatcgaggtgattcaaaggagtgttaatgcgatcaagaagattcagcctacagagaacaagacagaactacaagagatgatcggcaagataaattttgttagaatgtttatttttaatttgtctagaaggttgaggcgttatctattatccaatgagtgcactgttatatgcaaagccgatgtcgttaaatacatgttatcggctccgattttgaaaggaagggttggaaagtggatattttccttaactgagtttgatcttcggtatgagtcgccgaaggcaattaaaggacaagctatagccgattttattgtggaacatcgtgatgattcaatcggctcggtcaaggttgtgccatggattttattctttgatgtatcggtgtatactcatggttgtgttatcggcttagttataatttcccctaggggggcatgttttgagtttgcttatactattaaaccttatgcaactaatcatcaaactgagtatgaggcagtgctcaaagggttgcagttactcaaggaggttgaagccgatgctattgaaatcatgggatattcctttaaagtttatattggtggcgaccgattatttcaccaagtgggtagaggcgattcctttaaagaaggttga

SEQ ID NO: 6902 - DNA, 522 bp, Oryza sativa
  Clone ID: PAT_MRT4530_13548C.1
atggagaacccaagctattactttgagggcgtcgtggagggttcaagcgtctatcccaaggatacggctaatgggcaagccgaggcgtctaataaaagtttgatcaagttgattaagcggaaaatttctgattatcctcggcaatggcatactcggttggccgaagcgttatggtcttataggatggcttgtcatggatcgatccaagtccctccttacaaacttgtttatgggcatgaggctgttttgccgtgggaggttagaatcggctctcgacgaacggagttgcaaaacgatttaacagccgatgagtattacaaccttatggccgatgagagggaggatctggttcaatcacggttgcgagcccttgcaaaggttaccaaggataaggaacgtgttgctcgccattataataagaaagtggtacctaaagatttttcagaagaagaacttgtatggaaattgattttgccgattggtactcgtgatagtaaattcggcaagtggtcgccaaattga

SEQ ID NO: 6903 - DNA, 313 bp, Oryza sativa
  Clone ID: PAT_MRT4530_13549C.1
aaccaggcaaaccacacaaatacccgattggttaatttcactgaaaaaagcccgggtccctcacatcacaaaaattcatcccttgaaccacccaaagtcccccaagccaccagctgtttaattaatcgaaaacccccgggtttaattcagcaataattagcacacacccaaaccacccttttttggggggtttttattggggaccaaataaggggggggacccccccgcgggaaaggttcggttgtttttaaacttaaattgcccaactttcaatcggagcaagaacaactggggcccaacttgcaacccccg

SEQ ID NO: 6904 - DNA, 703 bp, Oryza sativa
  Clone ID: PAT_MRT4530_1354C.1
ttagacagtgacgacagcggaggggtccgcctcaggaccaccagatccggcgacgatggacctcgggaccgttagatcttcctcgccggagacggcgcggagaagcaggggatggcggcagcgggcgcgggacgacttcgggagcgccgccagcgacgacgccagcgtgaagagcggcagctgcgagatgagccgctccatctccgccgcgtgctccgccgacgcgggacgcaccacgacgggaagcaccggcgcagcagaggaagacgccgacgacgcggcggagaaggccgacgagccccgggcggcggcgtggcggcacatgtggcggatgaactcacagtggatggcgacggacgccaccatcttgctcatctttgctgttgtcagggacagggaggaactgagaagttcagaaatgacaaaaggaaatgataagcacaatttggcagatgcagcagctgcagcatgcctgaacctgcgaataaggttttacagtgttcatagatcagtggcaaatggcaaatggctcaggcctggggtgcccaattatgagcagcagcgtcgggagagagcgccggcggctccggcaaggaggggtggcggcgacggttccagcaagtacgggtggcggcggcatcttgagatgtggtatgctctgttcatgtataccctggacaagtcaattgaggatgagatatga

SEQ ID NO: 6905 - DNA, 267 bp, Oryza sativa
  unsure (1)..(267): unsure at all n locations
  Clone ID: PAT_MRT4530_13550C.1
cggaattcccgggtcgacccacgcgtccgcgacctactcctttccctccgccggcggctccggcaggtgctgttgatcgctttgtgaaatggagctcccagttgctgatcctgggccggtgagggctgaaggattgcttctgcagtgtccctattgtgattcagaggcaatgcacaaactcgcgcagttcttgctccccggcttggcgttttgtccatgtgctgcacgacaggcgatctcttcangaagccatcagttgtcgccgtt

SEQ ID NO: 6906 - DNA, 649 bp, Oryza sativa
  unsure (1)..(649): unsure at all n locations
  Clone ID: PAT_MRT4530_13551C.1
nttaaggctgtcnattctggagctccattctgcggcggccgctctagaatagtttatcccccgggcggtaggaatacagcacgaggctccactgtgctcgcctttcccctctccaccatgccaccttgaccttgctccccgacgacctctaccacgccactgcttgtcctactgaggaagcggtggcggcgccacgcctccaccaacacccggcgcccgtgggtgcacgccgcgccgtcacggacgcgggacgccgttcctcgcatcgcctcagcgcctcgcggggagccagcgacggtggccaactctctccgctctctggccgggcggccggcggcagtccggctctccgcgactccgcctgtccgccactcggacgaggcggcaactccgcctctcctcgcgtgtcgttgtgcctcgccggtcgcagccgtctccgctcccactctgcctctcctcgcccgcataaatctctgctccaactcccgctatccgtcgcgccgctaccgcctagccagccaccggccgccgataccgggagccagggaggtcgtggcgtgtagcacagaaggcagtagcagtgcgccggtgccaccttcggccttcgcccttcgattccggctttcccctgcagttttactgcataaat

SEQ ID NO: 6907 - DNA, 501 bp, Oryza sativa
  Clone ID: PAT_MRT4530_13552C.1
atggtgtcagaccactcccctaccgggatcacggacggcaaggtaggcagcgactgtgaaggactgaagcaggcgaggatggggaagatgtctgaaggggaagatgaggaggggcggctttctctgccgtcatcatcgcgccattgcctactattgtccccactcgagctcgtgtggcgggactcgagggcgggcggctgcgagggcttgccacacgagttcatgctctccccgatcgccgccctctcccttgccgcgaggtatgccgccatcgagaggtctgtacgaccgcttccccctaccgcaccctcctcgcactactacgcagccggcgacgaccccatcctgctcgacgtcgatggcaatggcaacgccgccttcatggcggtcctcggccccacccacccaagcatactctccccggtgccctccgcgctgccccccatggcatcgtcaccgtcgaggctcttctccccgctcgaccaggcctccgtctcctag

SEQ ID NO: 6908 - DNA, 648 bp, Oryza sativa
  Clone ID: PAT_MRT4530_13553C.1
atgggcaactgccaggcggcggaggtggcgacggtggtcatccagcacccgggcggcggccgcacggagcgcgcgtactgggcgatgtccgcgggcgccgtcatggcggccaacccgggacactacgtcgccgccgtgatcacctcgcctcccgccgccggcgcctcctcggccacccccgccgccgcgcccgtcaagcacctcaagctgctccgccccgacgacacgctcctgctcggccgcgtctaccgcctcgtcagcttcgaagaggtgctgagagagttcgcgtcgaagcggcatgtcaagctaagccgtgccacgatcaaggccaaggatgacgtggaggaggagacgaagcccgccaagcctcgccgccggcgaggcagcggcggcatcgcgccagaggaggagtactccagccggtcactcgcaaaggtcatgcgccagagtgacgagccggagcccgtggcgagggcgagcccgtccgccgcgccgaagccggagagcgacattgatgaccacgccgacggcgaggcggccgagccggactgcgacctggaggcgctgctgccgccgcacggggtggtgttcggccggcgagtcgcccggcaatggagaccggcgctgcagagcattgcggaagggtga

SEQ ID NO: 6909 - DNA, 514 bp, Oryza sativa
  Clone ID: PAT_MRT4530_13554C.1
tatagccggcgcgactctcacgcgttcgtggacgcgcggggtaccgctgcttcgtaggagggctcgcctgggccaccgacgaccggtacctcgaagccgtcttctccaccttcggtgagatcctagagtgcaagatcatcaacgatcagtgagacggggaggtcgcgcgagctcgggttcgtgacgctatcgagcgagcaggccatgcgcgacgccatcgaggggatgggctgcgctactggccgcgtgagcgcctcatcgatctcggcgtctgtcgacaatatcgtcagcgctcaaccccgcggagctactcccattcctgcaggcgagcaagaggcttccttgcagagacctaatcacctccgaggagccatcccgaagatcggctcgtccagttgatgtagctaaagcgcccactgctgcgcctgctgctacgcctgcgccacgaactaagcctagacctgcgccgttgtccagtgctgcacatgtggcctaggctgcggtggctgcccct

SEQ ID NO: 6910 - DNA, 2749 bp, Oryza sativa
  Clone ID: PAT_MRT4530_13555C.1
tcgttcctcttcttcctccgccttcgccgccgccgccgccgccgccgattactcgcttccgcctccgcctcaaccccgttcgtccccaaccaaccaaccgcagtccaatccaagcgaatactaagctcacttgaattcggttggtgcctcgtcgtcattctgccaccacttgagagttccttcatacacacaccactcgcagtctcagcagcagcagcagcagcgcagtcatccctgctgaaaatggccagcaagcatggacatatctagaagatatgcaaaacagcattgatcttgttttgacagaggttgttatgcctggtgtatctggaatttctctattgagtaggatcatgaaccacaatatttgcaagaatattccagtgattatgatgtcttcaaatgatgctatgggtacagtttttaagtgtttgtcaaagggcgctgttgacttcttagtcaagcccatacgtaagaatgaacttaagaacctatggcagcatgtgtggagacggtgccacagctccagtggcagtggaagtgaaagtggcattcagacacaaaagtgtgccaaatcaaaaagtggggatgaatccaataataacaatggcagcaatgacgatgatgacgacgatggtgtaatcatgggacttaatgcaagagatggcagtgataacggcagtggcactcaagcgcagagctcatggacaaagcgcgctgttgagattgacagtccacaggctatgtctccagatcaattagctgatccacctgatagcacttgtgcacaagtgatccacctgaagtcagatatatgcagcaatagatggttaccatgtacaagcaacaaaaattccaagaaacaaaaagaaactaatgatgacttcaaggggaaggacttggaaataggttctcctagaaatttaaacacagcttatcaatcctctccgaatgagagatccatcaaaccaacagatagacggaatgaatatccactgcaaaacaattcaaaggaggcagcgatggaaaatctggaggagtcaagtgttcgagctgctgacttaattggttcgatggccaaaaacatggatgcacaacaggcagcaagagccgcaaatgcccctaattgctcctccaaagtgccagaagggaaagataagaaccgtgataatattatgccatcacttgaattaagtttgaaaaggtaccatacacctgtggcttccaatcaaggtgggacaggattcatgggaagctgttcgctgcatgataatagctcagaggctatgaaaacggattctgcttacaacatgaagtcaaactcagatgctgcaccaataaaacaaggttctaatggtagtagcaataacaatgacatgggttccactacaaagaacgttgtgacaaagcctagtacaaataaggagagagtaatgtcaccctcagctgttaaggctaatggacacacatcagcatttcatcctgcacagcactggacgtctccagctaatacaacaggaaaagaaaagactgatgaagtggctaacaatgcagcaaagagggctcagcctggtgaagtacagagcaacctcgtacaacaccctcgcccaatacttcattatgttcatttcgatgtgtcacgtgagaatggtggatccggggcccctcaatgtggttcatccaatgtatttgatcctcctgtcgaaggtcatgctgccaactatggtgtcaatggaagcaactcaggcagtaacaatggaagcaatgggcagaatgggagtacgactgctgtaaatgctgaacggccaaatatggagatcgctaatggcaccatcaacaaaagtggacctggaggtggcaatggaagtggaagcggcagtggcaatgacatgtatctgaaacgcttcactcaacgagagcatagagtggctgcagtgatcaagtttagacagaaaaggaaagagcgcaacttcggaaaaaaggtgcggtaccagagcagaaagaggctggccgagcagcggccaagggtccgcggacagttcgtgcggcaagctgtgcaagaccaacaacagcagggtggtgggcgcgaagcggcagcggacagatgacccccctccccacctacccgatgcctgcggcctcctatccgcttttttccacccggttcccaccaggggtcctttctcctccctcggccgatcgatcaacaacatcccatgcatccggcatcccaccaccattgattccatcatatttagagtctggaataaataaggaactcctatcctatttatcccctatctatatatgaagatatgataatggtgatctgcgttactactagtagaagaatatggtgtggctgactccacttcaggtggacctataatactactccagtagtatgtgcctgtggagtcaagctcgaacgtactactccatatttaagcatgtcatgtactgctactatgagacgagagtgctctgccctgtagggacagcactattgtcaatgtcatgtgtttgttgggtcactggtcttcttagatttgcgtccatgtctggcagcagcactccactgtagttggctcacgcatgttgttgaaatgagccacatgccttgccttgagatagaacttgctgtcactgtttctccttaatctaaatatactggagtggagtattttattatctaaaaaaaataatccggtgattgaccaggctcgtccaaaaaaaaaaaaaaaaaaaa

SEQ ID NO: 6911 - DNA, 761 bp, Oryza sativa
  Clone ID: PAT_MRT4530_13556C.1
agtgatcaagttttacccacgcgtccgcccacgcgtccggccattttcaggtgcggtaccagagcagaaagaggctggccgagcagcggccaagggtccgcggacagttcgtgcggcaagctgtgcaagaccaacaacagcagggtggtgggcgcgaagcggcagcggacagatgacctacctacctacctacgcgatggctttggactccaaacagctaattaacagttagtagacaacagataatgattcttcttccttggccgatcgatcaacaacatcccatgcatccggcatcccaccaccattgattccatcatatttagagtctggaataaataaggaactcctatcctatttatcccctatctatatatgaagatatgataatggtgatctgcgttactactagtagaagaatatggtgtggctgactccacttcaggtggacctataatactactccagtagtatgtgcctgtggagtcaagctcgaacgtactactccatatttaagcatgtcatgtactgctactatgagacgagagtgctctgccctgtagggacagcactattgtcaatgtcatgtgtttgtcgggtcactggtcttcttagatttgcgtccatgtctggcagcagcactccactgtagttggctcacgcatgttgttgaaatgagccacatgccttgccttgagatagaacttgctgtcactgtttctccttaatctaaatatactggagtggagtattttattatc

SEQ ID NO: 6912 - DNA, 706 bp, Oryza sativa
  Clone ID: PAT_MRT4530_13557C.1
cccacgcgttcgaaagaaactaatgatgacttcaaggggaaggacttggaaataggttctcctagaaatttaaacacagcttatcaatcctctccgaatgagagatccatcaaaccaacagatagacggaatgaatatccactgcaaaacaattcaaaggaggcagcgatggaaaatctggaggagtcaagtgttcgagctgctgacttaattggttcgatggccaaaaacatggatgcacaacaggcagcaagagccgcaaatgcccctaattgctcctccaaagtgccagaagggaaagataagaaccgtgataatattatgccatcacttgaattaagtttgaaaaggtcaagatcgactggggatgatgcaaatgcaatccaagaggaacaacggaatgttttgagacgatcagatctctcggcatttacgaggtaccatacacctgtggcttccaatcaaggtgggacaggattcatgggaagctgttcgctgcatgataatatctcagaggctatgaaaacggattctgcttacaacatgaagtcaaactcagatgctgcaccaataaaacaaggttctaatggtagtagcaataacaatgacatgggttccactacaaagaacgttgtgacaaagcctagtacagatcccgagagagtaatgtcaccctcagctgtaaggctaatgacacacatcagca

SEQ ID NO: 6913 - DNA, 642 bp, Oryza sativa
  Clone ID: PAT_MRT4530_13558C.1
atggctgcacaagttcacgcatgcatgagatggcgacgagacgagaatgtcggagcaccgctggacggtgcccgcacgccgtcgttgagtctgccgagtcatgtaagtgctgttcgtcggactggagagcaagtcgccgttcgttgtcatgtccggacgaagggcctcgtcatgctacctcgccggaatactccgcctcgacatcgtgaacgccgcccacggagccatgacgccgccctcgccggagtcgccatgccgaacgcctcgccgaccgtcttcggcggtgttgtcatcttcctcacgccgtggcgccgccggagcacgggccatcctcgcttggctggtggcgacttccacctcacagcgtcttcatcagcgcgcgtcatcatcctcctcacacgcgctgtcgttgagtccggccacaccatcctccacctcgtcgagatttgctgggttaacccagagaaggccatctccgtgccgcctagccagagcatgttgagaatcatcagaaccgccggaaacgtcgtcaagctgccgtcattgccgtcgtcgtggtgccgaggcgtcttcaagccgtgctgttctggcccgccgatcgtcatcggtacaggaagaaggaggctgtcggggcggtcttga

SEQ ID NO: 6914 - DNA, 1257 bp, Oryza sativa
  Clone ID: PAT_MRT4530_13559C.1
atgtggtctcctggttcccggggcctcaaaaagctcccgatgtgggcgccggcagcggtccacggcctcgtcggcttggccattggctttacggcagcccgcggcactgtgaatgacatggcgccggcaacgacagcaacggagaacacgtggaggaggaggcagcgccgtcaagcgcgatcaggtgaacatcggcagcgcctcagggaccgcgacgagcgtgaaagcgtcgccggtcagtggagtctcaatgacgagacatgctcggagtttggcggtggtgcggcgatgatggcacgacggcgtcaccggtggcttgacgagcgtcagggcgtcgtcgacaaagtggatgacatggcctcccggctaacagcggcgctccatagagacggcatgagcggagaccgacgtaacgacgatggcttgccggcgacctccagcgggatcgcatgggcagcgatctccatcgcctggcggtggcagttcggcgacgttcaagaccgccccgacagcctccttcttcctgtaccgatgacgatcggcgggccagaacagcacggcttgaagacgcctcggcaccacgacgacggcaatgacggcagcttgacgacgtttccggcggttctgatgattctcaacatgctctggctaggcggcacggagatggccttctctgggttaacccagcaaatctcgacgaggtggaggatggtgtggccggactcaacgacagcgcgtgtgaggaggatgatgacgcgcgctgatgaagacgctgtgaggtggaagtcgccaccagccaagcgaggatggcccgtgctccggcggcgccacggcgtgaggaagatgacaacaccgccgaagacggtcggcgaggcgttcggcatggcgactccggcgagggcggcgtcatggctccgtgggcggcgttcacgatgtcgaggcggagtattccggcgagccatggtccttctcctcgcgatggttgacggtggacaggtacgcgtccccctgccggacaccggcgtgatggacgccgatgctgacgtcgcgtgtactgctccggcgaagtgcgcagcgcggctgctgctccggcgaagtcacaccgacggctggacgtgtggtgaatggaagtggacgagctcgtggatgccggaaggatcaatggcgatgttgtggtgctcgatggtgtgtgatgaatgcgcagggagccctaacccacactgcgaatccctcggcgccaccgcggccgagcgttag

SEQ ID NO: 6915 - DNA, 291 bp, Oryza sativa
  Clone ID: PAT_MRT4530_1355C.1
ctttcttgttaaccatacattggtgggtctggatgtatcattcaatacatgttgcttcccaaggttgagcgaatcaattaccatgatattgttctcaagaaagtgaccagcaattagagggttcagttaaatcgtgtggcatcctgcagctatgtaagcaacgtgcatgtcattgttaaactgttgtaccttagaggttgctagtatttgaaacatggagaattcgaattgatgtatttatcttcagcacttcacagaagctgtcaatgctatcagttccagttattctgc

SEQ ID NO: 6916 - DNA, 490 bp, Oryza sativa
  Clone ID: PAT_MRT4530_13560C.1
tatgatacaacaattgattgacacgtagggatagccttgagaaaagtagttaatcaatggtcaccaactctagtacttaattaacccgttatgtctaaacacacgcaatcttatcaacatattacaataatcataactatgtgagatcatgtcgtgcgacagtgtagctaatcccatcacttcatgcaaacatgtctcatcaagtacctgaaaagactataagggggtgagaataaatctcagcaagcaaacggctttaacaagctatttaaaccacatgtttattgtatagctaaataaataccaagttgtgattcacataagtcaaattcaatatccgtggactaaaacatcatgatgtcaccaatcaaatccatatactcacaaatcccagaagaaaacacttctcaaagacatcttcgatcgataattttcataacatcctgcaatatgtgcatatgcaatgcaataatatatcccggacgcgtgg

SEQ ID NO: 6917 - DNA, 370 bp, Oryza sativa
  unsure (1)..(370): unsure at all n locations
  Clone ID: PAT_MRT4530_13561C.1
tcgcttttaccctgcctgtatccgcaccgacctngnacccaccagagaccggccgccgcttatcagtgcctctgtatctctctgtgtgcccgctacggcgagagggggtgccacacacacgtacgcacgggaggatcagggcaacaagtgaccgcgcgcgtgcgtgctgttcccccgaccgatgacaacgatgcgcgcctccgacgcgctgctgttggtggccgcggctgtcctcgccgtcgtgcgcgccgaggaccagtaccacttcttagattggaaggagacgtacgggacccggacaattattgacgaggccaaaaaggtgatgcttatcaactaaatgttcccacggaccaccattaactgcagg

SEQ ID NO: 6918 - DNA, 290 bp, Oryza sativa
  unsure (1)..(290): unsure at all n locations
  Clone ID: PAT_MRT4530_13562C.1
cctatntcggccgtcggttttccgccgcacgaatctcgaggagggagggagggagggcaacggcaacccagcccccgccgcccgcaatggccgcagtggcaccgatcgcnatgcccgcncggntgcaccaccaccaccaccaccaccgccgcgcgttggcggcgtactccggcggcgttanggcggcggggaacggnttgtcggcgacgaggagggtgaggaggtcgccggccgtggagatgaggcgggagcgggacgnctggcggtgcgcggnagaagcagccgcggtt

SEQ ID NO: 6919 - DNA, 366 bp, Oryza sativa
  Clone ID: PAT_MRT4530_13563C.1
atgccggcatgtgggagcgacgggcaagcgcagctgtatccaatggccaatggtgtacagggtgctgggggagggcgtcgccagcggtcccgcgtcacggagatgcggcaccgctgctccaagggattgggccggccggtgccgcgcaaccatccagcgggaccgagccggtgccgcgcttcggctctaaggaaccgagccggtaccgcgtggccctctcctgttccgcgggagcgcgccggttccgtttgtctaagccgcgggaccgacgctgtctaccccaccctgcgcgaccgctcgagcctccggtcccgcacatccaacctgcgcttgcccgtcgctcccgcatccggcgtcgcgtgttag

SEQ ID NO: 6920 - DNA, 102 bp, Oryza sativa
  unsure (1)..(102): unsure at all n locations
  Clone ID: PAT_MRT4530_13564C.1
atggaaagcgggaaactcaatcgnaaaaccgtcttgccacttgattatgaatcgccacccgccgggagagccggttgcgtattgggcctcttccgcttctcg

SEQ ID NO: 6921 - DNA, 465 bp, Oryza sativa
  Clone ID: PAT_MRT4530_13565C.1
tcggttttaggtcaaagatataggccatatcagctgcaggcgattgtactgatacagcaacatgtgctaaatccatataatgagttctgtattggcaacattatgaacatagtatactagcccatacttgcaacaagataccgtcaaactgagaaacaaccaagtctgcacacaactcgcgctggtggagcaccaatctaactatcacgacattaacattgataacgccatatcgcaccagatacaactccagcagtatggcgatctatagtttgatcggaatctggctcactctcaacctatgatggcttataacgtgccatctagatatgggatctaccctaggtactatggggcacacaggaccattaccacccttggccgcgtctggtaatgagaaggaacaggatagtgtgtcatacggttaacatacgctcacatattatgatatgtgacctgggagac

SEQ ID NO: 6922 - DNA, 391 bp, Oryza sativa
  Clone ID: PAT_MRT4530_13566C.1
ctgcaggaattcggcacgaggccactctcaccggccaccgcgcgctctctctctctctctcccccttctcccgcaagattgccttcccccaaatcccacccgatccaccgccgccgcccgctcgccggagtcccatcgctgccaccgccgccggcaccgcggcccgcacgcccgccgggcctgcttgctgtgtgtgtgcaggcaggtggcagttgctcgcgctcgttcccgcggccccctccgcctgctgctgcttctgcttccgctggcattgcggggcaggtcgtgtgccgggggacgtgggggctcgtgttggcacgcggctgccggtgaggtgggggtgcggctgcggcgcggctcgcgctcgtgcgccggtggcgcgggcgcgggg

SEQ ID NO: 6923 - DNA, 902 bp, Oryza sativa
  Clone ID: PAT_MRT4530_13567C.1
gcacagaccacgtcgcgcacggaaaaaaatttcgccaaaaaaaaaactgcttccatttcgcaaaaaaaactgcctccccttctccttcgcacgcgtcctccgcaacgctaatcacgcgcctggtccgtcggcgccgccgccgcacgcccgcccgccggagccgctcaccctaccccgtcgccgcctcggatccgcctgtggccgccgtctcccgccggagccgcctcctacgccacccatcgccgcctcctatgcgcccgccgcttcccgccgccgcctcctacgccaccacccctccgccgtcgtcgcatctgtcctcagccagatcggcgccaccgtggtcgccgtcacaaacattcctccctgtccaccgcctccgcctccgccgccgacgccccacccaggtatcttattcctctctcaagcatcgccaaccccctccctaaaccctaatctattcctctcctcccctcatgcgccgccgcggatgcccttgccgtaacctcctccatcggctgcgctgttgctcaacctacgccaccgccggatcgatgggatccattggccgctccacctgcgccatcgccgggaaccaccgatcgacctcctccatcggctgcgcagctgccggatcgacgggagccgccagccgctcgacctgcgctgtcatagggagccgtcggttgcgccgccgctccacctgcgccaccgccagatcgacgggagccacccgctttcccccccccgtgcccctcgcctccccccgcatctccgttccgctctctccccttcgaccacctccaccaccatcgcacgccgcatcgcctctccaatctctccccggtggctgcgaatcaatcccagctggataacactcatccctcatgccatctacctctcca

SEQ ID NO: 6924 - DNA, 368 bp, Oryza sativa
  Clone ID: PAT_MRT4530_13568C.1
ggccaacaaggaaaaatttatgggaaaaaaaaacccaccgctaacccaggggggattacccgaccaaaaggactatgcaaaaatattataaactaggggggccggggaaacctcatacatggaaccgcaaaaaaaattattatcaaacaacttctttacaaaaaaaagggaaagggtggacccgggccaaaaaaagaaggcaacacccgggggaaaaaaaacgggggggacaaaaaaggggatcattctgtaaatgggcccagggaaccgggaggaaaaaaaaggccctcaataatttttttttctaaaaaaacaacgggaagggccacccaaaaacaaatataaactttctgctcccccaaccgaaa

SEQ ID NO: 6925 - DNA, 4533 bp, Oryza sativa
  Clone ID: PAT_MRT4530_13569C.1
atggcggaggcggaggcggggaggaaggagaagaaggaggtggtgcggctggagcgcgaatcggtgatccccatcatgaagcccaagctcatcatgaagctcgcctacctcatcgaacaacaatctgacagagaagaattcttgaagctctgcaagaggattgagtacaccattagggcctggtatcatctccagtttgatgatatgatggaactatttgctctttttgaccctgttcatggtgcccaaaaactgcaacagcagaatttctcgactgaggaagtcgatacactcgagcagaacttcctgacctatttctttcaggtgatgcaaaaaagcaatttcaacatattatcagatgatgaggttgagcttgctcattctggacaatatctgctgaatcttcccatcaaagttgatgaagcaaagttagataacaaacttttgtcaaagtattttaaagagcaccatcacgacaacctaccggagttctcagataagtgttatctatcagaatatttgtttatagaagatgagaaagatggttttgaagtgtatgtcatattccggaggggcattggactggatcgcactagcaactttttctttatggagaaagtggacatgatcatagctcgtgcgtggcgatggttcttggagaaaacaagactgcaaaagctcttctcaagaaagaaaagtgttaggccaaagacagattccaagaagaatgatgatctagttggtgaagaagaggacaaggagctatatgttgaacgcatacgacttgaaacaatgaatttgagcttgcgcaacttaattggcaaggttacaattcaagagcctacatttgaagaggtgattgtcttgtacaggaggaaaagccctaagggccagaatgatagatcaattcatgtaaagcacttcaaaaatattccaatggcagatatggagctggttttgcctgagaagaaaaatccaagcctcacaccaatggactgggttcagtttattgtttctgttgtcattggacttgttacacttgtcagttcgctcgaaatgcctaaagctgatttctgggttgtagttgccgtcctttctgccctggctggatattgtgccaagatctatttatcgtttcaacagaacatggcaacatatcaaaacctaataactcaatcaatgtatgacaaacagctagatagtgggaaaggcacacttctccatctctgtgatgatgtgattcagcaggaagtcaaggagattataatttcctactatattttgatggaaaatggaaaggcgactattgaggatcttgacttacaatgtgaagagttaatccaagaagagtttggcttgcaatgcaattttgaggtgatggatgctgttcagaagttagagaggcttggcatcattacaagagattctattggaagaatatgctgtctatctctgaagcgtgccaatgagatcattggcgctactacagaagagctggacctgctgtattatgcaatgtttaatgcatgttcaaagtataagtgcagcagcagctaccagctaagcaagaagcgagcagcagagctcagcgtttggagcgagatgatgagcagcagcagcagcttggtgtccgccatttctgcgtcaccgtctgccactgcaaaagctcgccttcgtcatgacgatgcagcaacagcaacaggagcagcagcagcagcagcagtagcagcgaggcagctaaagacggagcatggcggctgctgctgctgccggagcagaggccgggcggtggtggcgagggcggggcccgggccactgacggagatcgagcccgacctgaacgaggaccccattgataagtggcgcaccaacggcgtcagcccggacgacttcgagtatggagtgtatgatggtcaccacacatataatgaaacccaagataagaagggcttttgggaggatgtctctgagtggtaccaagaagctgaacctcctcagggcttccaagcactgatctcctggttgtttcctcctgcaatcatccttggcatggccttcaatgttccgggggagtacctctacatcggcgcagcagtgttcgtcgtcgtgttctgcgttatcgagatggacaaaccggacaagccacacaactttgagccggagatctacatgatggagagatcggctcgcgacaagctcatcgccgactacaacaccatggacatctgggacttcaacgagaagtacggcgagctctgggacttcaccgtcgacagaagagatgagattgtgaaatcgtcttagatatggtattcagaaatggggggtcacatttgttagatgcagctgcagaaacagttcagaaaatcagaaccactccaaagaaaagcagggtggcaaagctgcaagatgagtctcttcaaaataaagaactttgagatgaaatgatgtgtgtatggatcatctcatctactgtaaggcctgctttctatgtctctgacagtctcaactctgaagttctcagccaggtacaaaaggagactgaaaattctgtcatgtgtattttgttttccccccaatgtaatggagaaaatcctgtgaatgacatcactaattcaatagatatatatagtagtataatggaataactttggcatcagcctccaatattatcaatatgtaaaagaaaaggaaatatcattcttttcttgtacaggaaaaggaataaagggaacctcacagctgttccttttttgtacacttgagttacagctgaatcactatgaagaccaaagaaaagagagagagaaataataaatggaaagggaattgctagtctataactctgatgatgagaggaaactagctagttcttcttcaacctgatgttgtgaagagctgactacctagagtcacagttggtgtgctttctggcatgattgtggtcatcctcatctcttgctcgcgaattcggtttatctccgcctccaccaagttcatcgatgggcgatgctcgctcgtcgggttcacgcaccacgatgtcaaccgcagaaattctctcatgccttctgaggtataggcactggccattctgttatctgcaattgcagagatatcacttgattgttggaagttctgcacccatcgaatgatgttttgatcagacagagccctcttgccactgagcaactccacaaggaaaacaccaaaactgtatacatcactttgaatggaaaaatttatggattccctcattctgggatcaaggaaaggatcgtaagatgttctcgatgaagggcctacaccgcctaatcgatctagcagggcacggatgccggcatctgcaactttgggtatgagatcttcatccacaaggacgttggccgttttgaagttcatatggaccgtgggaggtgtcagagaatgcaggtgatttaggcctttagcagctccatgagcaatggaaagtctctgcttgaattctagctttacacctggagcatggctgctaccatgtaaatgcgtagaaacgctgccattgggaacatactcgtaaacaagcatctgcattccattctcctggcagtaccccaaaaggtttacaaggttacgatgacggatcgacgatagataattaacctcatgaataaattcatggctaggaggagaatgtcgctttttaatggctacaattgtgccatcctggagtaaacccttgtaaacctctccaaacattccatgtccaataagattcacattgctgaagttccttgtagctgaacttagctcctccagagtcatacatcttgctccctgcagctctggttgagctgtactggatgaactactttccgaagagtctgaagctcttctgcggtgccggaggaaaagtactataagaaatatggcggcgcctactaatgccaagaatcctgcagcacctgctagagatgctgcaagaattgctgacatctagtatgaaatccccttcttcagaatggactgtcaatgtttgtagtgatagtgatgaagtttgtaatggtagacatataacctgaagattggacgggtattttggcgtcatttccatccaagcacaacggcagcatcaaatgcagaatccatgatgcagacaaccaacttgttcttatcagttcttgaattcgccttcttaatctctctctctctctctcctcaatctcttcctctttcacaaccacttgctccaatcatatcaaaggaagcagaagcaacacctacttggttcaggagaactacaaagaaaggaatcaaaatcaaatctaatcaatcaagaaaagaaagaaccaggcaaattgaggcacaaacatttcttgacatgcagaagctatcaagaatccatgaacaaagaaggagaaagaaggaggcaagaaagcagcaagagacctcctctcctcctcctgttcttcaggtgggtctacctctgtactgtcaattgtccgagagtgaggaggagagagttggggagagagagggaggcaaagggggaaagcc

SEQ ID NO: 6926 - DNA, 2895 bp, Oryza sativa
  Clone ID: PAT_MRT4530_1356C.1
atggcgaaggccaaggtggccaccggcgaggaggagcacggcggagtgcaagtcaaatcatcgcatggcggcgaaggcggcaacaacaaggcggccgccgcgccggagaagcggctgaatcgcttcgtgcacgtcgttgcgatgacggaaagggtgggcaacgcgctcggcacgctggccttcacctgggccaccgtcgtcctcctcggcggctaccccaccgtgctccgccctgacgacgatttctggttcgccacggtcatcgtcttcctcgaagccgcacggatgtttagccgcgaaaacagactggattaccaactgtttttcagcactagaggagcttttaggcgtcttggctggaatggtctgctgactgtgatggtatacttttccaccgtgctggtgatcctgaaaaactattatttccttcgtggtggaagcgtattggtgcctttaattgtggttatggcaatgctagttgcaattggacaaatgctgtctccaagagctctaaaactactaagcaatccgctacgccatgccatatcactgtggagcccattactttcaatcatattgctgggtccatgtataccacaaccagtttatgatgttgaaaatcaggaagtaattttaaaacactcaaggaccagatggacattgtacatagtgctatttttgtttgtcctcctaccgacaatcagcaggctgcggttcccatgtatcgtaaaactagtagacagtgttgtgagcagaaaacagttagcttggcgtcaggttattctaaacttttgcatgtttgctgcaatagtgatgctagtattcactttcaatgggttctacggtcgacttataatggtggtgttccaagtctatgcttttctggttgtgtcattgggcaacttccagattccagtagctgttgtgcgcgttctgctggcactgcaacgccttgtaccgcagaactatattgcagatggtgttagtgccgagcaggatgccgtgcaaaacctaaagccatctctaaacatcttctactgtatggtgattgggcaaggaattctctacattgtggcctgcatgctggaggtcttttccttcatcccaaagagatccctcatcatccgtggaggattcagaggtcagctgggagtgaaatatgccaatttatactacgcatatgcctttgagaaatgcatgggagggtctgtacttgctccaaagaagatcaacctcatcacctttgccatggattctctgaactcagactcaaccaagaagaagctctatggggttcagatgctgcatagctttctgaaaaaggagcacttaaggactaaaatgatcccaaaactcaccagttccacgaagacggtggcctcgttgttcaatatgttgggctggacgagtgatggcgatgcagatgttagattgtttgccgcgaaggtcactgccgagctagctggtagcctccgagtcgttgctatccctggagcaatacagatagtagcatcactactggacaccgatcaccaactgaaaataagggaccattttttgttcattgatagccaagaggcaagagaagaagacttaccaattaagcatgttggcatggatgaacagaaatccacagtgcttaagtactggaaacagatggtcataaactgtctgactcctgtggatgaaccgtttaatatagatgaactgaacttacatatggccagatgttggaagcggatcaccaaattctggtcaattccagacgaggagccatccacggaccaagatttccttcctgtacagggattgctaatccttgagaggcttgctaactttgatactggaaactgcatggaaatcagcagagctacaggcctcatctcaaagatgatagattttacaagctacagaaattatattacaagtatcaacgaagaacatcaaatcatgctagcaggtttgtcactgagggtgctgagaacacttgcaagcactaaagggaagttcggtgtaactctgcgacaacagatcttggaacattccttcgtattgaacaatcttgcagagatcttgaatgatagtgtgggtggccgtgaactgagggagctggcagcagaaatcattaaaaaccttgccatggatagaaatgctagtgaggacattgggcattgcccagtgattatcagtggtttgatgcgtgcatttctcagccaagtttctagtcacttgctacgaaaaatcactggtcaagcacttgcaatgctggcaatggagagtgccaataactgtttgcttatgttaagggaaccagggtttgtgttcattgaggaacttacagctatgatccgttatgacaagtacaaatatacagcagtgagtctgctggggagtatgtgtgagcatgcttggtctgagctcagcaactcagacctgaaggaactgtcttacaccctgcaagaggtgctaaaaggaataatggatgcagaaggagcagaactagaggtccttattggctttagttcacatatatgtaaaatcattcctgatgactttgcccaagaattagagcatagtcagattaagaagaaatttgtaaagaggcttgttagtgcccttaatgcacatatgagacccagtgctgattgtcccggcatcaggagggtgattgttcaacacgccataaacttgatggagttcgattctcgctacgcaaatgatttccacaaatgcctatcaatggtagagaacacatcgacaaggttagaaaactacaggttgttctccggtgacgtaggactaatggagcatcgcacaacactttccactcttgtggccagagcaaaagagctgatgggccgtgagtgggtacaaggcatcagcactgccacctga

SEQ ID NO: 6927 - DNA, 124 bp, Oryza sativa
  Clone ID: PAT_MRT4530_13570C.1
atgtgggccactggtaaaataataaatgtttacatggggaggatgcatagccacattgttgaatgccatttagcaaattatggccacgttgttgaatgtttattagcaaattatgactttgacg

SEQ ID NO: 6928 - DNA, 225 bp, Oryza sativa
  Clone ID: PAT_MRT4530_13571C.1
gtattcgctatggaataagcctaaagagggcgttgttgctttagagaatatgcctatatcttttattattgtggtcactaatgtctttgccacaagtgtttggaagcggttcccgaagacgtaccaccaggctgtcaccggtgcctgaaattgagcgtcattatcaacttgaccgtgacaaaaatttaaaggtgatttattattaaactggagattttgtttggg

SEQ ID NO: 6929 - DNA, 734 bp, Oryza sativa
  Clone ID: PAT_MRT4530_13572C.1
acacaaaccgatcgaatttgcaagaggcgcattctcgtgggaacaaccacagcacttgtgctctcgtgcaatctaacaagggtgttcagagtcgcgcgggtggcagggctcgtcccgagtttttggtggtgtgttttcctttccttgtcagcactaaagagatccagaggattacgcacatgtcgagtgccagtaaaagaacatgttgagtaatctgcgtttgtttctgctaatgtttggaagtagacgaagaaattaaggagcaatccagaggatttcatgatggtaagttgggatttcagcaatccagctgatcaagtcctacaacatcagtagtcacatcacattgttgattcttcggccttgaaagcatcagtagtatctcatatgacttctacgagtcttgcacgaactgatttctgatctgctatttctttaatgctgtaaagaatatctccaccaggtatcaccttcttagatatccaatcaggagacaggtcctccaaaatatgcagctgttcttctatctcccctgtctcttctatctccaagttgttagcaagaatattgtgaaaaagttcctgttttgtaataagtgaattcttggtagaccgagaaatatcgcagactatgtcgaatgtgagttgtaaagaagctatcttttcctgggattctgctgggtcgacttctttggttttgtctacatcagcaaagcaaatggcaggattgttttc

SEQ ID NO: 6930 - DNA, 419 bp, Oryza sativa
  Clone ID: PAT_MRT4530_13573C.1
ccacgcgtccggggtcgttactacgtcctcttctcaatagtcgcgggtgccgccgccgacgccgtcgccgtcgcattcaactttatacaatccgtgtccccccaccaaaaacacttctggaggatggggatgggcatacacgtacactactaggcaggtactctccagagattgatctcttaagcttcggaacaaaggtacgcgggtacggaggacaatctttttacgcaaacggaaagcttcagcgggggcatactggttattcatgaaactgacaatggtgagatatttgatggatgggaaaatggtaataaagaagctgtcctgactcccttggaggggtacaatctcctgtaaactgatggtgttgcgagcgggtgtgctcgagtgcgggtgactggtggcgtggccgcgggggt

SEQ ID NO: 6931 - DNA, 1061 bp, Oryza sativa
  Clone ID: PAT_MRT4530_13574C.1
tttaggtgacactagtagaatactcaagcttgcatgcctgcaggtcgactctagaggatccccctacgatctgctggctacctatcgggaagagctattgagatcagtgctaggcaaagtatttgaactggacactaaagagtgcaatggtgatgtctgctttaggaggttctttgttgctcttaaaccctgtatcgatgggttttttggaaggatgtaggccttacattgctatggactccactcacttgactggaaggtccagaggccagttggcttcggctgttgcaattgatggtcataacaggctatttccagtggcatatggggtgattgagacagaatctaaggaaagctggacttggtttcatggccctctatttgcccaaaatatgtgggcggctgccaaaagcttcacaaatgagaagttcacataccacataggcaagatagaggagaagtgtcttgaagcactttcttggttggatgacaatcatccatacatttggagtagaagcaagttttctaacgagtgcaaggtagattacatcaataataatctttctgaatgtttcaatagttgggtctcaagaaccaaggatcgacggattgtggacatgtatgatgcaataagatagatgatcataaccaagtttgttgcaagaaacaactttgctggtaagatggagggaagaatcattccagctattacaaagtctttgaatgctcaaagcaagaatatcaaggaccatgaggtattgatatgtggagctgggacagctgaagtaactgtgggcaccattaggcatgccgtacatttggagcaacaaacatgttcttgtagggtttggcaagtgactagaatgcctcgcagtcatgctttagcattcattgcaaagcttagcacggatgtccatatggatgattttgtggatgattgcttctccgttgagaagttcaagaaggcatatgcaaggactttcaatccaatgacatcgaaggatagatgggcacatcctgtcagagggccccatcggccaggccggtcagaccgacatggg

SEQ ID NO: 6932 - DNA, 258 bp, Oryza sativa
  Clone ID: PAT_MRT4530_13575C.1
atgttgggctctagatatgcgagtgagatacccaccctcgggggcgagtggtatcgtatcaccgtcttcgtcctgaaaacacgaaacccccgcttttgccagcatgacagcaagcacagactggcatcaaggagcagaccgctcccccggaagctgtggtcagtcacctcctttcggggtctgtctgtcttacctaccctcgagtccgatctcggcatgtggtttaattcgatacaacgggggcagcccgtgcgctaa

SEQ ID NO: 6933 - DNA, 566 bp, Oryza sativa
  Clone ID: PAT_MRT4530_13576C.1
tacggtaaggcttgggatccttctagaagcgggcggcccttttttttttttttttttttttttttttttttttttttttttttttttttttttttttttttttttttaaaacggtttgggggtttaacccactttttttttagattttaaaaagaaaggttaaaatttggcccccacacggggccccctggggacccaaaaaaagaaccggggggcccaccgggaaaaccaaaggggggcccccaaacccgggaaagcggggtggaacttaaaaaaagggggaccccccggcccctttgggtttagggccaaaaaaaaaacagggtttttataccggataaagggggggcccccccaccccccggcttggagggggggggggccttgccggcgggggggttgtttttgtttttgccgggaaacccgaggggggagataaccggggctttttccccccccgccacgctttttaacggttcccccgcctgggggagaagggcgccggttttttcttttcgcggggaaagggggtttcttggtgtacgggggggcgcccgccgtttttt

SEQ ID NO: 6934 - DNA, 478 bp, Oryza sativa
  unsure (1)..(478): unsure at all n locations
  Clone ID: PAT_MRT4530_13577C.1
ccggcccgggancgcattttcgcgccaccacaaaaccctaggcggcgccggcgccgcccccgccaccgcaggggggccgcacggncnccggcaaccagacaaaacggagagagncagcgaccccaacgaagcncngaaaacaacggacaangcagagaagcgngggaagcggcaagagaagaaccgaccctcatcaagggagangagcaagnnncncancgngangcagaagcacggctacannggagaaaanngaggnngcgangaccaccgcaccggcaagacagnngnngagcagaacggacgccncaacaagngnggngncancagcccacgcnncganggnggngncaaggaaaacgaancacggaccgcgaggcngcnncccnccagacaganagggnacaaagncccaaccacnncagcnggcannanggaccacgaggaagcncgcagaaagaacggnggggggaagggc

SEQ ID NO: 6935 - DNA, 1013 bp, Oryza sativa
  Clone ID: PAT_MRT4530_13578C.1
cacgcgggtgggagctcgaagccgccccccgccgcggaggaggaggagaagaccatgacggtcggccgcgccgattgccgtcgagtggaagccgctgctgatcgaggtcccctcgcaggtgatcgacggcttcaactgcgtcggcggcggtggcgacgccacggccacggccacgctcagcgagcagagcaaggaactcgaaatgctgggcaaggagaaggacgttgtgattagcatcccggcgccggtgtacgctccacggtccgtgtcggtgtcggcggcgtacgaacaagagggcgcgtatataccgtactccgtgtcgctgagcatgccggtgtcgccgtcggggttccacttctcgcagttcgggatggcggcggcgaaggcgaaggccgtccaccgcgacgatgcccgcgtggcgtcggcggagaccaggttcgacgacgcgcacccgccggcggtggggagggtggagcgcactccccgcggctgctgatgaagcagacgtggttccactcgcagcccatcctgcacctgtccaagaacgacgagacgacgcggcggtgcgacagcacgcgcgacaagcgcggttcgaccagttcaagaccttctccggccgcctcgagcggcagttctccaccctgtgtggccggccggcgcaggagcagatgaccaacggcgagggcgcccccgagccgaacatcgccgaggaggagacggagcaggtccccggcgccgaccgctacttcgacaccctggaaggccccgagctggagacgatgagggcgacagagacgacggtgctgcccaaggacgagaagtggccgttcctgctgcggttccatacctgctcaaggtcgtgttctactttgaggcggtgcggcgggagttctaccacccgatccgcgccgacttcttcgcgccgtggatcgcctgcctcttcctcgtccagggcgtgccccgggcggtgacgaaggtgcaccacggcgtctggtatgcgctcatgacgccat

SEQ ID NO: 6936 - DNA, 2061 bp, Oryza sativa
  Clone ID: PAT_MRT4530_13579C.1
atggccaggatcgccatacgggaatgcccacccgtgcttcggccgaattggcgtgtgatctggtactgcggtttcgtgaacggtatggagttcggcaacgacgtccggatcagaatggacggtggtgtgtacggggagagcgagcaatcgtccggggaagccgctctcccgcggctgctgatcgaggtcccctcgcaggtcatcgacggcttcgactgcgtcggcggcggtggcgacgccacggccacggccacgctcagcgagcagagcaaggaactcgaaatgctgggcgaggagaaggacgtcgtgattagcatcccggcgccggtgtacgctccacgatccgtgtcggtgtcggcggcgtacgaacacgagggcgcgcagataccgtactccgtgtcgctgagcatgccggcgtcgccatcggggttccacttctcgcagttcgggatggcggcggcgaaggcgaaggccgtccaccgcgacgaggcccgcgtggcgccggcggagaccaggttcgacgacgcgcacccgccggcggtggggcgagtgcaggcgcactccccgcggctgctgctgaatcagacgcggttccactcgcagcccatcctgcacctgtccaagaacgacgagacgacgcggcggtgcgacagcacgcgcgacaagcggttcgaccagttcaagaccttctccggccgcctcgagcggcagctctccaccctgcgcggccggccggcgcaggagcacatgaccaacggcgagggcgcccccgagccgaacatcgccgaggaggagacggagcaggtccccggcgccgaccgctacttcgacgccctggagggccccgagctggagacgctgagggcgacggagacgacggtgctgcccaaggacgagaagtggccgttcctgctgcggttcccgatcagcgcgttcgggatgtgcctcggggtgagcagccaggcgatgctgtggaagacgctggcgtcggcgccgccgacgtcgttcctgcacgtcagcccggtggtgaaccacgtgctgtggtggatctcgctggcgctgatggggttcgtctccttcatctacctgctcaaggtcgttttctacttcgaggcggtgcggcgggagttctaccacccgatccgcgccaacttcttcttcgcgccgtggatcgcctgcctcttcctcgtccagggcgtgccgcggccggtgacggaggtgcaccacggcgtctggtacgcgctcatggcgcccatcttctgcctggagctcaagatctacgggcagtggatgtccggcggccagcggcggctgtccaaggtggcgaacccgtccaaccacctctccatcgtcggaaacttcgtcggcgcgctgctcggcgccaagatggggctccgcgagggccccatcttctacttcgccgtcggcctcgcccactacatggtcctcttcgtcacgctctaccagcgcctccccaccaatgtcaccctccccaaggagctccaccccgtcttcttcctcttcgtcgccgcccccagcgtcgcctccatggcctgggccaagatcctcggcgagttcgactacggcgcccgcatcgcctacttcatcgccctcttcctctacatgtcactggctgtgaggatcaacttcttcaggggattccgattctcgctggcgtggtgggcgtacacgttcccgatgaccggcgcggcgatcgcgacgatcacgtacgcgacggaggtgaccaacgtgctgacgagggcgctctccatcggcctctccggcatcgccaccgtcaccgtcgccggcctgctggtcaccaccatgttccacgccttcgtgctcaaggacctcttccccaacgacgtctccatcgccatcacccgcaagaagcccaagttcagcaagatcctcgcgcacttccgctcatccagctccgacatgaaggagtatgtgctctccatctccaagccgcccagctccgactccgactcgtcggtgtcgtccaaggccaccaccgtgaccgatccgtcggtgaccagagtcaaggcggagccctaa

SEQ ID NO: 6937 - DNA, 415 bp, Oryza sativa
  Clone ID: PAT_MRT4530_1357C.1
ccgtgttgctgggctccgggcgcgctcctagcgggggttgtccacgccgcggtgcggcggtgccaacttcctccggactaccggagcgggaccaacgtgtgctgtgggaggacctactcgacgcacgtggctgctcgtcctccgcctcgccgcgctgatccgtctctgggccctcggtgcccgcctacccggaccgaccggcttccccgccgaccctggcctcgccgccggtgacatcaccggctacctatagaagtaacatggcagttatggcccaggtgcacgactgtggctcggaccctctcaactgcttgactcaggaaaagattctagggagattaaagagatgctaacaaaggctgaagataagtaaccgttgactgggaagacatataatcaggcttgcggaaaaact

SEQ ID NO: 6938 - DNA, 339 bp, Oryza sativa
  Clone ID: PAT_MRT4530_13580C.1
atgcagccgccgcgagaaccccgtcgaggccggcggcatcccacggcctactccaacttcgtcgttgcctccgcccccagtcgtggcacccacgcttccccgaccatgatgccgccgcctccgccatggcgtcatgagcgcataccagacgccgtggtgcaccttcgtcaccgcccggggcacgccctggacgaggaagaggcaggcgatccacggcgcgaagaagtcggcgcggatcgggtggtagaactcccgccgcaccgcctcaaagtagaacacgaccttgagcaggtcattggattctgtcacgagttagtttctctgttacatgttgcatga

SEQ ID NO: 6939 - DNA, 2373 bp, Oryza sativa
  Clone ID: PAT_MRT4530_13581C.1
atggctggtgagtattggacactcagggttttcaaacatgatcgtggaccaaacactgatattttggagaaaaagatagagagaaataatatatgctactccaacttgatcaggctattggaaacagagggttatgaagcaagtgatgagttatttttcacaagtagcgatacatactattgtggcactttgaccaagattgaaggtgaaacacatgtgaaggacatgatcatggagaatgacaagagcaagatggctgatttacacttgttcaaggcaatacagagaacacccttttctcctctaaaaattgataatgttgaggtcattgcagggtcatctcagcaggaagataacattgattacaaccctgaactgataggcgtggcagacgaccaacatagcatttcaagtggtgacacggatcatgaacaagaaaaggtcgattatgttgagaaactaaatgagatgaagaggcagagggaagatccaatgacccattgtgaaggtgacactgatattgatgatttgtatacccctgaggacgctgatgtagatttgggtgttgcagacatagacgatatgtcatgtgagctgtctgatccacctagtgaggatggtggattgagcacacttgaatgtgagacagacgaagagaacaaaccaccaccagggaaaaggaggagaggaaaaggaattcaagttcagaggatttattttgacgagagcaatatgatggacacaagccaattgtgcaagggcatgtgtttcaccgacgcaggacaatttagaaaggctttgaagtcgtaccacattgtaaaagggagggattataagtacaccaggaataaagctgataggataaaagtgaagtgtagtcaagataaggttaagtgtgatttcttcattagagcatcacaagttgggagcgagaaaaccttcatggttagagagatgattgctccccacacatgtccaagtcatagaaactgcacccgagttgacagcacatggctaagcgaaagatatgaggatgacttttggagtgatccaaattggaaggttgaagcttttatggccagatgtctgagggaaacaggcacatacatatcaaaaagtaaggcttatagagcaaggagaaaggctacagagaaggtcctgggcaataaagaaaagcaatacaagaggattagagactatttgcaaacattaattgataccaacccaggcactacagcagtggtgacaaccatcaatagagatgttttaggattagcaccaagatttagtggactattcatatgtttcagtgctcagaaagaaggctttataaatggttgcaggcctttcataagtattgatggttgttttgtgaagctaacaaatggtgcacaggtgttggcagcttcagcaagggatgagaataacaacatgttcccaattgcatttgcagttgtcggaaaagaggacacagacaactggacatggttcttagaaatgttgaagtgtgcaattggatctggagaagaacatggtggttggaccttcatgtcagataggcagaagggtcttatgaatgcaatcccaattgtttttcctgacagcgagcatagatattgtaaaatgcatttgttgcaaaatatgggcaacaaaggttggagaggtgagaaatacaagggttttgttgatgctgcaatttatgccacaaccgtgtgggactatgataaagctatggaagacttaaaaaaattgaacttgaaagcttgggaatggcttattgcaattggcaaggaacacttcagtaggcatgctttctcacctaaagcaaagtcagacctagttgtcaataatttgagtgaggtgttcaataaatatattctagatgcaagggacaaacccattgtcactatggtcgaacacataaggagaaaagtaatggcagggcatacacctgaagattatgtcgctgattattttaggaaggatgcttatatgagaacatatactgcagttatctatccagtccctgatgagcatagatggacaaaaacagattcaccttatattgatccaccaaagtttgacaaacatgttggaaggccaaagaaaagtcgacgtagaggaccagatgagggtcctagggtgcaaggaccagcgaggaagactacaagtacatgctcaaactgtagaagggatggacacacatgctcaaacattaaggcaagaaaacgtggggttgcatcttcgtcccatgaaaactcaaacgaggctccttctcttggcatgattggtggtaggggtagtgcaaggggccgaccaagtgcaagagggaggggcagaggcagattgaacacctggttctcaacacagtga

SEQ ID NO: 6940 - DNA, 909 bp, Oryza sativa
  Clone ID: PAT_MRT4530_13582C.1
atgccgtgctctgctgtcgtgggtgagatggacgcctctgcgcgcgggcgcggctacgccctcctcagtcgtcgccttccccggccccgggccgttttccacagatacgcagcgacagagaggggcgggcggcggcgggtcaccggccgaagcgacggcgtgtcgtgggcggaacggccggtcagcggccggaccggcggcgggggagaagggggagaagaggagcggcggcgtgtcgtgggcggagcggccggccggacggcgggggagaagttgcggcagtggccggaggggcgcggggcgctgaccggcgggaggagaggtgccgcccgcggcccgtcgctgctccgccctcagctccgccagtggcccgccgccgcccgctccgctcctcctgtcggcttcgcgcgccgccgcccgctcagctccaccgggctgctccgcccgccgtcgctgctccgtgtgcctgccggcttcgcccgccgccgcccactccactcctcctatcggcttcgtgcgccgccgtcgtcgagcacgaccccgccgccgccacggatgaaggcgctgaacaaggccggcctcgaggcgtcggtgtgggcctacggcagcagcggcatggtcatctggtggccgagcccgtacatcgtcgcctctggcgtcctcctcatggcctccttcttcgagtggctcttccctcccttgcagtgcctggccgtggcggccgtcgtcgccggcgcgccgccgatggcgagtgccgagatgtcgtcgttgatgggcatgctacctgcgaaggcggtcctcgcgacgacgggcgatgtcgtcagcgtgcgcgacgtccgcgtgggcgacgtcgtcgcggtcagggccggcgagatcgtccctgtcgacggcgtggtggtcgacggctag

SEQ ID NO: 6941 - DNA, 422 bp, Oryza sativa
  Clone ID: PAT_MRT4530_13583C.1
tggttggtgaagattttatatggcatacgatggaggtattgtgtgcgtataggatgcggagtcgaatttgaaggagtccaaatttggtatgattggttatgtaaagtttgtttcttgtacgagaaggtttcctatggggattaggacttctagtatgagtttagttcgtggctttaggctgcctacctcatgtataaatagagagggagcgtcagaccggtggcatcgaggtcagaccggcggagcaacggtggtcagaccggtggcagcgacaggagctggcaggcaatctcggcggttcgaccgatcgatctatatcggtcagatcgacgttcttcaggtggtcagaccggcgctgctactttggtcagaccgcgatccttcgaatttgaggtttgaacatgagtagaaaaagaggtgga

SEQ ID NO: 6942 - DNA, 186 bp, Oryza sativa
  Clone ID: PAT_MRT4530_13584C.1
atggtggcatcggcgccactcgtagtaggaggccgcacgacagcagcggtgctcgcgagaggaggaggccccggcgacagtggcggcatcatctcgcggccagaattagcgacgctcaatgcagagggcttaagaatccattgtgggtgccctaccgaagagcacaagctagctaacaaggactga

SEQ ID NO: 6943 - DNA, 3015 bp, Oryza sativa
  Clone ID: PAT_MRT4530_13585C.1
atggccggaaaggatgaggcggaagggctcgaggcgaggctgctgctgctgccgcctgaggcggcggcggaggagccgacgaggtgtggcggcggcgacggcggcggcggcgggaggaagcggaagaagacgtaccttgatgtccttggcgtgtgctgctccgcggaggtcgcgctggtggagcggctgctcgcgccgctcgacggcgtccgcgtggtgtccgtcgtcgtggcgtcccgcaccgtcgtcgtcgagcacgaccccgccgccgccccggagtccgccatcgtgaaggcgctgaacaaggccggcctcgaggcgtcggtgcgagcctacggcagcagcggcgtggtcagccggtggccgagcccgtacatcgtcgcctccggcgtcctcctcacggcgtccttcttcgagtggctcttccctcccctgcagtgcctggccgtggcggccgtcgtcgccggcgcgccgccgatggtgcgccgtgggttcgccgcggcgagccggctgtcgctcgacatcaacgtcctcatgctcatcgccgtcgccggcgcgctctgcctcggcgactacacggaggccggcgccatcgtcttcctcttcaccaccgcagaatggctcgagacgctggcctgcacaaaggcgagcgccgggatgtcgtcgttgatgggcatgctgccggtgaaggcggtcatcgcgacgacgggcgaggttgtcagcgtgcgcgacgtccgcgtgggcgacgtcgtcgcggtcagggccggcgagatcgtccccgtcgacggcgtggtggtcgacggccagagcgaggtcgacgagaggagcctcaccggcgagtccttcccggtgccgaagcagccgcactccgaggtctgggccggcacaatgaactttgacggttacattgctgtgagaactacggctctcgccgagaactcgacggtggcgaagatggagaggctggtggaggcggcgcagaacagcaggtcgaagacgcagcggctgatcgattcgtgcgcaaagtactacacgccggccgtggtggttgttgcagcaggagtggccctgatcccggctctgctcggagcagatggccttgagcaatggtggaagctggctctggtgatgcttgtgagcgcgtgcccctgcgcattagtgctgtcgacaccggtggcatccttctgcgcaatgctgcgcgctgcgaggatggggatcttcatcaagggtggagatgttcttgaatcacttggggagatcagggccgtcgcgttcgacaagaccgggacgatcaccagaggagagttcagcatcgactcgttccatctggttggggatcacaaggttgagatggatcatcttctttactggattgcaagcattgagagcaagtcaagccacccaatggcagctgcacttgtggagtatgctcaatccaaatccatccaaccaaacccggaaaatgtgggcgattttcggatatatcccggggaggggatctatggagagatccatggaaagcacatctacattgggaacagaaggacattggcaagagcgtcatcacctcagtcaactcaagaaatgggtgagatgatcaagggcgtgtcgatcggctacgtgatctgcgacggcgagctcgccggcgtcttctcgctctccgacgactgccggaccggcgcggcggaggcgatccgggagcttggatcgctgggcatcaagtcggttatgctgaccggggacagcagcgcggcggcgacgcacgcgcagggccagctcggcggcgtcatggaggagctccactccgagctcctcccggaggacaaggtccggctcgtcagcggcctcaaggcgaggttcggcccgacgatgatggtcggggacgggatgaacgacgcggcggcgctggcggcggcggacgtgggcgtgtccatgggcatctccgggtcggcggcggcgatggagaccagccacgcgacgctcatgtcgagcgacgtgctcagggtccccgaggccgtcaggctcggccggtgcgcccgccggaccatcgccgtcaacgtggccggctcggtggccgtgaaggccgccgtgctcgcgctggccgcggcgtggcgccccgtgctctgggccgccgtgctcgccgacgtcgggacgtgcctcctcgtcgtgctcaacagcatgacgctgctcagggaggagtggaagggcggcgccaaggaggacggcgcgtgccgcgccacggcgaggtcgctggtgatgaggtcccagctcgccgccgactcccaagcacccaacgccgcagacgctggcgccgccggccgtgagcaaacgaacggctgccgttgctgtccgaagccgggcatgtcgcccgagcactcggttgtcatcgacatccgagccgacggcgagcgtcaagaagagcggccggccgaggcggccgtcgttgccaaatgttgcggcggaggcgccggcgagggcatccgctgcggagcctccaagaagccaactgcaacggtcgttgttgccaaatgttgcgggggcggcggcggcggcgagggcaccaggtgcgccgcgtccaagaagccggcaacggcggccgtcgttgccaaatgttgcggcggcggcgccggcgagggcaccggctgcggtgcctccaagaggccgccgccggcggccgttgttgccaaatgttgcggcggcggcggcgagggcaccaggtgcgccgcgtccaagaagccggcaacggcggccgtcgttgccaaatgttgcggtggcgatggcggcgagggcaccggatgtggtgcctccaagaggtcgccgccggctgagggaagctgcagcggcggtgaaggcggtaccaatggtgttggtcgttgctgcacgagcgtgaagaggccaacctgttgcgacatgggagcggcggaggtgtccgattcttcgccggagacggcgaaagactgcagaaatgggaggtgttgcgcgaagacgatgaactccggtgaagtgaaaggatga

SEQ ID NO: 6944 - DNA, 1406 bp, Oryza sativa
  Clone ID: PAT_MRT4530_13586C.1
atggcgcggccgccggtgctctccgtcgcgcttccctccgacacgggacgcgtgctcagcatccagtcccacaccgtccaggtgtttagtttaggcctcttgtgggtgtgttactctggttgtgataatgtatgtgggaaaatgaaggatggatacgttggcaacaaatcagcagtctttcccctgcaactcctgggctttgatgtggatccgataaactcggtacagttttctaatcatacagggtacccaacatttagaggacaggtcctcaacggcagtcagctgtgggatcttattgaagggctggcggaaaacgatttattgcattatacccatttattaacaggttatattggatctgtttcctttttaactactgtactacaagttgttgacaaattacgatcagtcaatcctgatcttgtatatgtttgtgacccggttctaggtgatgaagggaaactatatgtccctcaggatttaatatctgtttatcaacagaaggttgtcccagttgctacaatgcttacacctaaccaatttgaagttgaactactcactggtttaaggattacctgtgaagaagatggcttgaaagcttgcaatgcgctacatagtgctggaccgcgaaaggtggtaataactagtgcacttattgaagataagctgctcctcattggaagccacaaaaaagcaaaggaacaaccaccagaacaatttaagattgagatacccaagatacctgcatatttcacgggcactggagatttaacaactgcccttctactaggatggagtaataaataccctgataaccttgagagggcggctgaactggcggtatccagtttgcaggcactcctaaggagaactgtggaagactataaaagagctggggttgacccctccaccagcagcctagagatccgcttgattcaaagccaggatgaaattcgaaggccccagattacatgcaaggctgtgaagtatagctgaaaccatatcacaaccatggcaagcatcatcaaacatcaattagtgaatagtgactggagggagagtaccagtgttaaaaacaattttggtattctgcttgtatgcacaatattcatcaacatgcttcctggcttcaactctggggataccattttagttgatcatagtttcaaaacaagaaagggtctgatttcaaaaacaaaataatacacatgctgccttctctctctctctctctctctctctctctctttaatctcctttacaatttgtcatgtttttgtgcctatgagactgatattgtacaagggatagctccatcttggaaagctttattttgtgtaaaatctacaatgaataaacggcagttccgttgatgtgtgttgtgcaactttttggtaacctcc

SEQ ID NO: 6945 - DNA, 740 bp, Oryza sativa
  Clone ID: PAT_MRT4530_13587C.1
atggttttgcacaattcaaaacctaaatcaactcgtctcaataaatttgcacaaaataaaggagacaagagacaaggaattttcaccgaggttcggaaactcgccggtttcctaatccccgttgaggcgagcccaactctaccgctccaccacgaagccaccacacgcccctttcgtcaagggaaactagccgttggagtcgaaatccccaactttgtgctctaccggtcagaccgccatagagtggcatgtcagaccggactactctgtaacggctagaaaactagacgttacagggcaatcattgagcccactcaacttggccggtcagaccgcagtgaagtggccggtcagaccgtccacggctcggtctaaccggttgcggctctggcggctttgtatcgccaccaaaaaccaggccagtgcaatagaccagtagggccggtcagaccagccttaccacgccggtcagaccggctaatagccccggtcagaccgacctaaggtccacggtcagaccgcaggtcacttttcagcacaaccaaccgttagtaaaacgacgatatctcttgactcggatctcagaatttggcgttctcggactctatggaaagcttattcaaagggctatctaacccatgaacaatccatccaagaaacacaacttttctcagggagaaatggctcacactccaaaggatactccaccggacataaccacatgaggctacccaaaccta

SEQ ID NO: 6946 - DNA, 560 bp, Oryza sativa
  Clone ID: PAT_MRT4530_13588C.1
atgcgacaaataaatgagacaagagacaaggaatttttcaccgagattcagaaactcgccagtttcctaatccccgttgaggcgagcccaactccaccgctcaaccacgaagccaccgcacgcccccttcgtcaaggggtgggcaagaaaactagccgttacagggcaaccattgagcccactcaacctggccggtctgaccgcagtgtagtaggcggtcagattgtccacggctcggtcagaccgccatcggctcggtctgaccggttgtggttctagcggctctgtatcgtcaccaaaaaccagaccagtgcaacagaccagcccggccagaccggcctaaggcccacggtcagaccgcaggtcacttttcagcttaaccgaccgttagtaaaacgacgatatctcttgactcgggtctcggaatttggcgttcttggactctatggaaagcttattcaaagggccatccaacccatgaaaaaaccatccaagaaatacaacttaagtcaaggataaagggctcaaactccaaaggatatccaccggacatacccata

SEQ ID NO: 6947 - DNA, 242 bp, Oryza sativa
  Clone ID: PAT_MRT4530_13589C.1
gtccaccgtctgatgggcaccgcgagggtcgacgccggcacggacgccgtcaccggcgtcacctccaaggacgtggtcatcgacgcccagtccggcggcctcgccgcgcggctgtacctgcccggcggcgtcccgaggtgcgagaagctccccgtcgtcgtgtacttccacggcggcggcttcgtcgtccactcggccttctcccgcgtgcactccaggttcctcaacgccctcgtggccgg

SEQ ID NO: 6948 - DNA, 366 bp, Oryza sativa
  Clone ID: PAT_MRT4530_1358C.1
ggtcttgcgcacgttcagctccttcacctgctccctgaagccggcatagttggagggcatggcctctagcttgaagggcaggtcgtcaatgtggtacagggtgcttccccagaagaacttggcctggacgcccgcgtccttgagggccgcgcacaccttgcgctccgactgcagctcctcgtgggtcacctcctggtgcgcaaacagggtcttggcgccggtcttgccggccaggtcagccaaaacctcctccggctttccgatcctgacaaccagctcgctgcctctctccctcaggttcttgcgcaggtccgttacgcactcgatctggaacttgccccgatatggcccggtcttgtcgaaccc

SEQ ID NO: 6949 - DNA, 192 bp, Oryza sativa
  Clone ID: PAT_MRT4530_13590C.1
tcttccactagcgcactagtagcgacacatgtggtacttctcccattgctactgccaccgaggaggttgccgctgcggctgctgcctcctacaagacgccaacgacgctttcgacagacctaatacaggagacgaacgaagctctgaaggcaccgaagccaaaagaggcgccgaaggctaaggaaggggaag

SEQ ID NO: 6950 - DNA, 1434 bp, Oryza sativa
  Clone ID: PAT_MRT4530_13591C.1
atgccgaaggcggcggcctccctcgcgtccctcctcccgcagctatggcaccgccccgtccagccccctcccttcctccaccgcgccctctcctcctcctctcccctcctccgacgccaccgcgccgccctccactcgccggcggcgcccctctccgccgctgcggtgtccacctccgccgcaaccgtcgaagccccagcgaccgcagcgtatccagtttatggcaggctcttgccttgccctctgcaagatgaccctccaaggatcgagcacctcgtcgcgcgggaagacgaggtcgccgtcgatttcatctccaggtcactcaccctccctccactgtacgttgcagatctcatcaagtttggggctgtttactatgcgcttgtcgcgccgcagccgcctcctcacgcggctccggagcatgttaggatttttagagaggtgaccgagccttcggtcctgtgccgtaggaaatccattaaagggaagacggtgagggaggcgcagaagacatttagggtgacagaccccaaccagcgcctcgaggccggcacgtatctgcgggttcatgtgcatcccaaacgttttcctaggtgttatgaaattgactggaaatccagggtaatagcagtaactgataactatgtcgtacttgacaaaccagctgcaacatcagtgggaggagcaactgataacattgaggaatcctgtgtggtttttacttcacgcgcactaggattagaaacacctttaatgacaactcatcaaattgataactgttctgaaggctgtgtggtattatctaaaactaaggagttttgctcagttttccatggaatgataagggaaaaacaggtcaataaacgttaccttgcacttactacagcacctgtgtctacaggaataatcacacattacatgcgtcctattaatcgtgctcctagattagtttcagaagatcatattaaaggatggcatgtttgtcaaatggagatattggactgtaagaaggtcccatggccaagctctctgatcagaaaagtccataaagtagacaactgtggttggccccaacaggaggctgcctatgaatgtaaaatcaatctcttgacaggaaaaactcatcagatacgagcacaacttgctgctataggcactccaattgtaggggattctgcctacatgacggcagcaatggcagcaatagttaatccaagcataaatccatttggtcgatggggacagaactatgatagtgaagatgaaaaggcagctgctgttgaagcttggatttcttgtcatggcaaagaaccaaaatcagtaattggcctacaagcatctgagatctcatgggattatgaaggtgaacaccattcttataaggcaggagttccatggtggcggcaagatgcagttgaatctgacttgatctga

SEQ ID NO: 6951 - DNA, 565 bp, Oryza sativa
  Clone ID: PAT_MRT4530_13592C.1
atgcaacaaataaatcagacaagagacaaggaattgttcaccgtggctcggaaactcgtcggtttcctaatccccgttgaggcgagcccaactccaccgctcaaccacgaagccaccgcacgcccccttcgttaatgtgtgggcaagaaaactagccattacatggcaatcattgagcccactcaacctggtaggtctgaccgcagtgtagtggccggtcagaccgtccacggctcggtcagaccgccgtcggctcagcctgaccggttgcggctctggcggctctgtatcgccacaaaaaactagaccagtgcaacagatcagtggggccggtcagaccggcctaaggcccacggtcagaccgcaggtcacttttcagctcaaccgactgctagtaaaacgacgatatctcttgactcgggtctcggaatttggcgttcttggactttatggaaagattcttcaaagggctatccaacccatgaacaatccatccaagaaacacaacttttcttagggagaaagggctcacactccaaaggatactctaccagacataaccaca

SEQ ID NO: 6952 - DNA, 2234 bp, Oryza sativa
  Clone ID: PAT_MRT4530_13593C.1
aacatgttatctcagcgcgataatccaattatcggccgtaggactttctaagcatcttgctagatgctcaggaagtatttctttaagtatttcccattgatggctctctgaaaacgttgtcctggaagtgtctccatctctttcaaagtcttcaaacgcttatcgatgacgtcttcaagattgcctcccatcaaggtcttgtaatcttcaaccgacaagttgtcttgcttgatatatcgaagagagccaagatttacctcaaccggcaaaacggcttcttgaccataaaccaactcaaaagtagtgactttagcatcatcatgtttagatattctatgagcccataatgctttggaaagcatctcatgccacttctttgagtgttcttcaatattctttttgactaatttcaacaatgttttattactcgactcggcttatccatcagcctgagcgtagcaaggagaagaactcaacaagttaatatcataagattcggcaaaacttctcatctccttggacataaaagaagctctttgatccgtagccaatgtttaaggaatatcgaatctatgaacaatatgcttcaagataaagtcaatcacctccgtgcaagtaatattcttgaacggcatggcttcggcccatttggtgaaataattcgttgcaactaagacagcggtttggcttcggccatgacgctggcagctttcgcacttcttgatttactcaacacagactttcaacacagtgggccagtaaactccttgtctaaatactttggaggcaactgttcttgcggcttggtgcgcgccacatagcccctggtgtatctccttcgccatttcctcgccttcgacgaaagagatgcagcgaagcaagggttgaagtaccccggagcaatagagctggcccgagaccatcttgtactttgtggctctgagttgcaagcgtctgtagaatctgtagtttgtattttgtaatgaatccagtgccaaatccgtagctttgcaatttttatgcttaaatctgtagcttttgacaaattctctaggtgtagtttggtgcatgatgtagctccacttcattataacaggcacctgtccggattcatagtagtcacatcccgtactagattaacttattttaggatggagagattcttacccaaaattctcatctttttcctgccttttatttctgtgaaagaattcccctggtttccgctgaaaataagtctcttctatgaatatgatacaccatggattcttggtaaaaacacaaagacatccatggatttttcgaagtgtgaagatcttggaaaagattatcttattatgctgaaaattagcaccaaagttctccagtcgatgttctgtcagttttgtggacaaaatcaaccatttttccaaacaaaaaaagactactttcaacagtttgcaaagtcacctattaagaagatgttggagattgcactttctttcagtgagtcaaactggtctgaggagcatatccgtccaatgctacttgcctatgatacactacaagatgtccttcctaccataagggagttgtctcctgatgaacctgacgagttttttaccagcatcttacataacatgaggaatgcttccaggggaataattgacaatatgaagcgattcatacaacataaggtgcaaacctgggacaacattgctattcatccaacgacatgtttcctcataaatgcaataaagattttcaacgttcacaagaatttattgcattccactctggtccctggtgatggccaagactcatttggttatcttattaatggcgtcattgcttgctggaaattaaagatcaaagagctttccatgttagatgatccagacaaaaatgattcagacggaaacaatccaaacttgttcatattcttattgaataacataaagcattttaatagggatacaaatggtctgctggatgggttattggtccatagggagctcattgaagagtgcaagaatgagttccagagtgacatggaaaattatactagtagatatatgactgcatcttggggtccagccatatcttgtttgaacaatcatacaggcggaagcatacgtcaatctatgaatgcattcatttcaaagtttgaaggtacttttgattgccagaaggttttgaaagttcctgataatttaattggcagggaaactatcgagattaaggtttgctattaa

SEQ ID NO: 6953 - DNA, 745 bp, Oryza sativa
  Clone ID: PAT_MRT4530_13594C.1
atggttttgcacaattcaaaacctaaatcaactagtctcaataaatttgcacaaaataaaggagacaagagacaaggaattttcaccgaggttcggaaactcgccggtttcctaatccccgttgaggcgagcccaactccaccgctcaaccacgaagccatcgcacgcccccttcccgttggagtcgaaattcccaactctgtgctctaccggtcagaccgccatagagtggccggtcagaccggactactttataatggctagaaaactaaccgttacagggcaatcattgagcccactcaacctggctggtctgaccgcagtgaagtggccggtcagaccgtccacggctcggtcagaccgccatcggctcggtctgaccggttgcggctctggcagctctgtatcgccaccaaaaaccagaccagtgcaacagaccagtagggccggtcagaccggccttaccacgctggtcagaccggctaacagccccggtcagaccgacctaaggcccacggtcagaccgcaggtcacttttcagcacaaccaaccgttagtaaaacggcgatatctcttgactcgggtctcggaatttggcgttcttggactctatggaaagcttattcaaagggctatccaacccatgaacaatccatccaagaaacacaacttttctcagggagaaagggctcacactccaaagaatactccaccggacataaccacatgaggctaaccaaaccta

SEQ ID NO: 6954 - DNA, 414 bp, Oryza sativa
  Clone ID: PAT_MRT4530_13595C.1
atgggatggatttgggcaggccgccatatgatggccctcgcgaccgcacttgaagcacttgattttaggcgcacatgcacctcgctccccatcaaccccaggacgcccttaaggtttacattgagcgccttgattcgccctagggttttgggtgaggagttgctgacgcagctcctcctcctcccttgctccacatgctccccagtcaccaccacctcgcgccccccagtcaccgccgccttgctcagtcgcgcgacgcttgttggcttgccagtccaggcgattgggagggcaccgctccatcacgacctgggcgaaagtgtggtgatcgcacatcttctcaggcacccgccaaatccgacgagctccgccgccaaaacgccggatctcgtcgtctctcgccgggaaccctag

SEQ ID NO: 6955 - DNA, 684 bp, Oryza sativa
  Clone ID: PAT_MRT4530_13596C.1
atggcggggcggcgcggcaccgagggggcgcggccggggaagaagggagggagaggtggtgatggggcagaccggtggcggtccagcgacgtctcggtcgcggcggcggcggccggcgacgaggaggcgacggcactccgttcccaggagcacgggaccaaggggatagataagggccgcgggaccgccattgtgaggccggtcagaccggactactttgtaactagccgttacagggcaatcattgagcccactcaacctggtcagtctgaccatagtgtagtggccagtcagaccgtccacggctcggtcagaccgctgccggctcggtctgaccggttgcggctctggcggctctgtatcgccaccaaaaaccagaccagtacaacagaccagtgggccagtcagaccggccttaccacgccagtcagaccggctaacaggcccggtcagaccggcctaaggcccacgatcagaccgcaggtcacttttcagctcaaccaaccgttagtaaaacagcgatatctcttgactcgggtctcggaatttggcattcttggactctatggaaagcttattcaaagggctatccaaaccatgaacaatccatccaagaaacacaacttttctctgggagaaagggctcacactccaaaggatactccaccagacataaccacatga

SEQ ID NO: 6956 - DNA, 1884 bp, Oryza sativa
  Clone ID: PAT_MRT4530_13597C.1
ggacccctcgtgatggacacccgcctccccctcctcctcctcctcgccggcgtcgtcgccgccgcggcgccactgctcgccaccgcccagctctccgccgacttctactcctccacctgccccaacgtcgagaaggtcgtctccaccgtcatcgagcgcaagttcaaggaggaccctaccacctccgccctcctcctccgcctcctcttccacgactgcttcgccaatggatgcgacgcgtcgatcttgatcgacccgctgtcgaaccagagcgcggagaaggaggcggggccgaacatctcggtgaagggctacgacatcatcgacgagatcaagacggagctggagaaggagtgcccgcaggtggtgtcgtgcgcggacatcgtggcgctcagcacgcgcgacagcgtgcgcctcgccgggggccccaactacgacgtgcccaccggccgccgcgactcgctcgtctccaaccgcgaggaaggcgactcgctccccggcccggacatcgccgtcccgaagctcatggcgcagttctccgagaaggggttcagcgccgacgagatggtcgtcctcctcgccggcggccactccatcggcaaggccaagtgcttcttcatcgaggtcgacgcggcgcccatcgacccgacctaccgctccaacatcaccgccttctgcgacggcaaggacggcgacaagggagccgtcccccttgatcccatcacccccgacgtcgtcgaccccaactacttcgaactcgtcatggacaagaagatgccgctcaccatcgaccgcctcatggggatggacgcaagaacgaagcccatcgtggagtccatgggtaaaaagaccgaccagttcgacgccaccttcggcaaggccatgacgaagctcagcggcatgaaggtcatcaccggcaaggacggcgagatcaggaaatcgtgctccgagttcaacaacccggtgaacaccgacgacggcccgtccgtcatccggatcagctcgctgaaccccgaggagatgatgggctcctttgcgccggccaccgggaagtccccctccgccgcctcggagtccaggaaggtggcaccaggcggcgccatggaggaaaggatggcggccggtgaggcgaagacggatgcttcaggcggcgccatggcggaaaggttggcggccggtgaggcgaagacggctgctgcggcctccgaggatgaaaaccaagcggcagctggtggcgccgccggcgatgaggcggcggcggaggaggaggggaccaagtccaacaagaagaaggccgagcgggtgaccgcagaagtacctgccgacgaggcggcgccggcggcaaagaagccgagggcgatgggcggacaatcgttcagcatggccggcgccggcgccggcggcgagccggcgaagaagtcgacggcgatgaagagccaatccttcagcatggcgggccagccgcaacagtagacgaagaagaagaagaagaagaagaagaagaagaagatgccgcgctgctagctgagccgttcgcacggcggcctgatcgagcgcgcattgccatttatcgtttttgattttctcactctctctctcgcctgtttgtagaagggacgagcatactactaccgctaattactaggcttaattttgcaagtaatgtcgtgtcgagttttttttaacagcgaccaaaagctcgatgatattttctcttttcattttcccttttttttttgtcattcttgttaagaattcgttgccaactcaatctggctggcaaataaaagtgtattaaatttcccctttttatatagagagacaggtacacaattgtaattgtttttttagatcaaccaatgcatgtgaaacgatatacgtgct

SEQ ID NO: 6957 - DNA, 2136 bp, Oryza sativa
  Clone ID: PAT_MRT4530_13598C.1
atggaacaacccgctgctgcccagccatcatcatcagcagcgtcgggagcaggagcaggagcagcgggcccggttcttggcaaggtcgcggggcaggagggtgcctccacctccgccgccgcggcggtagctgctcgtcggggtgagggtgactgccgcggggaggaggaggtgccgctgcgggtgcggctcgggagggccgcgaggaggcgggctgggccctgcacgccgtcgccgtcgtggaagctggagggggaggaggtggaggtggcggcgggggaactggctccggtgcacccggcggtggcgcccgccaggcggagctccgcgtcggcttccgcctcggcgcggcagctgggagccagcctgtgggagatccacgacgtcatgcgggaggggcgcggcggcgggtcgcggaggcgcaggagcgggaggccgctcgcctccgccggcggcgagctgcatcagaatacatcagggttttacactttgttccttggaattggaaaaaagaattcaggtggctttggtaggcatattgcagattcatcaacgaatcatcagaagttaaatcaagcaaggaattgtacagcacaacctttttctcctggaagttacagaagctcagttggggattccagtataaatcaagcgatcagtccagctcgctctttggatatcaagggtagattcaggggggctgattataaccttaagacatcaacagaactcttgaaggttctaaatcgaatctggagcctggaagaacaacatacagctgatatgtcagcgattaatggactaaaattggaattacagcatgcacaggaacacattcaagaacttaagtgtgagagaagaggatatcgccatgatgttgcttcactggtgaggcaactctctgaggacaaacttgtccggaaaaataaagacaaagagaagattgcagcagacattcattccctgcaagatgaactggaggatgagagacgccttaggagacattctgaagacctccacaggaagtttggcaaggagttatctgagataaaatcagcatttgtcaaggcagttaaggaccttgagaaagagaagaaaacaaagaacctgttagaggacctttgtgaccaattcgcaatgggaatccgagactatgaagaggaagtcagggcattgaaacaaaggcatgtaaattacgaataccagtttgataaatcagtgcttcatgtatcagaagcatggcttgatgagagaatgcaaatgcaaaatactgatgtcaaggaagactcactgaagaaatcaacaattacagagaggctaagaagtgaaatcgaggcttttcttcttgccaaaagatcggttagctttaagaataatgacaactacatgcatgatagtaggccaaatgctcggttacgtcggcaatctcttgagtctgtccattttaatggagccactagtgctccccagctagctgaagatgatgatgatgattctgttgctagtgatttgcattgctttgagctcaacatgcatggaagtagcattcagatgcatgaccatacagggcctcgcagaagctacacaggcaacatggatgcacctaagagaagaacagaatactcgcatagtgtagttggtgagagttcacatatgtctgacgtgcaaatttattcacagtgtaacaaagcaaggtccagtagcagcagaccatggcatgccactagaactcaagaaatcgactcacaggccagcgctagaactgttccagcagacgagcagaatgagatcccttgcccccatatttctcaaggatatcacaatggcacaacatcgaagaacaacctgggggctcatgccgactgtctggggcaggaatcccttgatcattactcgcgagctagtctattttgtgatggaactacttcgggggatttatgcaatccacacagtccatcgcgacagcttgattatccgtccgcatcattgggccatgacataggtgaatgctcaacagggcttctagtaggcatgaaggagaacaccctgaaggcaaaactgcttcaagcaaggcttgaggggcggcatgcccggttgaaggcgtcaggaggttcggtaaccagcaggagaaaatga

SEQ ID NO: 6958 - DNA, 560 bp, Oryza sativa
  Clone ID: PAT_MRT4530_13599C.1
atgcaataaataaatgagacaagagacaaggaatttttcaccgaggttcggaaactcgccggtttcctaatccccgttgaggcgagcccaactccaccgctcaaccacgaagccaccgcacgcccccttcgtcaaggggtgggcaagagttttagccgttacagggcaatcattgagcccactcaacttggtcggtcttaccgtagtgtagtggccggtcagaccgtccacggctcggtcagaccgccgtcggctcggtctgaccggttgcggctctggcggctctgtatcgccaccaaaaaccagaccagtgcaatagactagcccggtcagaccggcctaatgcccatggttagaccgcaggtcacttttcagctcaaccgaccgttagtaaaacggcgatatctcttgactcgggtctcggaatttggcgttcttgtactctatggaaagcttattcaaagggccatccaacccatgaaaaaaccatgcaagaaacacaacttaagccaaggataaagggctcacactccaaaggatatccaccggacatacccaca

SEQ ID NO: 6959 - DNA, 324 bp, Oryza sativa
  Clone ID: PAT_MRT4530_1359C.1
attatgcaagaaggaaaacaaggagaggagcatccatgcaatcacacgcagcagaatccacaagcacgttcctggggacgaggatagagcaccctgcaccgcacagaaggaggatcataacccggttcggattaagcccccggaagaagaccccgccgaagaaaacgccgagaccgcccgcgccgacaacaagcacaacccgtgagaatccctggcccgctggcagggcaatacctgcaccggtcagtcgaagaaggctacgcgttagaccgggaagaagcatcgtaagacctacaagatctacatgttcaaggtgctcaagct

SEQ ID NO: 6960 - DNA, 525 bp, Oryza sativa
  Clone ID: PAT_MRT4530_135C.1
ttcgcggttccgccggcgaggagagcgcgcggcggcggcggcggcggcggcatcgggctcgtgtcagtcacgatggtcgcgccgtcgttcacgacgcactcgttcgcgatgaaccagaggctgctactcctcgacgccgtgaagacggcggcgctggcacgggccagcacctaccagacatccgtggtgatgccggcgacggcggccttggcgccgccgggctactacatggtgttcgtggtgaatggccacatcccaagcgaagggatctggccatgttggggtgggattgggaacgccgtccgtgtgcgcgcctcgccggtggggcggcttcggtgcgtcacgtgtgcgcttgcgggtgacgggagcgcatgggccacgggtagcgaggcagcggtggccatcatcacacgttcggcgttcaccgtcgtgaggtcctccgccttcatatccaccgtggcgaggagcaccttcgctgttgctcggcctccatcgccgccactccgcctcctcctccgccgctag

SEQ ID NO: 6961 - DNA, 405 bp, Oryza sativa
  Clone ID: PAT_MRT4530_13600C.1
atggcggagcgcgagggcacgccggcttcccaccccgtgtcggccgtggcgccgcctcccctcgccgccctctctccctctctccgtttgcttcctcttctcctgttgttgaagtcgtgtgcgttctgtgcctgcaggaagggctacggcgtgcgctgctccatgctagacggccgccgcctcctcatccagaccaacgcccgcgagatcgcgccgcggtcaccgcgtcggcctcgctcctccgcgccaccagcaagctggctacctcctgcgcggcactcttgcctcttctgtgacttcggctgccatgccgcggccaaggcacccagctgctcccccgtcgccacccgtggagaggagacggggatgagaagaggtggagaggggagaggaatcagaggctga

SEQ ID NO: 6962 - DNA, 1559 bp, Oryza sativa
  Clone ID: PAT_MRT4530_13601C.1
gatataatcaattttttatggctgaggaagatattcataagacagcttttagatgtcttggtgcaatcgtcttatttgagtgggttgtaatgacttttggcttgaaaagtgctggagccacgtttcaaagagccatgaattatatatatcatgatctgatcggctggttgatcgaagtttatattgatgatgtggttgttaaatctgaagagatagaggaccacatagccgatttgatgaaggtttttgaaagaaccaggaaatatggcttgaagatgaatccaacaaagtgtgctttcggtgtatcggctggccagcttttggggtttcttagtcatgagaggggaattgagataactcaaaggagtgttaatgccatcaagaaaattcagcctacacagaataaaacagaattgcaagagatgatcggcaagataaattttgttagaaggtttatttctaatttgtctggaagattaaggcattatctattgtccaacgaatgcactgtcatatgcaaaaccgatgttgttaaatacatgttatcggctccaattttgaaaggaagggttggaaagtggatattctctttaacagagtttaatcttcggtatgagtcaccgaaggcagtcaaggggcaagcaatagccaattttatcgttgatcatcgtgatgatttgatcggctcggttgaaattgtgccatggactttattctttgacggatcagtatgtactcgtggttgcggtatcggcttagtgataatttcccctaggggggcatgctttgagtttgcttatactattaaatcctatgcaaccaacaatcaagctgagtatgaggcagttctcaaagggttgcagttactcaaggaagttgaagccaacgctattgaaattatgggagattctttgctagttatcagtcagttgggaggagagtatgaatgcaaaaatggcacgttaatggtttataatgagaagtgcctagaactgatgaaggaatttcggctagtaactttgaagcatgtatcacgagagcaaaatactgaagctaatagtttggcccaaggggcatcgggatataagccgatgatcaaggatgttaaagttgaggttgctgcattaatagccaatgattggagatattacaagggatgtcaagattgtcaaaaatttggagcaattcattgggcaccggcatcggctatgaatcctatcattaaacattggccatttagaggttggggaattgatatgatcggcatgattaatccaccatcgagtaaggggcataagttcatattggtagcaaccgattattttaccaagtgggtagaggcgattcctttgaagaaggttgattctagggacgctattcaatttgttcaagagcatatagtctatcgatttggtattcctcaaaccatcacaaccgatcaaggttcaatctttgtgtctgatgagtttgttcagtttgccgatagcatgggtattaaattgttgaattcttcaccatattatgcacaagctaatgggcaggccgaggcatctaactag

SEQ ID NO: 6963 - DNA, 761 bp, Oryza sativa
  Clone ID: PAT_MRT4530_13602C.1
atggttttgcacaattcaaaacctaaatcaactagtctcaataaatttgcacaaaataaaggagacaagagacaaggaattttcaccgagattcagaaactcgccggtttcctaatccccgttgagacgaccccaactccaccactcaaccacgaagccacctcacgcccccttcgttaagggaaactagccgttagagtcgaaatctccaactctgtgctctgccggtcagaccaccatagagtggccggtcagaccggactactttgtaacggatagaaaattagccgttacagggcaatcattgagcccactcaacctggccggtctgaccgcagtgaagcagccggttagaccgtccacggctcggtcagaccgccattggctcggtctgaccggttgcggctctggcgggctctgtatcgccaccaaaaaccagaccagtgcaacagaccagtagggccggtcagaccggccttaccacgccggtcagaccggctaacagccctggtcagaccgacctaaggcccacggtcagaccgcaggtcacttttcagcacaaccaaccgttagtaaaacggcgatatctcttgactcggatctcggaatttggtgttctaggactctatggaaagcttattcaaagggatatccaacccatgaacaatccatccaagaaacacaaattttctcagggagaaatggctcacactcaaaaggatactccaccggacataaccacatgaggctacccaaaccta

SEQ ID NO: 6964 - DNA, 2621 bp, Oryza sativa
  Clone ID: PAT_MRT4530_13603C.1
tttttgttttactggcttggcatcgggtcgcaccatgagtttgtgctcaatcacctccctagggaccccccgcatgtcggacggctaccaagcgaacacgtctgaattgtcgcggaggaaggtgatgagcgcgaggaccacatagccgatttgaggatggtttttgagagaactaggaaatacggcctaaagatgaatccgacaaagtgtgctttcggtgtatcggctggccagtttttggggtttcttgttcatgaaaggggattgagataactcaaatgagtattaatgcaatcaagaaaattcagcgtccagagaataagacagagttgcaggagatgatcggcaagataaattttgttagaaggtttatttgtaatttgtctggaagattagagcctttcacgccgttattaagattgaaagcctatcagaagtttacttggggggcagagtagcagaaggctttggatagtattaaggaatatcttagctctgctccagttttgattcctccacagaatggaataacttttaggttatatctgtcagccggtgagaagtcaatcggctcagtcttgattcaggagctagaagggaaagaaagggttgtattctatctgagtcgtcggctcttggatgcggaaacaagatattcccccgtggagaagttgtgcttgtgcttgtgtttttcctgtacaaggttaaggcattatctattatctaacgaatgcactgtcatatgcaaagccgatgtcgttaagtacatattatcggctccaattttgaaaggaaggattggaaagtggatattctccttgacagaatttgatcttcgatatgagttaccgaaggcagtcaaggggcaagctatagccgattttattgttgatcatcgtgatgattcaatcggcttggttgagattgtgccatggactttgttctttgatggatcagtgtgcactcatggttgtggtatcggcttggttataatttctcctcggggggcatgttttatgtttgcttatactattaaaccttatgcaactaacaatcaggttgagtatgaagcagttctcaaagggttgcaattactcaaggaagttgaagctgatgctattgagattatgggggtttctttgctagtaatcagtcaattggcaggagagtatgagtgcaaaaatgatacattaatagtttataatgagaagtgccgagagttgatgaaagagtttcggctggtaaccttgaagcatgtatctcgagagcagaatattgaagctaatgatttggcccaaggggcgtcggggtataagccgatgatcaaagatgtcaaagtagaggttgccgcattaacagccgatgattggaggtatgatgtacctcattatttgtagaatccatctcaatcagcttctcgaaaattgcgctatagagctttgaagcatactttgttggacgatgagctctattatcggacgatagatggggtattgcttaagtgtttaagtgccgatcaggccaaggttgcgatcggtgaggttcatgaaggaatttgtggcacccatcaaatggctcataagatgaagtgtttgcttcgacgtgcggggtatttctgaccgacaatgctggaggattgtttcaaatattacaagggatgtcaagattgtcaaaaatttggagcaattcaaagggcaccggcgtcggctatgaatcctatcattaaactatggccatttagaggttgaggaattgatatgatcggtatgattaatccaccatcgagcaaagggcataagattatattggtggcaaccgattattttacaaagtggctagaagcgattcctttgaagaaagctgattctggggatgctatacaatttgttcaagagcatataatctatcgattaggtattcctcaaactattacaaccgatcaaagttcaatcttcgtgtccgatgagtttgttcagtttgccgatagtatgggtatcaaattgttgaattcttcaacatattttgcataggctaatgggcaaaccgaggcatctaacaagagtttgatcaaattgattaagcgaaatatttccgattatcctcggcaatggcatactcgattggccgaagcgttatggtcttatcggatggcttttcatagatcgatccaagtccctccttataagcttgtttatggacatgaggttgttttaccatgggaagttagaattggctcaagaagaacggagttgcaaaatgatttgatagccgatgagtattataatctcatggacgatgaaagggaagacttggtttaatcaagattaagagcccttgcaaaagttacctaggataaggaacgagttgctcgacattacaacaagaaagttgtgcccaagtctttttcggaaggagaacttgtatggaaattgattttgtcgattgggactcgagataacaaatttggcaagtggtcgctgaattgggaaggaccatttaaaatctatcaggttttgtctaagggagcttatgtgttgcaagaactcgatggagaagtttatggacgatcgctaaatggcaaatacttgaagaaatattacccaagtgtttgggtcaatgca

SEQ ID NO: 6965 - DNA, 732 bp, Oryza sativa
  Clone ID: PAT_MRT4530_13604C.1
atggttttgcacaattcaaaatctaaatcaactagtctcaataaatttgcacaaaataaaggagacaagagacaaggaatttttcaccgaggttcggaaactcgccggtttcctaatccccgttgaggcgagcccaactctaccgctcaaccacgaagccatcgcacgccccctttccgttggaactgaaatccccaactcagtgctctgccggtcagaccgccattgtgaggccggtcagaccggactactttttaacggctagaaaactagccgttacagggcaatcattgagcccactcaacctggtcggtctgaccgcagtatagtggccggtcagaccgtccacggctcggtcagaccgccgtcggcttggtctgaccggttgcggctctgatagatctgtatcgctaccaaaaaccagaccagtggggccggtcagaccggccttaccacgtaggtcagaccggctaacagccctggtcagactggcctaaggcccacggtcagaccgcatgtcacttttcagctcaaccgaccgttagtaaaacggcgatctctcttgactcgggtctcggaatttggcgttcttggactctatggaaagcttattcaaagggccatccaacccataaaaaaaccatccaagaaacacaacttaagacaaggataaagggctcacactccaaaggatatccaccggacatacccacaagaggctacccaaaccta

SEQ ID NO: 6966 - DNA, 1261 bp, Oryza sativa
  Clone ID: PAT_MRT4530_13605C.1
gtgattagtttcaccctagtctagtctaatggaattgaatagtataggtggatggttgggcctgttgcaatgtggtgtagcgttggacagtggatgtttaatattgattaattattacaaatgttttactgtttccaactactgtttataaatgctcgctttatgcaaatgaaccactatagctatccctcgatacttccctgcatcatacccctattccggtatgacgtgctgagtacagtgggtagtactcagtcttgctctatttttcccaaaccccagagtttgagtatgcgtcagatggtggcttctccgaggagtaggcttcgtccgtgccgtcgaggatgcctgtggagtggggatcccgtttgttgtttctgttccccggccggtcctggacgagaattttaatgcacattctgcttggaattctattcgagaatttctgggcgtgacaacaatgctggaggattgtttcaaatattacaagggatgtcaagattgtcaaaaatttggagcgattcaaagggcacaggcatcggctatgaatcctattattaaaccatggccatttagaggttggggaattgatatgatcggtatgattaatccgccatcaagcaaagggcataagtttatattggtggcaaccgattattttaccaagtgggtagaagcgattcctttgaagaaggttgattctggggatgctatacaatttgttcaagagcatataatttatcgatttggtattccccaagccattacaaccgatcaaggttcaatcttcgtgtccgatgagtttgttcagtttgccgaaagcatgagtatcaaattgttgaattcttcaccatattatgcacaagctaatgggcaagccgaggcatctaacaagagtttgatcaaattgattaagagaaagatttttgattatcctcggcagtggcatactcgattggccgaagcgttgtggtcttatcggatggcttgtcgtggattgatccaagtccctccttataagcttgtttatggacatgaggctgttttaccatgggaagttagaatcggctcaagaagaacggagttgcaaaatgatttgacagccgatgaatattataatctcatagccgatgaaagggaagacttggttcaatctagattgcgagcccttgcaaaggttaccaaggataaggaacgagttgctcaacattacaacaagaagggggtgcccaagactttttcggatggtgaacttgtatag

SEQ ID NO: 6967 - DNA, 888 bp, Oryza sativa
  Clone ID: PAT_MRT4530_13606C.1
atggatagccggagaggaaggtggttggcaggaggcgtgcgcggtggttggatttctcggcgttccctgggattcccgtcggaggccgccggattcaagctggttcatctcttcggtagcacaaaattacagcaaccatgtaaggaggaggatcataaacggctggaacgcgtcttgctaagaatgcactctgttgtcgaggaagcagatggatgccacatcacaaatcaaggaatgctcctacagctaaagggacttactgagggattctacctcggatactacatgcttgacaatatcaagttccaaccccctgaagaagagagcatcaaagatgaggttgtagtcattggtagaacagaggatgttcctaagtttgggacaacccaacccattagggtgaagaggctgtctgaggaagacgactggtactacttcaaggcgcttgcctttggaattatggatcctgatgagcatccaaaactagcatctctggccatgcagctatgtcacgcacgtgggccaggttggaatgcagagaatcttattattcgtaagagaggtgggcaggtggcacagaagcacttgtcttcctctggtgtacaccctgactatcttttcgaaagaaataccccagttgatttcagcaggatagcctttgtggatggtcaagttcaaggtttcctagtttatgatgttagggtggcttcccctgcagaagaggccatcctgcaaaatccagcattcattttggaagactcttctacttctctccttccaaatattccaacatgtaatgcatccaaatattattttctagttctttttgcatggctctatttttttctgatagctggtaagaacaataggcaacagacaaggagatag

SEQ ID NO: 6968 - DNA, 467 bp, Oryza sativa
  unsure (1)..(467): unsure at all n locations
  Clone ID: PAT_MRT4530_13607C.1
ctagttctaaaccgccttcttccagcgcacaaccccttctcgcctgtctgtcttcctccgcccctctctcccctctcccatggcgcatcaagatcattaacccaccaaaccaaggtttatatatggttgcgtgcgtcgtctccactgcagcagccagcgcagctcggcgagatcgatcgcgcggcggcggggcgccgcgtgcacgccggaattgaagccgagcgcgcgcgcgctagagctagctagacacacagataggcggatcgatcgccttgtagcccttggtaagcttggaggatcggcaaggaggccgggaggtagctagctagctagcctctaggcgagatggcggcggctgcggcggcggcggctcggccgacgatgccgtaccggtcgcggttcggcgacacgacgctgacgaaggtgttcgtcggcgggctggcgtgggagacgccgncggagggact

SEQ ID NO: 6969 - DNA, 655 bp, Oryza sativa
  Clone ID: PAT_MRT4530_13608C.1
atggcaatgcctttgggtgtcgtgatcttccttgggggcattgttgacactcgtcatcgggttcgcacaagggatgagtggatcttcttctctctcgccctcttccttggcaaacccttctccatgggggcccatgtaggatcaaggaggccgactagagggggggtgaataggcgagacgagggatttttcaccgaggttcggaaactcgccggtttcctaatccccgttgaggcgagcccaactccaccgctcaaccacgaagccaccgcacgccccatttgtcaaggggtgggcaagcgccaggcctcctccacaatctcctcggagaggtcaccgggcaacacctccacaagccgtctaggaggcggcaacctccaacaggcaatcattgagcccactcaacctggccggtctgaccgcagtgtagtggtcggtcagaccgtccacggctcggtcagaccgccatcggctcggtctgaccagttgcggctctggcggctctgtatcgccaccaaaaaccagaccagtgcaacagaccaatagggccggtcagaccggccttaccacgccggtcagaccggctaacagcccttagccttgcgccatccaacttggggtcaatgcttgagccaacatcaacacttgtgaccat

SEQ ID NO: 6970 - DNA, 1439 bp, Oryza sativa
  Clone ID: PAT_MRT4530_13609C.1
ttatcttctttctcttcttatcttctcttcctttcctcctctcactcccagccctctccttctcctcctcctcctcctcctggcctcctcccctgggcgctcccctttcctccccatccccttcctcccctcccctcgcccctcccaccggcggcggcggccacgggcagccgagcccgctcccagaccggagcggcgggcgaccgggcgggcggtcgagccccctcccagatccgggcggccggcgaggcggcgggcggtggcgctccccgggcggcggcagagcccgaggcggcaacgtgggcgggcgggcgggcagccggtgaggccggcgaggcggcgggtgacggcggagcaaggtgagggtgcgttggcattgtagatctggtcagcagacgtgagccccatgagaatattgtcagcaacgacgatgttgagaaggcagtggtagtcagcaaaggcgagaagaggcaaaatcatcaacccctccccatctccccgcacttcatttccacctaagcaggttggatttggccgcacgggcatgagcgagccgccaatgacaatgcccgcaagcgagatggtgacaatgtgtccgtatgttccgcagatctgtggagaacatgcagatttatggagacgccgctgcccctcaattgccactactggcgcgtggaggccgacgagcaggacagcaccttggcggcgaggcgtggacgagcgagcgaagcgggctggcggagcagaggaggagcggcggcgggcgagctcctcgccctcgcagggcttcatcgtcgaggagaggtcgcaatccatcgtcttcgcagggcgtcgcgcggcgaggttcggcggcggcgagtagtaatcgttgcacagcgtgaacccgagatcatcgtcgaactccttgaagccgtcgtggcaggcgacatggtggtagctcctcgccggccgctgcatgaaggagaccacgacggagcgctcaaccacgaagccaccgcacgcccccttcgtcaaggggtaggcaaggcgggagccggcccacagagaggacatccacggctcggtcagaccgccgtcggctcggtctgaccggttgcggctctggcggctctgtatcgccaccaaaaatcataccagtgcaacagaccagtggggccggtcagaccggccttaccacgccggtcagaccggctaatagatccggtcagaccgtcctaaggcctacggtcagactgcaggtcacttttcagcacaaccaaccgttagtaaaacggcgatatctcttgactcggatctcagaatttgacgttcttggactctatggaaagcttattcaaagggccatccaacccatgaaaaatccatccaagaaacacaacttttctcagggagaaagggctcacaccccaaaggatactccaccggacataaccacatga

SEQ ID NO: 6971 - DNA, 147 bp, Oryza sativa
  Clone ID: PAT_MRT4530_1360C.1
atggggtgtaggtggagtggacgggcgcgctggcactggcggagagcggccgttatggtgacagggacggcgggggcatcgaggtcagggtggtgctactgtgcgggatccggtggggatggaatcgaagaggacaacatggcatga

SEQ ID NO: 6972 - DNA, 377 bp, Oryza sativa
  Clone ID: PAT_MRT4530_13610C.1
aagaagtactggggcctagaaggaacgagcaactcgagaccaggcaaaggacacggaccggacggtgagggaaaggatctacctgcagtcgctgccggcggctgaggccgcggccagggcgaaggagtcggcccaggacatcatcaacctcaagccgatcatcgagaagaagcagtggcacgacgtcagggacgacctgcgccttaggggctattacctgtgctacgaccttaaaatcgttatcaactctaagcccaaggaccagaagaagggcctcaaggaccttaccggcaagctattggccaccatggactgacttgaccatgcagtcaagaacatgagcccagaacaggcggagacgtactacactgcgacca

SEQ ID NO: 6973 - DNA, 624 bp, Oryza sativa
  Clone ID: PAT_MRT4530_13611C.1
cacgaggctccctcacactctcactcgtatcgaagcaggaagctagaggctagagctaatgcagagggacagatggcgcagcgcgcgtctcgccgtcccgccgcggcggcggcagcagtcgtcgtggccgtcgtgctcgccgtgagcggaggcgtcggcgcgacgccggagacggcgtgcagggcggcggcggaggaggacaggcgcgtggactacgagttctgcgtgtcgcggctgagccaccaccacgacagccccgacgcggacacgtgggggctggccaaggtggcggccgacgtcggcgtctgcatcgccggcgacgcggcgtacgacgccaaggcgaagctgcaggccgccaaggcgggcggcgagcgggaggcgctggagcggtgcgcggagctgtacgaccggatggggtcggcgttcgcggcggcttacgacgacatcaaccggcgcgagtacgcggcggggaaggagaaggccggggaggcggcgtcgctcgcgcggcggtgcgacggcgccttcgccgacgccggcgtcgccccgtcgccgctcgagcggcagaccgcggagtccgtcaagatcgccatcgtctgcacggccatcaccaacctcgtcaagtag

SEQ ID NO: 6974 - DNA, 788 bp, Oryza sativa
  unsure (1)..(788): unsure at all n locations
  Clone ID: PAT_MRT4530_13612C.1
gcgttcggggnaacttgtgcccngagacattatatttggattgctgacgaagcgtcttgaggagggatacaataagggtgaaactggattcatccttgatgggatcccacgcactcatatgcaggcggagattctcgatgagattgtggatatcgacttggttctgaacttcaaatgtgctgataactgttttatgaagaggcggtttggtggtgacatctgcccccactgtggacagctttttgattttagcaaaactgcgtcttcagaccgtaatccgagccttgggagctgtacatggccttctcaggtgcaacatgctgcagttttaggtctggaggactcgagaatggagaagatgcgtgcttatgctgaacagaccaagctactggaagactactacaggaaacagagaaaacttatggaattgaagacatcagctcgccctggagaaacatggcagggacttgtcgctgccctacatctccagcatctggatgcatccccgacgccgcacaaactcactatgtaaatatcgtttgtgtgttgtctgagaaagatcaaagaacttgagtctaaggatctagattgtgatcctagcctgcaacatatgtagtattcctatcctatgtttgtggattctgacttctgaggagtcagccggctgtcatttttgtctctctgttttcatagatataaatgtaagcgattttgcggacgcacttatatgtttgtaatgaagaatactggacttgcgagtgcaagtataccagcttgttttcctcctt

SEQ ID NO: 6975 - DNA, 505 bp, Oryza sativa
  Clone ID: PAT_MRT4530_13613C.1
cactataaaagcactgtcgccgcacgcagcgcgcacgcgagcgcggggcccctatagcgcgcgcccccttttttttttttgttttttttttttttttttttttttttttttttttttttttttttttttttttttttttttggccccccaacccaaggaaaaaaacctttcaagcccctaaggggaaccaaaccaaaccgttttaagggaccccgcccaaggggcataaaggtaaagggttagcccaacataccagggggacgcccgggcaagggaaggggggaatttcattaccccgttatgcctcccaagggcccctggttcttaaagggattacgggccaccctttgggggaccacaactccctggggggggtggatttttcacaacccaggggggctccataatgccaccaaaagaaagcctcttggtggaaaccttccccaaaagcttgcaaaagaaatccttagcctttgccaaacccaaagggcgtggggggaacccc

SEQ ID NO: 6976 - DNA, 431 bp, Oryza sativa
  Clone ID: PAT_MRT4530_13614C.1
aaatatgaaagacaacttggtttggatttataggaggcaaaggtgcacatggacatatgatgatatttgagcttatttttaacttacgaaccactatactgttaaaactcattacaagacaccgccaagggtggttatggtacagggagcccagaggacctagggtagataccaaatctagatggcacggttaaagacaacagagagggagcttgagccacattccgatcaaagtagacaacaccaaactgttggagttgcaactggggcgctatggggggaacaacgcaaatgtcctgatagcgagattgttgcgccaccaaagccagctggcgccaaacaggggtgatcctcagttgaaacggagcggaatgaaaaaagggggttgcagatatgccatactgctgccttaggaacaaattatatgggct

SEQ ID NO: 6977 - DNA, 708 bp, Oryza sativa
  Clone ID: PAT_MRT4530_13615C.1
atgaggaataagtgttacagcttgtccttgacagattctcagctagccgatctgacttttcaagggttgatagcaccaatcaaggggaagttttcggctcaagatttggagagtttgtcaaatctcgcacagaaggtgactttgcacgagcagagatttgctgaggccaagaagaacttcacaaagattaaccatgtgtatccatacatgtatggatctgatgatgaagatgatgattccgaagtagaaacagccgaatgggtcagaagtaagaaagtcataccatgccaatgggtgaggagttctggaaaagaggagacgtttgactttgatatcaccaaggctgacaggatttttcatctattacttcgggaaaaacagattcaacttcttgctggtcatgtgatcccttcagccgaagagctaggcaaaagaggatattgcaagaggcataattctggttctcactcaactaatgatggcaaagtctttaggcagcagatccaggagggcatcgaggggggaaagatcaaatttgatgattcaaagaagccgatgaaggttgatggtaatgctttccctgttaatatggtgcatacgtctggaaggacaaccgatggggggaaagaaccgaagttttcagatgaattcggcttggattatcaacaaataccagaggaagtgtcacgcctggaaattcacaaataa

SEQ ID NO: 6978 - DNA, 902 bp, Oryza sativa
  unsure (1)..(902): unsure at all n locations
  Clone ID: PAT_MRT4530_13616C.1
cggacgcgtgggcggacgcgtgggggcgtcccacggatcaagcgaccccctaaaaaaccaaccgaaaaagaaaaaaaaaaaagaagcagagaaaaaagctctcgcggcatggattcgcacgtaggcaagttattcgattcggtgggctcgatcttccgcggcagcgacaccctcccctggtgcgaccgcgacatcatcgctggttgtgagaacgaggttgcggaggctgcgaatgaagaacagaagaatgagagccttatgaggctttcgtgggcgcttgttcactccagacagcctgaggatgtgaaccgcggcattggaatgcttcaagcttctttggacaggtctaccagtccactgcagacaagggagaagctctacttactggctgttggacactacagaactggtgattatacaaggagtcggcagcttttggaaagatgcttagagattcaacctgactggaggcaagctctcactttacaaaggcttgttgaggacaaaaccagaagagacggtatgattggcatggctattgtcactggtgccttcggacttgtgggacttgttgctggtggaatcatcgctgccgcttcttcttcatcctcatcatctaggaagaaatgaggaacccatatcaagtgagtgaggtagtcaagtatgggcaagcaaatcgatgataaataatgcgcattcattgcatgtcaatactatgtatgcaaccgggtaatacatcacagttcatccaatattattcaagtccatatattaccanntgaagattcaaanncaggnnangacatcnnacatgtgcctgcattagattaaacanntcaatggaagaaatgaggaggcnntccaaaaaangaaaaaaangaaaagggcggtgccgactacta

SEQ ID NO: 6979 - DNA, 372 bp, Oryza sativa
  Clone ID: PAT_MRT4530_13617C.1
atgcggtcggattatcccgtgaacgggataatgcgtgcggccgacagcccggcgtcggtccacggatttttccagccggagccacttatgccccgcctggaaactaacggggctggcgtccaagaaaatcaatcctgtagtagtgcatggtcgcctctaccgctcgtcggagtttcatgctcagacctgcttcagtgccgcgcgctcaagcatgagaccgataatggggaagaggcttcgtcattgccgcggcctactgtacaagctgaaggcggcgattcaagggaggtgtacgggggcgagtaccagcgcgccgtcgagaaggcgagggagatcttcttctcgatctttgttgatgtttctgtagcttaa

SEQ ID NO: 6980 - DNA, 1895 bp, Oryza sativa
  Clone ID: PAT_MRT4530_13618C.1
ccgctacacggagccaccaccaccaccaccaccaccatcgcctcgccgccagccagatcctccccctcccccgcgccaatcacatcgcctcctccgattcccaaggattcttcccgctctctttccttccttccccattcatccgcttcttcttcttcttcttattcttctttcttgttccgatcggggattcggatttggggattccgaggcagcggccgcggcggaggcggagagagggagaggatggggtacgtggggcagcacggggtggcgacgctgcggaggtacaagtacagcggcgtcgaccactcgctcgtcgccaagtacatcctccagcccttctggtcacgattcgtcaacctcttcccgctctggttcccgccaaatatgattacactgacaggcttcatgtttctattgacatcggcattccttggctttttttattcccctcatctcgatacagcaccacctagatgggtgcaccttgcacatggaatgcttctcttcctttaccagacttttgatgctgtggatggtaaacaagcaagacgtaccaactcatcaagtcctttaggcgagctatttgaccacggatgtgatgcgcttgcatgtgcttttgaggccttggcttttggaagcacggcaatgtgtggaaaagctaccttctggtattggttcattgctgctgtcccattttactgcgcaacctgggaacactttttcacaaacacactaattcttcctatagtcaacggaccgactgaaggccttatgctaatctatttgtgccattttttcaccttcttcacaggagctgaatggtgggcacaagatttccggaagtcaatacccctactaaactgggtacctcttgttcctgaggtcccagtatatggaattgcactgtttctaatgatagcttttgctgtaattccgacgattggatctaacattcacaatgtgtacaaagtggtcgaggcaagaaaaggaagcatgctgctggcactagcaatgctctttccttttggtttgctgttggccggagttcttgtctggtcctacctatctccttcagatataatgagaaaccagccacatcttctagttattggaactggttttgcatttggctttcttgtgggcagaatgattctggctcacttatgtgatgagcccaaaggcatgtccctagcatatttcccatttgcaattgcaaatgcgctgactgcacggcttgatgatggaacccccttgttgatgagcagctagttctcctaatgtactgcttatttaccgtggctctctacatgcattttgctacatctgttatccatgaaatcaccaatgctctcgggattcattgcttcaggatcactaggaaaaaggcataattgtgaaccatccacaattgccttgctctggttggcaatcatatgttatatttgcgcaaaaaggcaaatattttcaattattcttcatgaagattctgctcttcagatcatatttgcatttgttattcccaggattgctattatccgagattgaaattatcatcagaacttgtgctgataaggaaacgacgtccttggaagagttggattttgtttgttgtatcacctagaacttcaattcagtgatgctcggcaaaactttttttttgggggtacatgttgagcagattggcagatgatacatttgtaatttttacattgtagcatcacctgagatgcaggtgtacaatttatgctaaaaatgatgctcattatgccttacatattattcatgctcttttttttgagagagagagtaaacttatatatacatactattatattctaatagattattgttcctctctccgggtgagctgaaaaaaaaaaaaaaaaaaa

SEQ ID NO: 6981 - DNA, 153 bp, Oryza sativa
  Clone ID: PAT_MRT4530_13619C.1
tataattttgcgatcaaaaagccgctcaacaagctgctgaaagatgcccgaaccgactgtgccaccgctcaagcgatggagcaactgcaaaggcctgcttggtggatgatgtggacggaagcggatagagaccatggcggcgtggccccttaa

SEQ ID NO: 6982 - DNA, 529 bp, Oryza sativa
  Clone ID: PAT_MRT4530_1361C.1
tgcaaactatgcaacagtagtgaagaggccagtcagccagtaattaattaggttcagagagaaatctgcatcatcctcttagataacaagaaatttattctgacagctctccaatttaccttatagtctccttctggtcgcctttgtcatcaagcataatgagctttggtggagagccatagacataacgagcttccacataagggaagtcgtctttatcctcttcgaggaagcccacgatttctggataaaacacaagctttctcatgcacacctcaataattgcaccagagaatgtgagctgcaatagaaaacagacaggtattatgtttaaatccaatggaagcaagctgctatgtggtaagactgaagttcagcacttcagcttggaaaactcggccgataagttagatgttggatatgcacagtacaacatccttaatgaattgtaataacaatatcccatggacataacatgctatttggtacctctaatgtacacgttcaataatccaaatactattcattc

SEQ ID NO: 6983 - DNA, 661 bp, Oryza sativa
  Clone ID: PAT_MRT4530_13620C.1
cttaaaggagccctttgccatgagacaaagtggagcgaagagtgatggagcctccttgatggcaacaacggccatcttcttcttcatggagcttgcatcatcaccaccttcttcctcggacccggatgaggcgaagctctcctcatttgagtcccattccccaatgaaggcctcaatcttcttcccttccttcttaagcttccttccacgaagccaccgcacgcccccttcgtcaaggggtgggcaagaaaactagccgttacagggcaatcattgagcccactcaacctggccgatctgaccgcagtgtagtggccggtcagaccgtccacggctcggtcagaccgccgtcggctcggtctgaccagttgcggctctggcggctctgtatcgccacaaaaaaccagaccagtgcaacagaccaacccggtcagaccggcctaaggcccacggtcagaccgcaggtcacttttcagctcaaccgaccgttagtaaaatgacgatatctcttgactcgggtctcggaatttggagttcttagactctatggaaagcttattcaaagggccatccaaaccatgaaaaatccatccaataaacacaacttaagtcaaggataaagggctcacactccaaaggatatccaccggacatacccaca

SEQ ID NO: 6984 - DNA, 741 bp, Oryza sativa
  Clone ID: PAT_MRT4530_13621C.1
ccggccgggacacactctgcagctgctatcatctcacattctccattccggtgcccctacgtctgacggtctctttcgtcccgtgctcttactcaaggcataatctcttgccgcatctgtttcctgccgtaacaaccactccattctaacaaagtctcctgactctttttccagtctactctttcttccgatggctaccagggaacattgtctcgcttgcttcgaggcactcgatgctcacctcaataaccgaaaggccctggctctggaagaaatccaggaactctcggctcacacgcccgagtcggggctcacgtcgcccaaagctctcgacgatctcagtcttcagcatctcgcagtccctgacgccagtgcttcatcctcctcttcatcgacctcgctaggtgcctcgacacccgctacaagtacttcttctctgcctatccctccaagctccgccccactgttcgtgacatggaacaccatggatgatggcgaacccatgctgcgcggctgcatcggcacctttgaatcacaagatctatccgaaggcatccccgaatacgctctcatctctgccctccacgactcccgcttctctcccgtaagaaattcagagctgccgacgctgcaggtcgcagtcacgctactcaccgactttgaagaagttgacgacatctttgactgggagatcggcgtccatggcatccggctctccttcacgaccgcggccgtcgctac

SEQ ID NO: 6985 - DNA, 572 bp, Oryza sativa
  unsure (1)..(572): unsure at all n locations
  Clone ID: PAT_MRT4530_13622C.1
agccccattagatctcntctgtagaccaattgttaacacggtcagaccgccatagagtggccggtcagactggactactttgtaatggctagaaaactagctgttacagggcaatcattgagcccactcaacctggccggtctgatcgcagtgtagtggccggtcagaccgtccaccgctcggtcagaccgtcgtcggctcggtctgaccggttgcggctctggcggctttgtatcgccaccgaaaaccagaccagtgcaacagaccagtggggccggtcagaccggccttaccacgctggtcagaccggctaacagccccggtcagaccgacctaaggcccacggtcagaccgcatttcacttttcagccaaccagccgttagtaaaacggcgatatctcttgactcggatatcgtaatttgacgttcttgtactctatggaaagcttattcaaagggctatccaacccatgaacaatccatccaagaaacacaacttttctcagggagaaagggctcacactccaaaagatactccaccggacaaaaccatatgaggctacccaaaccta

SEQ ID NO: 6986 - DNA, 626 bp, Oryza sativa
  Clone ID: PAT_MRT4530_13623C.1
taaaactattcgaatagccgtgaccgcgcgagcccaactccaccgctcaaccacgaagccaccgcacgccccctttgtcaagggaaactagccgttggaaccgaaatccccaactttgtgctctgccggtcagaccaccgttgtgaggccggtcagaccggactacttctagccgttacagggcaatcattgagcccactcaacctggccggtctgaccgcagtgtagtggttggtcagaccgtccacggctcggtcagaccgccgtcggctcggtctgaccggttgcggctctggcggctctgtatcgccaccaaaaactagaccagtgcaacagaccagtggggccggtcatactggccttaccacgccggccggtcagaccggcctaaggcccacggtcagaccgcaggtcacttttcagctcaaccgaccgttagtaaaacggcgatatctcttgactcgggtctcagaatttggcgttcttggactctatggaaagcttattcaaagggccatccaacccatgaaaaatccatccaagaaacacaacttaagtcaaggataaatggctcacactccaaaggatatccaccggacatacccacaagatgtcactcactccta

SEQ ID NO: 6987 - DNA, 840 bp, Oryza sativa
  Clone ID: PAT_MRT4530_13624C.1
atggcgagatccacgctgtcggtcaagggaggaggtgggcacacacggcagccaagtcaacaccacatccacaaatcgctcgatgcaccgccgctgtgcttgccgatgctttcctcgctgccgtggctcgccggcgagacgttcccgtccatcgcccgtgccgtgcttgccgatgctttcctcgctgccgtggctcaccggcaagacgcgcaatctagggcaagcacatgtgatggcgaggtgagggcgatggcgtgtgcacgggggggcgtggaaggaggcggagctcctgtacgagcggcgcgaccagcggtcactgccgcaccgacggcccagccaccgcagctgccttctgctccgcctcttctgcgtcggcaggttgctgttgccgtcggtgacgatggcgccatggagttctgcttggaggtggtgaactctaaaccactcacaaacggcgccgggcctcctccacaatctcctcggagaggtcaccaggcaacaccgtccatggctcggtcagaccgccgtcggctcggtctgaccggttgcggctctggcggctctgtctcgccaccaaaaaccagaccagtgcaacagaccagcccggtcagaccagcctaaggcccacggtcagaccgcaggtcacttttcagctcaaccgaccgttagtaaaatgacgatatctctttgactcgggtctcagaatttggcattcttggactttatggaaagcttattcaaagggctatccaacccatgaacaatccatccaagaaacacaacttttctcagggagaaagggctcacactccaaaggatactccaccggacataaccaca

SEQ ID NO: 6988 - DNA, 266 bp, Oryza sativa
  unsure (1)..(266): unsure at all n locations
  Clone ID: PAT_MRT4530_13625C.1
caagcctcccccggncganctgtcccttctgctctcgccngcgnngancaagcatgcaagaacgtgcccnggcgccnanaacgaccgcgcggcgcccgcggcncatgaagcancaaatncgcctcngccgcaggncntccccnttncccccngttttccnncttctcnncccnaananannggcccccccntcnctcnagaattcccccntctcctccctnnnctnntntgaancctatcnccctcttcngggnnnccctccgccc

SEQ ID NO: 6989 - DNA, 204 bp, Oryza sativa
  Clone ID: PAT_MRT4530_13626C.1
atggactcttttcttagcgccgatagatccaacatcttggtactaatgacgctgacgtcgacagcctcgttctctagcggccaagatgtagagggccgcgtgccgagacgcatgtccggcatgaggtataccggcacgggcaccgcgcctccagccaccaatcttcgccacatccacccgaatcacgtgccacccgagcactag

SEQ ID NO: 6990 - DNA, 2316 bp, Oryza sativa
  Clone ID: PAT_MRT4530_13627C.1
ttttttttttttttttttttttttttttaagcttgcttgttttttttcaggcaactctcaatttatatattatgctcatctctgttcaagatcaggataaactagaacaaatgggaaccttaggataggcacaagttacaatgcacagcgtgaagtgcagacagataaattacagggagataaatttacaagatcaaaccgaagaaaaagtaaccgtcaaaagcaggagttcagatgcattagcttatgaagcagaagttcagaagcatttgcttatgaccagccaaagacgaagtcgaggatgtagacgacaacgagcgaaagcgggtaaagcatgtacgccaccagacaggtccagagcgggaatgtggttctgaagcttgtgaagagtcccatgatgacacagacgagcagtatgatgagcacctccgatgagaagtcccatgtcaggttcctgatgtagatgagcgccaagaacacgcccaagcacagcgtgttgttcatggtcacaccaccatatacctcagagaaagtaagggaactggtccgtagcttcttcctgctagcgaagatgatggcagacacagcctcgctggagttggtcgccagcgggagggcgatgaacgaaatgaagaaggatgggatgtgcgaggcgttggagaagttgtggacagcatcaacaagcgggtctgcgaatgcagcagcaatggcactgccgagaagcaggagtcccacggctttggtgatgcaccagccagggttctcaacgctctcaactgtctcgtcagatctgtccaccagaaggtcgtgttcctgccttgttctcgcatggtaatcagtgatgaacttattggaataggcaccactggtagggacgctgcgcttggcctcattaagccatctcttcatccccgagacaaactctgcctcctcgacgatatcattgcctgacgtgtcaaagtcatccatgatcttgtcaacagcgtcattcttgtcaaagtcaacctcctcaaagttgataccaatgataagtgcatgaagctcagcacgggacagggtttggctctcatccatgtcaatcttgtggaacaacttttttatgacatcttcattgggtgtgccatcctcattaagcagccgcccgagcgcttccatttgggcatgcctgaggattccggagatcacatgcttgtgttttgcgtatgcaagcttcctcttctgaatccatggctggaaaacctgataaaggcaataggcaagcacaagcgagaatgatacgataagtgccagcaagacagctaggcgctgtccgtggtgggtcttcaacattttggggaattgagcaatgataaagggaataacagaaatccccatgatccgagctgcatagctggtttggacatcagttgaaataccagtgccagtcaagctgaagcccttgttgttctgtaaatcaactgcaacgccatttggaccaatgtcacacttgccaacaacaacacaggttccccacagaagggtgagaagaaagacggtcgaaccagcaagcaaccccattccaatcaggacctgactttgtgcggtctctctactcccggacagaccagacacgaggacgaggagcgcgtcggggagggcgccgaggatggggaggaggaggccgccgacgaggccgggccccatgatctcgagcagcagctcactgccggccgacaggaaggtggccgccttgtacatgaggaaacaatacgcgaccaaccggaacaggttcccgagcacggtggtggtgcaggggaggcacccgtacgactcctcgcaattctcctccggggcaccagcagcgcgtcgggaagggcacgcgggatggggaggaggaggccgccgacgaggccgggccccatgatctcgagcagcagctcactgccggccgacaggaaggtggccgccttgtacatgaggaacccatacgcgagcaccaggaacaggttcccgagcacggtggtggtgcaggggaggaacccgtacgactgctcgcacttctcctccggggcggcggccggcggcgaggaggcggaggcggagttggaggtggtgaggcgtatcacggctgacacggggttggagaggagggaggtggcggacgccgaggccggcgagccgtcggagatgaggcgtccgtacgcggcggcggccaggaggaagaggaggagcgggacgagcgggaaggagcggcggcgagtcgccattgcgggaggcggccggaggcgagcctcgtgccgaagtcctgcagcccggggatccactagtttagagcgc

SEQ ID NO: 6991 - DNA, 760 bp, Oryza sativa
  Clone ID: PAT_MRT4530_13628C.1
atggttttgcacaattcaaaacctaaatcaactagtctcaataaatttgcacaaaataaaggagacaagagacaaggaattttcaccgaggttcggaaactcgccggtttcctaatccccgttgaggcgagcccaactccaccgctcaaccacgaagccaccgcacggccccttcgtcaagggaaactagccgttggagtcgaaatccccaactctatgctctgccagtcagaccgccatagagtggacggtcagaccggactactttgtaacggctagaaaactagtagttacagggcaatcattgagcccactcaacctggccggtctgatcgcagtgaagcggccggtcagaccgtccacggctgggtcagaccgccatcggctcggtctgaccggttgcggctctggcggctctgtatcgccaccaaaaaccagaccagtgcaacagaccagtaggaccagtcagaccggccttaccacgccggtcagaccggctaacagccccggtcagaccgacctaaggcccacggtcagaccgctggtcacttttcaacacaactaaccgttagtaagacggcgatatctcttgactcggatctcggaatttggcgttctctgactctatggaaagcttattcaaagggctatccaacccatgaacaatccatccaagaaacacaacttttctcagggagaaatggctcacactccaaaggatactccaccggacataaccacgtgaggctacccaaaccta

SEQ ID NO: 6992 - DNA, 2862 bp, Oryza sativa
  Clone ID: PAT_MRT4530_13629C.1
atgaagatctccgagctctcccccgagtaccgggagccgccgtcgcacgccggcctcatcgccgacctcagcaaggccgtctccgacgtcgagtcgttcgccgcctccgcgacggccccggagaagctcgccgccgatctccgccgcatcctcaccagccttgcctccgccgcgtcctcctcgtccttcaccgagtcgctctcggtccagatatggcggctcgggacccgcctctggaacgcggtggtcgatcgcgccaactccgccgccctcgccgggggtcccgccgcgctcgccgtggaggcggagatccggcaggcggcgccggagctcctgctcctcgccgggatccccaacggtgtcccctccgcggccgcgaaggtcgcctccttcttccaccgctccggcctggcctggcttgacctcggccgcgttgacctcgcctccgcctgcttcgagaaggccacgccgctggtctccgccgccgcaacggaggatcggggcgtcctcctcgagctcaacctcgcgcgtgcccgcgcggcgtcggacgcgggcgatcaagccctcgccgtcgcgctcctgagccggtccaagcccctcgccgccgcatcgccggagggtgccaaatccctcgcccaggggtacctctccatcggcgaggccacgctcgccgcgaagcactcgaatcccgccgtcgaagcgtccactctcttcaccgaagcactagatctctgcgagaaggcggcctctccttccagctccagcccaaggactcccccttacggcggcgccactcctaaaaccccaaatctagaggggctcaagaggcgatgcctccgcttcctcgctctcgagcggctccaagcccaggactacgaaggcgtgctgcgttgcatccgggtctcgagggcatcaatggggctggaggaggagcacccgagcatcggggtcatggcgatgcgcgcgtggatcggaagcgggaacatggcggaggccgacaaggagctcgagcggctgatggccaacgccttagcaacggagaacttgtgcgtgtcggcggcagaggcgtacctcgccgctgcggggcctgaggctgcacgcaaggtgctcattgcgctcgccgcgcgttgccgcgccggaggtgctgctgctgcagtgagggtggtgaagcaggtgatcgacggtggtggcgggggaattgggcgtgcaagggccatcgccgagctcgtgtcggatgagagggtggtcgccctgttcgatggccccgggaacacccatgagcgtggcacaatgcatgcactgctgtggaactgtggcacagagcatttccgcgcgaagaattatgataccagtgcggacttgattgagagatcgatgctttatgtgtctcgtgatgaagaaagcagatcccgccgtgcagattgcttccgagtccttagcatttgccacattgcccttcagcatcttgatcgagccctcgagttcgtcaatgaagcctacaaggttgaacccaatatcaagtgtgcttttctgaaggttaagattaatctgcagaagggggaggaggacgaggcattcaagcagatgaagacgatggtgggctgtgttgacttcaaccctgagttcttaacactcactgctcatgaagctatgtcctgcaagtcttttggtgtggcagttgcttcgttgagctatcttcttggcctctattctgctgagaggccaatgccaatgcctgaggttgctgttctgcgcaaccttattgagctcctctctcgtgagccagggactgaagctgagatcctgaagtactcaagacgtgccaagcaacggatggctgatcttggtgtggaaagcttttttggcagtggaattgttggggggcgtgaactgaattggtttgctgaccttagctggaatatgggtttaagggcgtcaaaggagaagaagtacaattttggcgctgagttttttgagcttgcagcagagttcttcagctcacgtaatgctgaatgtgatgaaaatcggtccaaggtttgcaaagcattgatcatggctgtcactatcatgctcaatgctgaggagctaaacaattctccgttgtcagattctgacattaaaaaaggtgttgagatgctaagcagagctggaaagctattgcccttgatttcaccctccgttccagtggcttctgatcagttggaggccaacaacttcctgtaccttcacaccttcaactcctaccaactcatgggcaggatggggacccctgcacatcctcagcagctacaactgatcaagaattttgcttcctctaaagcatgcacacctgctaatcttcttacacttggtgtaacagcttctaaaggggccctacctaacatgctggctgctgaattttccctgaaggcctgcatcaccactgcccttgcttcacaatcgccaaactacagggtaatcagctgtgcactcaggaagctagcctgtctcgctggcttacaagacctaaatggtagcaagagtgatgcagcctatgatgtatttcaacaagcctaccagattgtggttggactgaaagagggtgaatacccagttgaggaaggccagtggcttgtagcaaccgcctggaacatgtcatgtttgcctttacggcttcaccaagctaaagtggctagaaaatggatgaaaatggggttagatctggctcggcatcttgagggcatgaaggagcgtatagcatccatgcagacgacctttgagaactttgagagggtgtctggtgatgaacctgatgagtgtagtcaggaagaggcaccaaaagccagtatttctggtagcatgtctcaacctgttctagtttag

SEQ ID NO: 6993 - DNA, 372 bp, Oryza sativa
  Clone ID: PAT_MRT4530_1362C.1
atggccgccggatttggaggagagaaaactacctccgccgcagcctacgcttcccaccgcaactgccggcgcgatgagaggaaaccgtcggctccgccgactctgccgacgccggcgcgatgggaggaaacaacagcaactccccgcaccccccccttcgccacggatttcgccggagattcacgccgcctccgccacagatttcgccggagattcacgccgcctccgccacggatttcgtcggagattcacgccgcctccgccacggatttcgccagagattcacgccacctccgcctctctcactctccgcctctctctctctctctctccttatctgacttcaaccctcacgatggcaaagagcagtag

SEQ ID NO: 6994 - DNA, 760 bp, Oryza sativa
  Clone ID: PAT_MRT4530_13630C.1
tatgggctcaaatatgtctctatgaatgtaaatagcacaaatataaatgcaacaaataaatgagacaagagacaagaaatttttcaccgaggttcggaaactcgctggtttcctaatccccgttgaggcgagcccaactccaccgctcaaccacgaagccaccgcacgcccccttcgtcaagggaaactagccgttggaaccgaaatccccaactttgtgctctgtcggtcagaccgccgttgtgaggccggtcagaccggactactttgtaacggctagaaaactagccgttacagggaaatcattgagcccactcaacctggccggtctgaccgcagtgtagtggccagtcagatcgtccacggctcggtcagaccgccgtcggctcggtttgaccggttgcggctctggcggctctgtatcgccaccaaaaaccagaccagtgcaacagactagtggggctggtcagaccggccttaccacgccggtcagaccggctaacagacccggtcagaccggcctaaggcccacggtcagaccgtaggtcacttgtcagctcaaccgaccgttagtaaaacgacgatatctcttgactcgggtctcggaatttggcgttcttggactctatggaaagcttattcaaagggccatccaacccatgaaaaatccatccaagaaacacaacttaagtcaaggataaagggctcacactccaaaggatatccaccggacatacccacaagatgtcactcactccta

SEQ ID NO: 6995 - DNA, 760 bp, Oryza sativa
  Clone ID: PAT_MRT4530_13631C.1
atggttttgcacaattcaaaacctaaatcaactagtctcaataaatttgcacaaaataaaggagacaagagacaaggaattttcaccgaggttcggaaacttgccggtttcctaatccccgttgaggcgagcccaactccaccgctcaaccacgaagccatcgcacgcccccttcgtcaaagggggcaagccgttggaaccgaaatccccaactctgtgctccgccgatcagaccgctgttgtgaggccggtcagaccggactactttgtaacggctagaaaactagccgttacagggcaatcattgagcccactcaacttggtcggtctgaccgcagtgtagaggccggtcagaccgtccacggctcggtcagaccgtcatcggctcggactgaccggttgcggctctggtggctctgtatcgccaccataaaccagaccagtgcaacagaccattgaagccggtcagaccggccttatcacgccggtcagaccggctaacaggcctggtcaaaccgtcctaaggcccacggtcagaccgcaggtcacttttcagcacaaccaaccgttagtaaaacggcgatatttcttgacacgggtctcggaatttggcgttcttggactctatggaaagcttattcaaagggctatccaacccatgaacaatccatccaagaaacacaacttttctcagggaaaaagggctcacactccaaaggatactccaccggacataaccacatgaggctacccaaaccta

SEQ ID NO: 6996 - DNA, 786 bp, Oryza sativa
  Clone ID: PAT_MRT4530_13632C.1
ggtgaccgcttccaagggggcgatgaaccccctactcgccaagttagccacactgatgggagatgagtacaagaagctcaaaggcgtgagaaaggagatagtttttctcaacagtgagctgagcaccatgaatgcgctacttgaggagctagccgatagggatgagattggaggaaccatatcagggagatggtctccgatattgaggactgcatcgatgacttcatgcaccgcgcagtatcagatcataaaggagccaagccaagttttcttcacaagactgctcaccgtctcaacacactgagggcaaccaaatccaagagattaaggctcgagtattggaggcgaataaacggcgcataaggtacatgccgacaattgtgtccctacttctgttgttcccattgatcctcgactgtccgcactctacacggagacatccagccttgtgggtattcatgacccaaaggcgaaccttatcaaatggttaatgggtgatgaacaagaaaggaatgtggtatctgttgtgggacttggaggtttaggtaaaaccacacttgtcaaggaagtgtaccgtgatattggagggaagttcgactgtaaggcatttgtatcagtttcccaaagacctgatatgacagctcttctcatcagcataattttacaaattgggcggcaaaagtcttctcactcctgcagtatgaaggacctcatcgacagcctaagagaatctctgcagcataagaggtacttggctcttacggccaaagctggcacgagcctgac

SEQ ID NO: 6997 - DNA, 117 bp, Oryza sativa
  Clone ID: PAT_MRT4530_13633C.1
gagccgacgccgcccggctatattcccggtggtgtttatcccgtcatggcctcgggtcatgacaagggacttagtattgttggtgtgaagatcaggattgttcatttccaaaacact

SEQ ID NO: 6998 - DNA, 560 bp, Oryza sativa
  Clone ID: PAT_MRT4530_13634C.1
atgcaacaaataaatgagacaagagacaaggaatttttcaccgaggttcggaaactctccggtttcctaatccccgttgaggcgagcccaactccaccgctcaaccacgaagccaccgcacgcccccttcgtcaaggggtgggcaagaaaactagccgttacagggcaatcattgagcccagtcaacctggccggtctgaccgcagtgtagtggccggtcagaccgtccacggctcggtcagaccgccgtcggctcggtctgaccggttgcggctctggcggctctgtatcactaccaaaaaccagaccagtgcaacagaccaacccggtcagaccgtcctaaggcccacggtcagaccgcaggtaacttttcagctcaaccgaccgttagtaaaacggcgatatctcttgactcgggtctcggaatttggcgttcttggactctatggaaagcttattcaaagggccatccaacccatgaaaaatccatccaagaaacacaacttaagtcaaggataaagggctcacactccaaaggatattcaccggacatacccaca

SEQ ID NO: 6999 - DNA, 1362 bp, Oryza sativa
  Clone ID: PAT_MRT4530_13635C.1
ccccggcgggcatcagcacttcctcactagcaatatatagagacatagctgcgagttggcattagctcatcgatggcaggtgctcctcgaggactagttctcctcggcgtttgtgccgtcttgatgggggtcgccgtcgggggggacggcggcgtcggtggcctgtcggcacggccaagtgcgccgactgcacccggaagaacatgaaagctgagggtgctttcaagaacctccaagtggcgagaacggtagaagagcccacgcggagaagtacgagagcaaggcctgcccggaaagcccgcgtcgcaccggaccctcttcagcgtccccctccgacgcccgaccttcacaggctccgaactgcatcgctccagctgccaccacggcccaaacaacgagcctatggccctggctcaggtagccatccaagatgcgtggccaactcgtcggagagggcacctttcgtcgcccattgccggcaagacacactaccccttgcagcgttgtgcgcgtcagcgaccgatctgcggtccccatcaagaagaagatcaatagaccacttcccacaagaagccggtgccacccaagccggagccgaacgccggagccacgcaagcctcaagcctgagccggaacacaccaatcctcgaccaaatccacaagaaggagaagcacttcttcgaccaaccttccacgagaaaccagtgccacctaagccagagcccaagccagagcccaagccagagcctaagccgcagcctgcgccggagtaccataacccgagcccttggtgaaaataactgatatagatgatccgcaatggacttttaacaatgccgtgcttgtccccttgttagattgtgctgtataataacagtttgagtttggagtcttggattagatttcattgacattgagttttatttctgtactaattatcaatttcttcactatcaaatgcagttatatatggtaagataaaaaaaataaatttaaacagtactgttgtggcggactattcactgtatcagccaaagccattggatcgtaagaggttacattggttaaagaaaaagttatttttatctgaaaaaaaaaaaaaccggcgaattaagcaatggaagtttgcatgcatgcatggttcgtttggttagtacgtttggtgttgttgcatatgatttcctgtcatgtcagtttgtctgcagaataatggttttctttgatgcattagcttttactcacaagtttaatttgtgtgtgtgtgtctatttgtttggtatcagcaagtaattaatataatcagggatgtgcataatatatgtgcaacttgtttgatctcaaaaaaaaaaaaaaaaaaaaaaa

SEQ ID NO: 7000 - DNA, 101 bp, Oryza sativa
  Clone ID: PAT_MRT4530_13636C.1
ccagtgacatccttgaggtcacatgctcgtgtgctgctagccgctactgcaagcaccaccacgacgtccctccagcatcgagctcaccagatccaggatga

SEQ ID NO: 7001 - DNA, 312 bp, Oryza sativa
  Clone ID: PAT_MRT4530_13637C.1
atggaggagagagagggcgacgccgcgagctcgatgccagcgaggagaagggggagagggcggccggggaaggaaggaaaccggccgggaggtccggccgccatcaatggcgccggcgagatttgcgggagcaaatccggccgtttgaatctcgtcttcacgttcccaagtagcttcttcctcggcgtgattgctccattgaaccttgcaaaaacggatgacccggttcctagtcctgcgctccatgctgtccagaatcttcattggcttctctacataggtcaagtcttcgcgaacttcaatttgctctga

SEQ ID NO: 7002 - DNA, 664 bp, Oryza sativa
  Clone ID: PAT_MRT4530_13638C.1
aggagtaaacgatcaacattttcaccaaattaggagtaaatgatcaacatgtcactgtatgggtaaaaaaaattacacatccacaggcaaaaaaaaaaaagagaaggaaacatgaagctaaatccacaatgtgtcggcgtgactgcttggtacgtgttggatctggtgttgagggagcagtcggcagaggccacttcgtcggtgcatcaatcttccccagcggcgagcagaggggcaagccgtgttgatggatagaaaaattacgcatttgtcatctccagcatgaatttaagcacctcttcaattctgatttctaaactggataaagagattccacttgaaatcattcttgcaagcagcagggttaggcttcataatcctgatcagcaagtgcagctaatctatggactggttgcactgcttcccagcaatatctggcactatattttcagtggatggttccatgcacacaatatgttaatatacctgtgaacttaggctgtgtttgaggagaaggaaatagagaagattgggaagatatgcaaaacgaggtgagccattagcacatgattaattgagtattaactattttaaacttaaaaaatggattaattatgattttttaaagcaactttcctatagaaaaattttgcgaaaacgcacg

SEQ ID NO: 7003 - DNA, 192 bp, Oryza sativa
  Clone ID: PAT_MRT4530_13639C.1
atgggggcactcggagtaggtggcggcggtggtcggagcgagtcgtcgcggtggcacaccaacgtcggtggcgtggtctccaagggcggcgaccgaagagaccagaggccccgcccagtggaagaggaggcggaggcggcaatggctcgactagcgaaaagtagccacgtggaggcctgggaagcgatatag

SEQ ID NO: 7004 - DNA, 294 bp, Oryza sativa
  Clone ID: PAT_MRT4530_1363C.1
tgattatctagccgataggacaaactttaatatagcagccttcattaggaaaagggaactgctacattgcttatgtgggtttacttcagcaacataagttacttcaattctctttacaagaggtggctatcgaaaaccgaaccagataaatctattttatttgggcaacaaatatgttaatgttttcttttatctaaccttgtatattggtttggttgatcaatatgcacgccgcggtggctgcttgacgccagcggcacggttgatcattgtcgtttcagttatggattattt

SEQ ID NO: 7005 - DNA, 437 bp, Oryza sativa
  Clone ID: PAT_MRT4530_13640C.1
cacttttggttttgtttttttttttttttttgttttttttttttttttttttttttttttttttatatcatgagagggggaattacaagaaaagggcccaaagaaccaagggacgggggggggaacagcgaagacaagggcaaccaaaccaacagaccggcaccccaacacaaaaaatgggcagagcgggcccaaggcaagggaggggcccacaaagggaaaccccctcgagccggcagggaaacaaaccccggaccagaccccccccctggccccccaggggcccccagccgcccaccaaactgaaaccaacggagccctatggaagcccaacaccgggcccacaagggagaaaaaggaccggaaacccaagaacccggggcccggcccaaaaagggcagcgggccccagcaccgccggggaagcaaagcccccaa

SEQ ID NO: 7006 - DNA, 609 bp, Oryza sativa
  unsure (1)..(609): unsure at all n locations
  Clone ID: PAT_MRT4530_13641C.1
nnttttnnnnntgtgtgttttttttttttaaattcatccataaaagaattgcataaagtagatcacgctcacttgagtaccaagagttcgcatcattgatcgagtacagcaagggcaattagcaacgataataacattgtatgacaaacagatccactgtcacagaaagaatttattcttcagcgttgaccacaaaatccagccagataacagcaagtttcaggtacaacggctcgcaagaaaggcaagaacatttttgaaacatctgtaggaagaactatgtcaccatggcaccaaatgtttattcatcatctgtgcggacagtcggcttctcctgcttgccgtcggcccacttggagatggcgaagtggaccttctcgcgggaggcggcctcggacttgtggggctccttgaggcaccggcgcaccagggcggcgcagacgttggagtagccgatgtaggtcatccccgccgcgcgccagaagggaaccgccgccgtcgtcgccgacatcgtcgctgccgatctcctccgctgctcgcgccgccgccgccggtgtgggatggggaatgggggaatggggaaggaggaggagtgcgtctgctggtggt

SEQ ID NO: 7007 - DNA, 415 bp, Oryza sativa
  unsure (1)..(415): unsure at all n locations
  Clone ID: PAT_MRT4530_13642C.1
gtagagggcaatggagtggctgctaagctcagggtggttttgattgcctaatcgtggtnatcactgttncaaaatactcctttacaaatgtgcctttcctggatgatgttgccaataacagtgaaaaatggtgggtacatacatcataactctgtagatggctcttcacaaacagaacttttggctgtatggtcatggtctatattattctattaaggatatagtcaagattacgattatacatatggttagtaatcattggaactaaaggttttaatatgaaatgctttggttagtaaacatggtactaatggatgcttctattggagaatacttcaaataccaaacagtacgcgtataaacttctgccatttattggagaaaaatcttctacagaagatgctgctcatttctg

SEQ ID NO: 7008 - DNA, 348 bp, Oryza sativa
  Clone ID: PAT_MRT4530_13643C.1
tttgtttttttttttttttttgttttttttttttttttttttttaattcttttttttttttttttgggaaaacacatcaaggttataaacccggaaccattttcgggaaaaaacccctttcctaatacagggaagagagccttccttaaaaagggggggttaagtgaactcctaaggccacctttctgaaaggacctagcctaaaggcaaaaaagggggaacggcgacaggggtttgcggggaacccaaaaagaattgcaccccggggccaaaaaagatagggccacgccgtttgacaaaccggaaacccccaaaggctgcctccacggaaacgggccaaaaccgggg

SEQ ID NO: 7009 - DNA, 480 bp, Oryza sativa
  Clone ID: PAT_MRT4530_13644C.1
gtcgacatgcaaagtcatcgatatttagtatatgttgctgctttgttctctccactcatcatatcaatttatattttaaggtgtagatctgatattaacttactattaatatatagatcatagttacaatcagtacgggttaggtcaggatttgtaggtagcctccccttgaacgagtatgcctttgcagcaagtttcctcatcataaaaccttttagcaagaatgaagagccgcctctgctgtagtgatgtggctctcttctacaggcaggcagctcttagacttaactgaaaaacctcccctcagatatactccaacagcgaccgcctatgaaaaacctgcacaggttttccaatgacaccaccaatcacagcaagtaaagcaccaatatctctttgcagaggcagtgcttagtaactaaaccaacacaaattcaaagtcacaaaagaaagacacaaggaatgctacttttcaaagat

SEQ ID NO: 7010 - DNA, 199 bp, Oryza sativa
  Clone ID: PAT_MRT4530_13645C.1
gagccgatgcggcagtggtggagggaggcaccgcgcggaaggggaaggaggcggcgatgaaggcggagaaaattgcgtggtggaggttgggaggaaatcacgtgattttgtttctgtatccgagtcgtggtatcccagtgtgggcaaggcgatggtgggaggtgggaccgtgggagtgccgtgggacgctgtgggtggg

SEQ ID NO: 7011 - DNA, 312 bp, Oryza sativa
  unsure (1)..(312): unsure at all n locations
  Clone ID: PAT_MRT4530_13646C.1
gccaacagataacagtactatctgttctgttcacatgattattgtttttttaaaaaaaataaaacaaaactgcagtatagaatactactacctgcgtttcaggtgataagactttctaaggcccttcacagtgtaccaccgtggcgggctgctttaacctctccacataggctgtgtgatgtcgtggaggagagagggtgtgggccctcgttccttcgctaaggctttcgtcccttaacaaggacgcgaggaactcacttgaaaaagctaanacatatgcttcaaaagctgnaacagacacatgtgcagagc

SEQ ID NO: 7012 - DNA, 366 bp, Oryza sativa
  Clone ID: PAT_MRT4530_13647C.1
atgcggctccatccgtcgcggcaaccccaacgcatctccgcgtggctcgccatgcccacaccgtcgcgcgcgaggggagctatccgcctcaaaccgcgttgggctccatggcggcagtgctgcctagccgagctcccgcatcatctcgtgccgccacagcctcccaagctcccgtcgatgtgcctagcgaggtggagaggaggctggggcccaagccggtggttgccgccttctcgcctcccaactgccaccgtctcccccatggctgtcgtagatcgacggccacctaccatagccgcggagcgtgccagcgagcatgctatggaggcagtggcgaacccagaacaaaagttaccgggggtctaa

SEQ ID NO: 7013 - DNA, 1089 bp, Oryza sativa
  Clone ID: PAT_MRT4530_13648C.1
atggagctggggttgagcttgggggaggctatggcggatgctgggagggagctggttcttgggcttgggatggggaggagggaggaggcggcggaggcggggaggagggatcatgaggtgaggagggagctggagttcgggtcgatgtcgagcaggtgcggtggttcttcgccggagccgacggtgcggctcacgcttctgcccatggtgcccggccttggcctcccatggccgccgccgccgccgccgtcgtccgagagcaggcatttggaggcgtcgacgcggggattcgacgtgaaccgcccgccgtcgtccggcggcggcggcggcggcggcggcgcggaggaggagcaggacgacgtggccggggcggcactctcgtcgtcccccaacaacagcgccggatccttcccgatggatgacttctccgggcacggcctcggcggcaacgacgcggcccctggcggtggcggcggcgaccgctcgtgctcccgcgccagcgacgaggacgacggcggctccgcgcgcaagaagctccgcctctccaaggagcagtccgcgttcctcgaggagagcttcaaggagcacagcaccctaaaccccaagcagaagctggcgctggcgaagcagctcaacctccggccgcgccaggtggaggtgtggttccagaaccgccgcgccaggacgaagctgaagcagacggaggtggactgcgagtacctgaagcggtgctgcgagacgctgacggaggagaaccggcggctgcagaaggagctcgccgagctccgggcgctcaagacggtgcaccccttctacatgcacctcccggcgacgacactctccatgtgcccctcctgcgagcgcgtcgcctccaactccgccccggccaccgcctcctccgccgcaacatcgtcgacggccgcgccgcccgcggcaccctcatccggcggcattgcggccacctcctcctccgccgccgccgccgcggcgccggaccacaggccgtcgtcgttcgccgcgctgttctcgtcgccgcgtggcttcccgctatccgtagccccgcaggcgcagccgccgacgagctcgtga

SEQ ID NO: 7014 - DNA, 720 bp, Oryza sativa
  Clone ID: PAT_MRT4530_13649C.1
atggtcagtctgtccgccgccgtcgctccggccgccggcgtcgtgccgccgcctcaaaaagcccaagctttcgccgtagccgaagcgcatgccccgaccatcccaagaaggcacctcctcctcgcctctgctgcctccacactgcccgcggccgcggccgcggcctctgcctctgccgccgccgcccctagcttcgccgagatccccggctccggcggcgtgaaggccctagacctccgggagggtcccggcgaggtcccggccgacggcgaccaggttgcaatccattactatggaagattggcagcgaagcaaggatggcgctttgattccacctatgatcacaaggacgagaccggtgatccgatgccgtttgtattcaccgtcggagctggaaatattctagatgctccttgcgattttttttatggtattgtcaacttggtcaatgtctcccttttatctgtcatccctccggttatacctggtattgaagcagcagtgaagtccatgagagttggtggtcttcgccgtgtcatcattccaccgtcacagggatatcagaacacatcacaagaacccattcctcctaatttctttgatcggcagagattatttactactatatttaacccaacacgtctggcaaatggcgagggttccactctcggtacactcatcttcgacatcgagctaatcagcataaggcagcattcataa

SEQ ID NO: 7015 - DNA, 192 bp, Oryza sativa
  Clone ID: PAT_MRT4530_1364C.1
gatcgggatagagattattgacctgttcgcgtgggcatgattcactgagacatggaaacgttctcgatccccaggagcgccaggggccaccgaataagatacttgaatcttggtgcctcccattgatgggttgatttggaggtaattccggttttttcctacccttgattactttgtggtccttcccgagac

SEQ ID NO: 7016 - DNA, 1194 bp, Oryza sativa
  Clone ID: PAT_MRT4530_13650C.1
atggagctggggttgagcttgggggaggctatggcggatgctgggagggagctggttcttgggcttgggatggggaggagggaggaggcggcggaggcggggaggagggatcatgaggtgaggagggagctggagttcgggtcgatgtcgagcaggtgcggtggttcttcgccggagccgacggtgcggctcacgcttctgcccatggtgcccggccttggcctcccatggccgccgccgccgccgccgtcgtccgagagcaggcatttggaggcgtcgacgcggggattcgacgtgaaccgcccgccgtcgtccggcggcggcggcggcggcggcggcgcggaggaggagcaggacgacgtggccggggcggcactctcgtcgtcccccaacaacagcgccggatccttcccgatggatgacttctccgggcacggcctcggcggcaacgacgcggcccctggcggtggcggcggcgaccgctcgtgctcccgcgccagcgacgaggacgacggcggctccgcgcgcaagaagctccgcctctccaaggagcagtccgcgttcctcgaggagagcttcaaggagcacagcaccctaaaccccgtaagcttctcttcctctcatcgatcgaacaccatggcgtcgtcgtcgtcgtcgtcgtcgtctcgctctcctaacgttgcgtctcggttgcgttgtgtcgcgagcagaacagaagctgcgctggcgaagcagctcaacctccggccgcgccaggtggaggtgtggttccagaaccgccgcgccaggacgaagctgaagcagacggaggtggactgcgagtacctgaagcggtgctgcgagacgctgacggaggagaaccggcggctgcagaaggagctcgccgagctccgggcgctcaagacggtgcaccccttctacatgcacctcccggcgacgacactctccatgtgcccctcctgcgagcgcgtcgcctccaactccgccccggccaccgcctcctccgccgcaacatcgtcgacggccgcgccgcccgcggcaccctcatccggcggcattgcggccacctcctcctccgccgccgccgccgcggcgccggaccacaggccgtcgtcgttcgccgcgctgttctcgtcgccgcgtggcttcccgctatccgtagccccgcaggcgcagccgccgacgagctcgtga

SEQ ID NO: 7017 - DNA, 275 bp, Oryza sativa
  Clone ID: PAT_MRT4530_13651C.1
cggcatgcgcacgcgcgcgtgcgcgggtcctctttagcgggcgcgccctttttttttgttttttttttttttttttttttttttttttgaaaaagaaaatgatgtccacagcgtcaaataccacacatttcactggggggaagcactcagtttaaacccattctttgaaggcctcggcagaactttattgggtttggaacaaccaggcaatttttgctggcaaagcccccaggaaactgaactatagtttactccactcacccaaggggcgcaca

SEQ ID NO: 7018 - DNA, 635 bp, Oryza sativa
  unsure (1)..(635): unsure at all n locations
  Clone ID: PAT_MRT4530_13652C.1
cccgcgtccggagaactcgcggcggaacagaggaggagagagagcgaaagtgcgaaaccctaaagggggaaaccctatacttggaggtctctcggcgcgagcgatctgctctccgatctgagatggcgtcggcggtgttggagatgctcaagaacctgtgggagtcgcaggtcaccgacgaggagaaccgcgcgttcaactataggatactaaaggctgtaggtctttttgctggatccatcgccgtgatgcataactttggtgaactgatgaacatataaggctgttctgggtggttgagcagggttccatcttccatggcatcattataagatgtccgccttatcatcaggcttgtcgaattttttgtttacttagattgtttttagctttttatggttcaagcacttattgacattcacaacaggagtatttttctgttggatagtcagtgtcaaatttagctgcaataccactgaaatatagtactatcatggaactttggtagacctgtcctatcagaattcattcatctacttctgaatattgctgttctgttattctgagtaatgatgcctactgaaattaggccacgtttattggtgattgacagcaaaaaaaaaaaaaaaccanaa

SEQ ID NO: 7019 - DNA, 2130 bp, Oryza sativa
  Clone ID: PAT_MRT4530_13653C.1
atgtcggaagaaggtggcggtgatttggatgtgatgagtgatctgaagcagcaaggcatggtgcagaggagggtcatccaagatgtgaggaacagcctgtactactcgtccgcaatgtcaatggtgctagagactaatggcggaggagacatggtggcggaggcggagatgaataatggtggaggtggcgcaccatcgtcagtgctggatgagctcctgtgggagaatcggatggagcaggccgtggagcagttgatgcaggaacaggagagtggcgttctggccctgtcgctgtcggcgaggaaggcgatggtcgccgaccgcctcgcgtccgtggcggagcacccgcggacaccgcggccggagctcctccgggcggtggcggggctctgcaggctcggcgaggcgcggcgagcgaaccacctgctcttggggtactaccggcgaagcgtcctccgcggcgtggacgagctgaggcagaagcagaagcagcggaacaacaacatcatcatcatcaaggagctggtgcgcacggtgctgtccaccatcgttgaagcgtcgagaagcgtggtgtcgtcggaggcggcggaggcgaggcggtgggcgagggaggagatggacggtctgggcgtggcgttccgagagttggtgcacatggcagcagctgatggcaagctgtctctgctactggaagctgcaagatgcgccctctcctacggccctctgctgctcctgcttgatgaggagttggccgaatatctgagggagctgctcgcccggtgcatggaggaggcgctggccatgtacgccgcccatctcaggcaggtcctccgcctgctagtgctgcccgttcccgacaacgacgacgacgacgacgacgagggcgcctcctcctccatgttgctggggcgcttcctcctctcgggggtgctgagaacgtcgacgacaaaacacaactgctggtgcctgctcaccacgagcgggaggaagctggttaccctcatgcaggaagtggcggatgacgtctcgccgctgctggagctggatctcgctctcggatccacgctgctccaccttctcgcggatctcttacgagactacatgctcatgcaacttggagcaaccgccgctgccgatgacatgatgatggtctccctcctaatcaactgcaccacgctgctgtccctcttcccgctcatcgcgcgccgtatcttcacaactacatcatctcaacaaccagctgattttcatcatgccactaataataagggggagctccacctccacggcctcatcgtgtccatcaaagaagccgccgcccaagtatggacatgcttctgccaccacttcatacgccacaccatcatgtcaaccaccctacaccacaaaacacacagcagcagcagcatcaggcacggcgccaatatgccttcctctgcttttcaggtgttgttcctacgggtgaggcagctgaatagtctatacggtgccatcttaaccggtgaggatggcaccatgaagaagctgttgcaagagttgatggaggctatcatactcttctacctctctgatgaggacctacatgactcttggatcatccgtcaagcatcccatgctgtcccaatacaggacacgctccttctccagatccagctagacgttcattttctactacaagttgcacagtttggtggcttctcctccgacgatttcagggacaatgcactggattcgctcaggaaagcacaagcgaaggtcgtgccattatcatcatttttggagcagcagcagcacgaggagtgggctgccgatgctgcaaggcacgcaatgcaagtgctgatgatggggtctcaggctgatgaggagaacagcaccgactcagtgcagaaagacgaattagcagctgatgatggtgatgagatgcagccggatgcttgggtcggagcttgcacttgtagcgatggcaagtccagcgatgagttcgtcagcattgaggatgatcaactagccattcactcggagaatgaggccggagctgctgctgctgcacaacaagtcaccatcgaagaagcaacaagtgcacaggccaaggaagagaaaaacagcagttgctcgttgcaggatcgatga

SEQ ID NO: 7020 - DNA, 132 bp, Oryza sativa
  Clone ID: PAT_MRT4530_13654C.1
atggtagttcagctgatgacagatatgattgttgaggaagcgcaggctgcagaaaaaccagaatttgaagttgatttgggcctgaaaagtcataaggaccaactaatacatgttagtgatgctgaccagtga

SEQ ID NO: 7021 - DNA, 344 bp, Oryza sativa
  Clone ID: PAT_MRT4530_13655C.1
cggtggtgctgcttgggggtggcgactatagttagccaaacaagcggcacggcccaggcatggcatggcccgaccaacacaccgagccatgccgtgccggcccatgggctgcactttgtgtgttgggcttggcctgtcgacccatcgtgccgtgctggcccaacgtgccggtgggggggggccaggcatggcctagtggccaggcagggccggcatgggcccgacccccgtcgggccgggccatgcttgggtcgggccaaaatatcgtgccatggaccgggccgtcgggcttcgagccttatggctatctatagtggcgacggtcgcatggcgcggcgcggtac

SEQ ID NO: 7022 - DNA, 2706 bp, Oryza sativa
  Clone ID: PAT_MRT4530_13656C.1
atgtcgcggcaggcacggaaggaggcggcggcggcggcgcaagatatgctgaagttggatgcggctcagatgcgcaagccagctgcatcgcaatctcgaaagggtgcggcggcgccgatgcggaaggcccagggaggagctcgggcggcgtcgatggtgccggagcagagcagttcagggttggcggcgcgtgtgccagagcaccggagttcgagatatggcgcggctagtccaccaccaagctccttcaccgacggcagctgcttcttcaacggcagtgccggcggcttcttcggcaacgccggccaaagccctagtgaccaaaatcagtcagaagatgattactcgactcctatttcagctagggacaatacatatgttaatgttgacagtggtgatgagacacctaggactgagaaaagaatcttttggactcaagaagaagatgttaggatgatgagctcttggctgctcaattcaacggactcaaccgttggtgctgataggaagaatgaacaatattggactgatgttgaggctacttacaatgagactacaccaagtcataggagaagaaatgccaagcaaatcaaggaccgctttcataaggctagaatgatttatacaagtggctataatgatcaaatgtggattgagaaggcccatgtattctatataaaagacaatgagaaactcaatctaggtccttttgtgttgatggaagtatggaacacagttaaaactgaagcaaagtggatcacatacaacaatggcctgaaagcagcaagaaaaagaatagcaacaaaggggttaggcaaggagaaggaaggagaggatagtagccctttatatgtagatgaacttgatgaacagccaagaccaatggggcaaaaaagagctaaaaaactacaatatgcccaaagtaaggaggtggaccatattgatcttgaggagctagacaaatttagtaaactccagaatgaacagaatgcaaataggctgaaagtattggaaatacaacagaagctatcatccgagaagatcgaacaaacaaagatttcccatcttgcagcaaaggagcaaatggaggcagcaaaggtgcaaagagaggcaagaaaattagaggttgaagctaggatgtatgagacatataaccgccttcttgtagttgacacaagtctgatgtccgatgaagagaaggtcttggagaagattgcttgctatgttactgtaaggggtgagaaggcaatgcagcttctggagattggactgaaggcctctggtgcctctggtggcgagcatcctggtggcgacgatgaggggtctggtggcgagttcttcgcctctggtggagatggaggcgatgaagatactgtccttgaagaaatcgatccagcggaagtatatacacttgaagattttctcgccgaagatgaaataatggaatcatttcgaaggaagattggcgataaattgaaggccaaaatcgaaggatcttcttctggtccacctcgtcgtcgccagcgtcaaagtggacctagaaggtacatacctaggccaagagaaaagggacatgaagatttagttgctaattatttttcagcaaatcctatctatactgatgagcagtttcggaggaggtttcggatgaataagcctttgtttcttcgaattgtcaatgccctgtctaactgggatcaattttttacccaaagagttgatgcaacaggtcgagatagccactcacctctccaaaagtgcaccgctgctattcgaatgctaggatatggcacaccagcggacgcactagatgaggtactcaagattgcagcgagcacttctttggaatgtttgggaaaatttgccgtaggaataattgaatgttttggtagcgagtacttgcgtcctccgacaagtgatgaactagaaaaaattttacaagagaatgaagctcgtggctttccaggcatgataggaagtattgattgtatgcattggcaatggaagaattgtccaaaaggttgggcaggaatgtttatcaatggtttcaaaggtaaacctacaatgatccttgaagcggtagcatctcgggaccttcgtatatggcatgctttttttggcaacgccgggtctcaaaatgatatccaagtgttaaacaagtcaccattgttcattcatgcgattaaaggagaagccccccgagtgagttatactgtaaatggaacgcagtatgacacggggtattatcttgccgatggaatatatcccgagtgggctgccttcgtgaagacaataagaaaacctcaaacggagaaacataaattatatgcacaacgacaagaaggggccagaaaggatgtcgagtgtgcatttggcgtgttgcaatcccgttttgatattgtcaaccgtccagcacggttgtggaaaaggaatgatgttgttaatataatgcaagcttgcgttatcctccataatatgatagtggaagatgaaaaggatttggttaaaatcccattggatttgaatgaaaatccaagtgcaaccattgtcctaccaccggaagtgcaaacaaatgacaatcctaatccatgctttgtcgacgtgcttaacagaaactcggctatccgggctgcctctacacatcgacagctcaagaatgatttagttgagcacatatggcagcgatatgggccaagaggaggttag

SEQ ID NO: 7023 - DNA, 1407 bp, Oryza sativa
  Clone ID: PAT_MRT4530_13657C.1
atgtcgtctctgcgcatggttgtccagcaataccccggccaaccggccctgccagcaatgttcatctggctccgcaatggagatattgcagttgcaaagatcaggataatccgtacttgggatgccaaatcagggtggggggaacaacaacaatgccaacaacttcaacttatgggacagctggctgttgggaccaaaacgtctggaacttcggatccctcatcagtggacaacgagccagatcagaccttctccgtcaggaaagcgagaggtggaaagaagagagctacccaggaaattgtgaagcaccgacagagcgagcgtcttgcagcaaaagaagctggtgcctttcagacagtcgctgttaagctcaatcaggtggttgcccaacacaagcttcttgacttcgactcggccaccacaccggaagcactcaaagatcttgctgtcacctgtggtttggatgaccatgacgtccttcagctcaacatggtgctcgctgaggaagaatcgagagtcctgaccccagcggaatttcgtctgagacacttgatacagaataaattcacaacgctgcaaatacaaaaagctgcatactgcaagcagcgagggaaaatccggaaaatcaagtttgggattgaggcccatgacgcctccaatcaccgcaaaaccttccttcgatcaatcaaagtgcagggtgtggaagttgctgatcatgtgtccaaagcttcggttatgcatgattactatcaatcgatcctaggtgtgtcttcaaactcacattgggacttcgatctctctgatctgtaccaagatttgagctggggtcaagaccagctaataacacaattcactcaggctgaaatcctgacagcaatctggcaaatggacaggaacagtgcccctggtccgaatgggtttgggcccgggttctatcaagcagcttgggcgtcgatctctggcacgcgtaagctcccaacggcagtgatcaagttggacttcgctaaagcttttgactccgtaacttggtccagccttcctgcaattcttcaggtccgcctcctctcctatgctgaaagattgattcttatcaatgctgtcctggatactatccctgtctacgccatgtctgccctcaggttgcccaagggagttatcgaggatctaaacaaaaaaagacgagctttcctatgggcgggggaagacacagtcagcggggccagatgtttagtggcttgggattctgtctgtatgcctaagagcgtaggagggctgggggtcaaaaacatcgacaagcaaaatacagctctcctggtctctgtatactcactcgatagaaaaaaaagggagaattgtgtttatgccccaactttcaatctcaattgtgattttaccctcaatttttag

SEQ ID NO: 7024 - DNA, 1905 bp, Oryza sativa
  Clone ID: PAT_MRT4530_13658C.1
atgtccaccgccgccgccgccgccgccgccgccgccgtgcagcccgtgctcccctcctcctccgcctcaaccggaggccagcagcatggtgtactcacggctgaccgcgtggcggggctgctcaccggctgcgcgaccctccgccgaaccggcgagctccacgccgcggcggtccgcgccggcgtcgacggcgaccgggcggtgggcttccgcctccagcgcgcctacgccgcatccgaccgcctcgacctcaccgtcacgctcctccgcctcacgcccgaccccaccaccgtgttctacacctccgccatccacgcccactcctcccgcggcctccacctcgccgcgctcgcgctgctctccgagatgctgggtagggggctcatccccacctcgcacaccctctcctcctccctccccgcctgccacggcctcgcccttggccgcgcccttcacgcctacgccttcaagctggcgctcgccggcgactcctacgtcgccaccgcgctgctcggcatgtacgcgcgcgggggcgacgccgacgccgcgcgcgcgctgttcgacgaaatgcccgatccgcacgtcgtgccagtcacggcgatgctcacctgctacgccaagatgggggcactcgacgacgcgcgcgagctgttcgacgggatgcccagcaaggacttcatctgctggaacgccatgatcgatggctacacgcagcacgggaggccgaacgaggcgctccggttgttccggtggatgctgcggtcaggtgtcgatcccgatgaggtggccatcattcttgcgctctctgcagtcgcgcagctcggcacagcagagtccgggaggtggcttcattcctatgtcaagaacagccggcgagttcagctcaatgccagggttggcacggcgctcattgacatgtactgcaagtgtggcagcctggaggacgccgtgtcagtgttcaacagcatcggcgacaaagacatcgtcgtctggaacgccatgatcaacggctacgcgatgcacggagatagcaggaaggcactggagatgttttcgcagctgcggtcacaaggcctctggccaactgacatcaccttcatcggcttgctcaatgcctgcagccattctgggcttgtcgacgaaggccaccaattcttccaatcaatggaggaggagtacgccattgtccccaagatcgagcactacggttgcatggtcgatctcctcggtcgtgccgggctcatagaagaagcattccaccttgtccagagcatgacgatcgcccctgacaccgtcatgtgggtgtcactgctcgccgcgtgccggcttcacaagaacatggcgttaggccagcagatcgccgactatctcgtcgccggtggacttgccaactccggtatgtacatcctcctgtcgaacatctacgcggctgttggtaactgggaagaagttgcaagagtaaggtccatgatgaaggccagtggcatccagaaggagcccgggtgcagcgccatcgaggtcggccgcaaggtctacgagttcgtcgccggcgacatgagccatcctcgcacagatgagatatacgccatgctggagaagatgaacgggattgtgaaagagcagggacatgttccacagaccgagctggtgctacatgatctggatgaggtgaccaaggagaaggcattggcagttcacagcgagaagctcgccgttgcgtttgggctcataagcacggcgcccggggagacgatcaagatcgtcaagaacctgagggcgtgcgccgattgccatgccgtgctgaagctgatatcgaagatcactgggaggaagatcgtgttcagggacaggaacaggtttcaccatttcgttgatgggtcatgcacttgtggagattactggtga

SEQ ID NO: 7025 - DNA, 1109 bp, Oryza sativa
  Clone ID: PAT_MRT4530_13659C.1
ccggccgggacacactcgcctcggcatcttctactgctcgccatcgcactccacctcgggtgaaagccggcgccttttggatcacccctctcctccgatcgaccgggtctctgctgaggtctccacgccgccgacaggtagcgcgagctagagagatggccgagacagtgttcactccctcgttggagggtatgaagcatgttaagtcagagagcagtgtcatactcaccaagccctttcttgatgtctgcaagcaaatcttgcctgttttggataaatttggagctgctatggcacttgtgaagagtgacattggtggtaatatcacgaggctggaaaataaatattcttcagacccatcaaaatatgagcaattgtacagcatggttcaggaagaggttcaaaacaagactgcaaaaggttcgtcaagctgcacaaatggacttctgtggctcacgagggctatggacttccttgttgaattattccgtaacctgcttgagcatcaagactggactatgagtcaagcttgtactgattcatataccaaaactctgaagaaatggcatggttggcttgccagttctagttttacagtggcaatgaagcttgctcctaatagagagaaatttatggaggtcattagtggaacgggtgacataaaagctgatatcgagaaattctgcacgaccttttatccttttctcaaagagaatcatgattttctggccagtgttggacttgatgatctgaaggcttcttaatgcattcctatgcaacaattacccacagaataaacctgtcttacctgtctaatgaaatttagtgctgccgagggtatgctgttttccacctatctttggaaaactatagggcaataatgaatgtcgtgagctcagaacgattgggcaagcccatgggcagctatacacaatgtatgtgttgctttatgcaaaaaggtcaactgttgaaaagcattcccgtgctagaggaagttaacatgttacgtacttatatgccctgagaattgttcatctggggtatccatcaaatttggtatttgctgaggccttaaaccccctagcaaaaaaaaaaaaaaaaaaaaaaaa

SEQ ID NO: 7026 - DNA, 717 bp, Oryza sativa
  Clone ID: PAT_MRT4530_1365C.1
atggcgatcaacaagaacaaatctctcaagaacaccaaaaagacgagctctcgctggcagcaagaacaagaaatccctttcttctcccgaacctgcggcgtccgaggcgctgtgacgctgtctgctgacgtcatcgtggacgaggacggaaataacgtcgacggtagtgcacagcaaatcagcaatgttcagaacagtagaaagatgtacatgtacccaatgatagtaaagtacgaagatttccattcatctgtgctgccctttccaaaagatggggtggcagcggtgcgcggccggaggcaggcggagcggccgcatcggcgggcgagcgaggctgcggagtgtcggcagcggcaagcggcgggcgagcgcgacggcagcgggcgagtggcgcctctgggtcgggaggtgcagaggggcttgggacatggggtcatggggggggcgagcagcggctccgggatcgggaggagcatcagctgcggcaggcggcggctccgggcgcgggaggagtatgtcaaggtcaataggcagggcggcgcccgtggggtgggccagggcggcgcgggtggtgacagccagggtttaccaaaccgccggggccggggttaccgcgccccggcggaggttactgcggtatttatattatcgtacccccgcggtaagcccggtaaccgcgcggttaccggcggtatggtgaaccctggtgacagttga

SEQ ID NO: 7027 - DNA, 281 bp, Oryza sativa
  Clone ID: PAT_MRT4530_13660C.1
ggaatcggcacgaggtctctctctccccacttctctctggaatttgctcgcgtttctcttctagatctggaagaagctcttctctcttcatttcacagccttaaccttactcctcccaagtagtagtagcagtttgcttgcttgtttgttcccccaaaaagtttgatccgcccctggctcctgtgaatttattcgatcgcttcaatgtgtgcggatgtgcccgtgctgtggctgtgagatcgatggatcaatctctggattaattttgcttttgctttttt

SEQ ID NO: 7028 - DNA, 552 bp, Oryza sativa
  Clone ID: PAT_MRT4530_13661C.1
gcttaaggagggcaggttcattgggcatcaggtacacatatttggttttcacttttccatcttattagcgggtgttgcgtgtactctttctgaacacatatcaactcgcagttctctaccaagtaagggtgtgttcggatgagcaggtcaggatctgctcatcccagcacgcaaaacgaaatggctcattagcgtatgattaattaatatgattttgggagccactttcctatagaaaatttttgcaaaaaaaaaacacactgtttagtggttcagaagtgcgcgcgtggaaaatgagggaatataagctgggaaatggtagtgccgaatgaagcctaaaaagtataattatcccattttcagctcatcctttagacttgtattccaaatggaattttgggatactttcctttgttttcttttcagaaatctgtctaattatcccattttcacttcatcctttagacttgtattccaaatggaatcttgggatactttcctttgttttcttttcagaaatctgtctaattatccattttcagctcatcctct

SEQ ID NO: 7029 - DNA, 525 bp, Oryza sativa
  Clone ID: PAT_MRT4530_13662C.1
atggagtgcggcggcggcggcagggagcagcagatgcagatcgtgtgcgtgcggggcggcggcggcggcggcggcggcggcggcggcgaggaggatgggtcgtcggagtgggaccagtcgtcgtcgcggtcggcgctgtcgctgttcaaggagaaggaggaggagatcgagcggaagaagctggaggtgcgggagaaggtgttctccatgctcggccgggtcgaggaggagaccaagcgcctcgccttcatccgccaggagctggaggtgatgtcggatccgacgcggcgggaggtggagacgatacggaagcgcatcgacaaggtgaaccgccagctcaagccgctcggcaagaactgcctcaagaaggagaaggaatacaaggcgtgcctagaggcttacaacgagaagagcaacgagaaagcaacgcttgtgaacaggttgatggagcttgtgggcgagagcgagcagctgcggatgaagaagctcgaagagctgaacaaaacggtagagtccctctactag

SEQ ID NO: 7030 - DNA, 666 bp, Oryza sativa
  unsure (1)..(666): unsure at all n locations
  Clone ID: PAT_MRT4530_13663C.1
gatgcctggatccaggttccctgggagggattcagtgacgcgtccgatgcggatctcatcgctgaacacgagatctggccccgttgagccacttcgccacagaatgaggcatttaattgcagccacggggatctctacaagtggaaacttctctggccgatgctggcagacccattcggcgtcgaatggtctggctacgagggagaagagagcagcttcaagcttgcagatgccatgtcggggaaggaggcagtgtgggcagagattgtcacaagagaatgatctcatggacaccgagcttgaagagatcacccattggtggtttgttgatgccgtgttcggcgtccgcagcgagcatttggatagcatgaacaagagcaaggaacatggattccttggcttccggaacacggtgaattccttcaacacatggatagaaaagatgaaggttttcaagattgtcccatgatgcgttcaattgttttttatattattgcacatcttgttttctatgccattcatccaaattgctcccgaatttagttccattataaacattgctttcaaggttacatgttgtaaaatgctgtatncnacaaaaaacnagaaccgaataaaattaatcaagtggagaatgaattttatgggaaaaaaaaaaaaaaaaaa

SEQ ID NO: 7031 - DNA, 1825 bp, Oryza sativa
  Clone ID: PAT_MRT4530_13664C.1
atgggcgccgaggaggaggaggagccggcgtcggccgtcgggagggaggggggaggaggaggaggcggggcgagggccgcgggggcgggggcggggggcgacaccgccgacgacgacgacagcggggagagcgccgcggcggtggtcccgtgctcgatctgcctcgacgcggtggtcgccggcggcggggacaggtccacggcgaggctgcagtgcggccacgagttccacctcgccccctttggcagcttgcttcagtgcaatatcatcttttgcttactcataagcagagtcatggatgacaccatttgcataactgtttgcatgaactttataatctcgatattcaaatcaatcctaggtgctttcagtctagattgcattggttcagcatttaatgccaaaggagttatgcaatgccccaactgtcgccaaattgagagggggaattggctctatgcaaatggttcgcgtccatcacaggatgtaagtaatgatgattggggtcatgatgaagacttttatgatgctaatcaaccagagacatcaaggagtgtctttttgccattccgcttccaatggtgtcctattggccgcttagcccaacttccatctgtatttgatgaaggagagtcagcaccacccgtaacctttcatgatttcatgggacagaacttcacttctgagcatttgcctgtatcagcacctggggcaactcctccaggcccatatatcgcttactttcagcctcttcaatcatcggcatcatcatcaagttcccatgtcactgaaagaactatggatggcaccacctatcatgatcactggaaccccctacctgggccatcagatggtcgaccattggctacagtgcatcccattgatttccatcataaccactggacgcacctgcccaactcctattctcaacccaacagcaataatggtgtagctgagcagatggcaatccctgtggtaccaatgagggttgggggccttgatagtgatagccaacagcgaggatctctcccctcagtttatggaaatggatctggatcaaggtctagaattccaagtgttcctcctatggcaccacaattcatgaggccgcatggtaacatcaacgaacaatatcagcagaattcgtccagcctgtatgctgcgccgcagcgtaggactgccgtgcaggctgtccaagacagcatgaactttaccctgttcccgcaggctccaactggccctaattcaatggagacggaggatgccggaggcaaccagttctatgcctgggagagggaccgcttcgccccttacccgctaatgcccgtagattctgaagcaaactggtggggcagcacgccgcaatcccatggcgtgacggatcattcagctgcccccggtaggaggctatttggtcaatggatcggcgccgggaggtcgccaccgccgcctccaccgccaccagcggacaactcgtcgtaccgacagatgcacatccctcggatgtagcttagccccccgaccgtcgcctgaaccaacaaagttaaatataagaacctggaaaaaacccctgtttggctgtaagaaagtagggtgaagacaccggttgtatgtcgtcctgtgtttgcgtggtaattagactcccgagacaaatatgcaggcaggtgaaaaaagaacaccaagaacgcaaacccaaactacccaaggaggaaaaacgtttcagcttgggtgtttatgtggaattcggttcggtgaagcatcatagtacatattccaagccatgttggggcttctttaaaaaaaaaaaaaaaatatcgtttgcttg

SEQ ID NO: 7032 - DNA, 781 bp, Oryza sativa
  unsure (1)..(781): unsure at all n locations
  Clone ID: PAT_MRT4530_13665C.1
cggtccggattcccgggtcgacccacgcgtccggaaatattttggcttgcactactgcctttgctattcgcaattgcaacttctgtatgcaattcaatcaccatgattttgtttagattcaaaaatttttctttaaacttccaacttttctatcatatcaaatgtttgggcacatgcatagagcattaaatgtggacgaaaaaaaaaacaattgcacagttttatgtaaatcgcgagacgaatcttttgagcctaattacgccatgatttgacaatgtgatgctacagtaaacatttgctaatgacggattaattaggcttaataaattcgtctcgcagtttacaggcggaatctgtaatttgttttgttattagtttacgtttgatacttcaaatgtgtgttcgtatacttaaaaaaaattggcacgcgaactaaataatactcatcgtatgagaatgctgctccatgtattcattgattcttgaattttgattctgtgataattaaataattgtaatgtgctagttatctatcattgtggcgctgatttgttttgtccacgattttggtgtacctgtttgccgctacaaacttacgcagtgttgattcctgacacactgacgggcttgtttatttctcgtcgtatgaacttgcatgcgtgatgctgcctatgctgtgcttgnttagtttatcctcagctgtgccattcattaccaggaattgcaaagctgcaaaactgggtattatctcttttatcctaagctagngtacattaactgg

SEQ ID NO: 7033 - DNA, 1554 bp, Oryza sativa
  Clone ID: PAT_MRT4530_13666C.1
gcacgaggcaccgcggggtccaagtcgccggggcgcgcgctgaggaggatcgccggcgcggccgtcgccgccgttctgctccgcggctcgttcagcgcatccaaatgcaagacggaggcgaggatggcagcggcgaggatgaagctgctgcggaaccggcgggaggcgcaggtgcaccagatgcggcgcgacatcgccgcgctcctccgcgaccgccaggaggacaccgcccggatcagggttgagcatgtcattagagaacagaacattatggcagcgaatgagatcattgatcttttctgtgagctgattgttacacgccttcccatcattgcaaagcagaaggaatgcccagcagacttgaaagaaggtatctgcagtttgatttttgccgccccaaggtgctcagaactccctgaactcggtcggatccgcgatctttttgaaaagaagtatggcaaagattttgtttctgctgcagttgacctacggccagatgcttgtgttaataaccttctaattgagaagctatcagttaagaagccatctgggcaaactaagctgaagattctcaaggagattgcgaaggagcatcagatcgattgggatatgaccgagactgagcaggagcttctcaaaccttctgaagagctgattcaaggaccaaacacatttgtggaagctaccaactttccagtgaaaactactatgtcagcagcacatgctgtgcaaataaatccatctaattacagttctggatacgctgatgaatatgatgacgagcgtacgatgcaattcaaagatgctgcatcagctgctcgagcagctgcagaatctgccaatagagcagcttctgctgccaaggcggcagctgatcttgtcaataagaagacccattcatctgatgaggttgaggaccgtagaacttcttttcatgaatctagtcattccagcaagagacagtcaatgagcaactctagtagatcgtccaggaaggaagatatagtggcctttgatgaatcaaacccccaagggaggaggacgtcccgcacagggagctccattgaatcaaaccacgtagaagataaagaagacactgaacaagtggaattgagtgccaggaggatgcggaaaaggaacatccgttctactcggaaggtacactcagagataaagtttgatgattcagagggattgaattcagagacagaggacgaaagtgatacggagatacaatccattgaaaggccagctcctagaagtgaaccttatccaggaagtcgtcactccgaagatgaagagaaagaaaaccatgaattacctgatttgccgaaggcaaaccttagttctcgtgttcatccaaatatgcctctggactacgaaactcttactgcacgcttcgaggcgctcaaatctgggaagctcccatagtgtgcaattgaagatgtagcatataatgctaaatttctgctacttctacaaagaaccatatgatataccaaatactagtaggttacttccagtactctagggccttttattttggtgaactga

SEQ ID NO: 7034 - DNA, 448 bp, Oryza sativa
  Clone ID: PAT_MRT4530_13667C.1
caccgatttgaaaatcgctcgcaccaccgcgttgttactacttcgtatgattggttgctctgaagcgatgttggacgatggacatattgtgcatcaggggtttgccgcaccctagccaatgtgttctttgcgctcaacatgatgcaagcatcgatcgcattctggatacatgtcctaagtcgagacagctttggtggctgatactcaggacaatcgatcacccaaaatgctctccaatgaataaaggatccttacatggttggttgtgcgacaacaggaaaaaaaattgccaaatccaaacaccaaggattcgacactatcgctgctcctacgtcttggtcaatttggaaagagcgaaataatcatgtatttaatcaataacagaaaaactggaggaggttgggaaggcaatggcaaaagagacggtgatatggcagctccaacgccg

SEQ ID NO: 7035 - DNA, 456 bp, Oryza sativa
  Clone ID: PAT_MRT4530_13668C.1
atgactatggtatttagatggtatggggatcgtcggtaccagggtatatgcgagattgaggtgggatcaagtcgaaggcatttgattgagcacattgcgagtgccaagcgtcgcactgtcgacctccgtcgagcttcgtcgggcgccgccgtacatagtcatgctcctgcaggcttcgtcgcgtgccactgcacgtccgcaagtcgcgagctccgtcgtgctcccgcaagctttgtcgcgcagctgcacgtccacgagccaggagctccaccgcactttagcgggctcgcgccgtcaagctctatcccgcgcgtcaccacccgtctgcgcgctaggagctccaccgcgtgccatcaagctctggcccgcgcgtcgccgcacgtccgcgagcaacgagcggcggcgcccgtccacgtgttgtcgagcttcggcccgcgtgctgccacacgtctgtga

SEQ ID NO: 7036 - DNA, 220 bp, Oryza sativa
  Clone ID: PAT_MRT4530_13669C.1
acagcaaccaatttattttcatattgggggcccgggcccaaacaaaaataagaaacaaaggggccatataattttttaaaaaaaggggaaaaaccaacccaaatttttttccggggggaacatcacgggatacatttataacagcaagctaaaggacgccactcctttttttttttttccgttaacggaatttgagccattgaaggggggaacgtggggt

SEQ ID NO: 7037 - DNA, 769 bp, Oryza sativa
  Clone ID: PAT_MRT4530_1366C.1
tttttccagtcgcgaacgcgactgctgcagcacttgcgcgggtttctgctatgttcaatgccccgcttgctcgtgctgttgtctttgggattcatatcgatgggcacttggtcgtcgaagggcttctcattgccgcaatactcttccagctctccaggaagagctacaagcctccaaagaagccactcactgagagggaggctgatgagctctgtgatgagtggcaaccagagcctctctgcccacccatcaaggagggagctcggattgaggctcctacattagaaagtgctgctggaccgcatacaattgttgatggaaaagaagttgtaaactttgcgtcagcaaactaccttggtttgattggcaatgaaaagataattgattcctgtgttggctcagtggagaaatatggtgttggatcatgtggaccacgaagcttttatggaactattgatgtgcaccttgactgcgagagtaaaatagcaaatttcctgggaacccaagattcaatcttgtactcctatgggatatcaaccatcttcagtgtaattcctgccttttgcaagaagggagatatcattgtagctgatgagggtgttcactgggctgtgcaaaatggtttacagctttcaagaagcactgttgtatatttcaagcataatgacatggcttcacttgcgagcattttggaaaaactaactcatggaaacaaacatacagaaaagattaggcgctatattgttgtggaagctatttaccagaattc

SEQ ID NO: 7038 - DNA, 311 bp, Oryza sativa
  unsure (1)..(311): unsure at all n locations
  Clone ID: PAT_MRT4530_13670C.1
cacgtagctagagtgatcgattcattttcttgctcgatcttgatcggtatggctggtgctanggctgncggcgctgccgctgccgcgncggnggacgggagccgngtcgccgtgcggcgcgtgcaagttcttgcggcggcggtgcgtgccggagtgcgtgttcgcgccctacttcagctcggagcaaggggcggcgaggttcgcggcgatccacaaggtgttcggcgccacaacgcctccaagctcctctcccacctccccgtcgccgaccgctgcnaggccgtcgtnaccatcacctacgaaggcccagg

SEQ ID NO: 7039 - DNA, 174 bp, Oryza sativa
  Clone ID: PAT_MRT4530_13671C.1
actcgtgataataaattcggcaagtggtcaccaaattgggaaggacagtttcacatccataaggttgtgtctaaaggagcctatatgttgcaaggacttgatggagaattttatggacgggcgctcaatggcaagtactttaagaaatattattcaagtgtttgggttaatgca

SEQ ID NO: 7040 - DNA, 438 bp, Oryza sativa
  Clone ID: PAT_MRT4530_13672C.1
atggcggaagaagatatcaacaagatgatgagctccgacggggagatatcatcaatggcagagagggcggcgagtctgttgcgggaactgcggcaactgatcgaggacggctgcgccgccgccaaacccctcgccgagatggtcgagtactgcgccaagcacgccgccggcgacgaagctgaaggcaaggaagaggaggtattagatgatggcgagtccagcgacgatgaggaggagacggacatgctcaggctggaggccagctcgatggacgtggagaacatgctcagcgtggccgcgcagcgcacggcggagctcatcaaggacaaggacaagccgccggagccagagccgtcgccggagccatcgccggagaacgaccccttccacggctttcacagtttgcattcatttactgagcactgctacacggactaa

SEQ ID NO: 7041 - DNA, 406 bp, Oryza sativa
  Clone ID: PAT_MRT4530_13673C.1
caagtggcaatagttcttctatatgcatcttaaattcttctatatgctttggatttgcttcaattgggctagtcttaataatatactctgtatttattatattaattttacactcgattgcatttttctcccaatatttcataggaatttctcctataatttggatatcctctaatctttggacgatcttttctatatcctttttagatttaatatccctataccaatttggcgtgaatgcttgtagtcctatgcattctatattggaatttgatatataatagttgtctatattttcactgagctcatattcattaattctttcttcagactccaaattgggtgtttcaagattatcgagatggggctcggggcctatttatacccgagaattacaaaatatgtc

SEQ ID NO: 7042 - DNA, 1875 bp, Oryza sativa
  Clone ID: PAT_MRT4530_13674C.1
atggaggttagcatcggcaagccagatgacgggcaatcgcttcttgctaatgttgaggcctccgatgaccatgccgcctttgatgccatggccacaagctcgcgccgtccacctagcttgcgccctctgcggcaccccaatgtgacatcccttgcaccattgccaccactccatcgctgtgtaccacgacaaaccgaggtgatattcccgccacttgactcaccggactcctccgagctgaagaaggttatgtccatcagcctgccagcaacaccaaccggctttgccgcacctgttgccggtgccagcgactcgtcgggcatagatctccggaggcaagccatggcgtcgaacatgacacaaaggctacagcagcgctcgccaacgtcgcagagcaacaacggccggcggctcacagacgagacaacagcgttccagtcacccccgcctacccccggtggcggccggtcgtcgatgagccgggacaaacgctatgattcattcaagacgtggtcggggagactcgagaggcagatcagccacctggcgggcatcgggccggacatcccttcacctgcagggcaagtcgtggatgccgccatggatagtcaccaccattctcacactgtgtccacgcccgaggttggccgcttctttgccgcactggaaggccccgaactagaccaactcaggtcggaggaggagctggtgctgccggtggataggacatggccattcctgctgcggttcccggtgtcggcgttcgggatctgccttgggatgggcagccaggcgatcctgtggaagaggatcgcggagtcgccgccgacgacgaggtacctgcacgtcgccgccgacgtgaacctcgtgctgtggtggctctccgtcgcgctcacctgcgccgtctccgccgtctacgcctgcaaggtggtcttcttcttcgaggccgtccgccgcgagtacctccacccggtcagggtgaacttcttcttcgcgccgctgatcgcctgcctcttcctcgccatcggcgtgccgcggtccgtcgcgccgtcgacggcggcgctcccggcgtggctctggtacgcgctcatggcgccgatgctgtgcctggagctcaagatctatgggcagtggatgtcgagcgggcagaggcggctgtccatggtggcgaacccgtcgaaccacctgtccgtcgtgggcaacttcgtcggcgcgctgctgggcgcgtccatggggatcagggagggcgccgtgttcttcttcgccgtcggcgtggcgcactacgtcgtgctgttcgtgacgctgtaccagcggctgccgacgaacgaggcgctgccgcgggagctgcacccggtgttcttcctcttcgtggcgacgccgagcgtggcgtccgtggcgtgggcggccatcgccggcgagttcgcgctcggcgcgaggctcgcctacttcgtcgccatgttcctgtacgcgtcgctcgccgcgcgcgccgtcagcctcttcggcggggtcaggttctcgctggcgtggtgggcgtacacgttcccgatgaccagcgccgccgccgccaccatccgctacgcggcggaggtggaggacacccgcctcgccagggcgctctgcgtcgcgctcgccgccgccgccacgctcaccgtcggctgcctcttcgccaccaccgtcgtgcacgccgtcgtgctccgcagcctcttccccaacgacgtcgccattgccatcaccgaccaccgcaaggtgaagcccaagcccaagcccaagaccaccatggaggtgcactacaagatggatggcaatggcgacatcgagggcggtgctcctgccatgacgccatcgccatgcatgccgatggcgacggcagcttag

SEQ ID NO: 7043 - DNA, 3480 bp, Oryza sativa
  Clone ID: PAT_MRT4530_13675C.1
attcccatggttcctggccaactaaactttgaaataagattcatagtaagtttattattacaatggctgcaacccataggtttgcattatatagtaaatgcatacatgcatactaatttaatggatagagctagcaaaccataacagatggggctagaggagaaatcaagcgtagcgtgcttattcaaatacatgaaaattgaaacaagtgaacaggtttggaaatagtaatcatgcaactgatcagtaaaaacggtagagatatggaacatataaatcctgacgatgccaactccaggaccaagccaagggatgagccattgatgcaaaggccatcatcctgctgctcactaaggctcctgcttttcgttgctccacctctagtcccccttaggccttgttcggtatggaaggggtctgaaagggtttaaagaggaataattccacaccacaataggtgtgaaataaatccccttcaatccaccaaaatgtccctatcgagtgttcgggtcgtgagcgtcggacggttgggatgtgtctttgctacgttcaagattttttcttccaattctgaagccacatctcttggagttgaaggtggattgccaataatatctacattgactaacttttcaatattagcaagatggttgtttgtcaatgattggcacccgtctagatccagtactcttgcaactttaaattctgatagaggatggaatcctgtgtagtccacggaacaaataagtgatctaacatgaagcttaatcggcatcatccttgaggcaaactccgattcatgatcagccaagaagctggatatggaaataattgctagaggtataccatcacaccttttcagtatctcttcagaagctagctcaaatttaggaggacatttctcttcacagtcaaaaattgcagagggtgttggggaggtgctggaaggaatcattctcaccaaccacattcaatctaatgccaatgtggaggtccttcagattaggcatggaatcatgcataaacaacacgttgcaaagaaaggcaaacttgagacatcggaaaccatggttgctgatggtgagccatgatccttgtgtgtctgaaaagggaagggcaagatattcgagagctttcaggtctccaagcatttcgagatcgtcctgagtaacatatgctttactgagctctaatttctcaagcttggcagcaaggcgaatccaacttggaatggttgtcgtcttgaacccgtttacaatgctcaatctccggaggttttttagggaagggaaccacgaatcaaacaagaagcgttttgcagctatatccgaataagaataataaagagacagatctagatattgaaggctatgtctgtccagtgcattaagtgaggagatgaaaatcttctcgtagctcttttcatgctcggcatgggcctcatcagaatctctaacatggtcaggaatccaagataccgctagtactctcagcttggtaagctcacctagctccttcaaaaagcttaccggttgattgaagggcaagagacctgttagctgctccaatgcttgcatcttgctaacaccttctgcagggaacatgacgtcagaattgacagacagacgaaccaattgctgaagtagaacaatggatggtggtaattctttaacttgagtatctagtatatctaatgtctccaaatgctggagacgcccaatattggcggggagcacacttactcctgttccgctaatgctcagatacctcaaataggctaacttttctatattagcaagatggttgtttgtcaatgattcgcacccttctagatccagtactcttgcaactttaaattccgatagaggatgcaatcctgtgcagtccatagaacaagcaagtgaccggacatgaggcttaatcgacttcatgctcgaggcaaatttctcttggcagtagctaccctggagagacatgcgacgaaccttgcagcagttgctatgctgcaaaggtacaggaccagacggatccaacaaggtcataaagttctcctctactgatttggacactatgaaattaagaatgacgtcgtgaacacggcagctcagcacctcaccgtagtgctcattccatggttggatcaagctctggtttatcagcacattgaaatacctcagccctgcttcatatagattttctcctggtcttgcattgataaatccttctgcaatccatctgcttaccaaacgggtctttccaatttcacaatcttctgggaatgcactcaagtataacaggcaacttcttaaatcatgtggaaggttgtaataactgagtgctaacactgattgcatggtctcaagatccttatttcctggtattggagaactgataattttttttacctcattccagtgatataacgattgacgatcagccaagaagctggatatggaaatgattgctaggggtataccatcacatctttccagtatctctttagaagcttgttcaaattcaggaggacattgctcttcacagtcaaaaattcttttgtaaaacaaccttttggagtgagcgccatcgagatgtttcatcggataaacaaaaccaccatgagaagatgaagatgacatcgccacttctttcacacgtgtcgtcaaaattattatgcttttttgcttgagatattccctaagattatccaccagatttgctacatcatccgacatgtttgttgacttgttgccaacttgattagaaatgttgaggataagctcctttatgttcggtttctgagacaccgaaacaaaggccttgcactcgaattcccctttgattttgtcgtacacttgtttggccagagtggtcttgcccaagcccgcacacccgacgatggataccatcctgacaccgtgtgctccatcaaccgactgatgatgtcatccctagggccatcgatgccgacgaggtgcttcgtttccgtccagagcgcgcacagccggacatcaaccttggtcgaggaggaagcatccgagctagttggtacaagtccatgaagagtgtacctgttacgccgctcgctgacctccacgacacgggccttgagcttctggatctgactcgcgatctgacggaacgctccgatcttcttggccatgcgcgccaccttggcagcgagtccgctttcgccggcgctgccgcggaggcggtggacggagaggtcgatgcagtcctcgatgtcgtaggcgagatcccgcaccctgtccctccagtctctgctgagctcgtcgagctgatccacatctgctagcttttgcagaactatattcatggtgctcagctcggaccggaggaagacgaggtcgtcgcggactcccttggcgtgcttgtactcctcgccgaggaaggccgtgagctttgcgaggacggagttcatcactccggtcgccgcgctcaccaggacgccctccatgccga

SEQ ID NO: 7044 - DNA, 652 bp, Oryza sativa
  Clone ID: PAT_MRT4530_13676C.1
gtggatccccgggcggctgggcacccggcaccccatcgacgttaagagaatattgtaataagtggttgcagcttcccatcgaggcccccaccgccgcatccaggccgaggccgccgcaccacgcccccatccaggccgaggccggcgcgggcgcatccccatcgaggggcctccgccttcgtccccacctgtgacggccacctccatccacacgcgtcaccgtctctatcgagcagtgtcgccattctcgcgcgagcaccaccgcctctcctcgccggagttgcaaccgtcgggaggaatctcctttccatcgagtgttgcagcggctcatcgtcccaagctgcttctcgatcttctccaccgagcaccgccgtcggaagcatgtcttatccgcctagcgtcgccatcaagtgcaatccgtcctctccgccgagtatccgccgaagcacgccaagcagacgccgactccactccgtgtctctaccgagcagcacgccgtcagcgagatctgtagccgcttctcctcgccaagctcaatgcagcatagcacaatcggtgagcacataacactgtaggtcagccgcgtattgaagaggctgcagagcatcatggaagcaatacatggagctgattgcaccaagcactccgccat

SEQ ID NO: 7045 - DNA, 466 bp, Oryza sativa
  Clone ID: PAT_MRT4530_13677C.1
ccatcatctatctatccatcatccatcagaccagacccttcctcctctccccggcctaccggcagcagcacccagcagtaagcccccaagcagtaagctatagctgcctgtgtgaggccccaaaatctctctactctccctttctccatccccacacacattcctccgatatctagtatatctccctactacaccatcatccaggctacattagtttggtctcttttttttttcttttataagttttgggtttttcctcaccaccaccacaagcggggagttgcacaaccatccaaagggaggggagtgcaagaattgtgagctgccacaagtgatatttttccaattttgtttttgggcaagtgtagtgcactcactcacacactaggcaggggcaggggcaggggcagggcggcctataaataaaaagaaaaaaaaagagagagaagatatattactagtagta

SEQ ID NO: 7046 - DNA, 624 bp, Oryza sativa
  Clone ID: PAT_MRT4530_13678C.1
cggcagaggctcccctagcctcgccctcctctcctcaagcatgtcgccgcctcacctcctcccaccaccggcgcccgcctctctcccctcaagcacgtcgccgcctcaccctcctccaaccctcggcgcccgcctctttccccagtcaggccgttgcatttgctagcgaggaggcccgggccgctgaatccggcgaccccgatctcttcgctagctgatttggctgctcggacgaaagggatgtgagccgccgctaccatcttctcgaccccgcttgctgtggtgcctgatatgttcacgagctgtcgatccggggtttggtttcttgcaggtggatccgaccgctcggagccttggaagcgagggagcaagcagtcgccaccaccctcttttcctctccttctccacactttgaccgcccctctctccctctcaggcctggtcagtgtcagatccggcttaggggctgccggatttggtaggaggttggagtggtgcaggtgtgttgcggcgtagtgatggctatgacgctaggggagaaagaaggaggaaggtcgcggcttggccatgactggggcgacaatggctctgtctcggtcgtgatgatggcttggtcaggacggc

SEQ ID NO: 7047 - DNA, 209 bp, Oryza sativa
  Clone ID: PAT_MRT4530_13679C.1
cgggagccggtccgacttccccctggacccaccatcgtaatcgttctttcccgggaggattatcggggggggtggagacccatatcgggggcgtggaccgttccacggcctcggtcttgaatggtgcggtggggtgcccggcctctgcggtggggtgcccgatgacctctgagcgccccgtgcccgtgttggccggcccagcacaccaa

SEQ ID NO: 7048 - DNA, 1404 bp, Oryza sativa
  Clone ID: PAT_MRT4530_1367C.1
atggagatggtgttgccagtcgcgaacgcgactgctgcagcacttgcgcgggtttctgctatgttcaatgccccgcttgctcgtgctgttgtctttgggattcatatcgatgggcacttggtcgtcgaagggcttctcattgccgcaatactcttccagctctccaggaagagctacaagcctccaaagaagccactcactgagagggaggttgatgagctctgtgatgagtggcaaccagagcctctctgcccacccatcaaggagggagctcggattgaggctcctacattagaaagtgctgctggaccgcatacaattgttgatggaaaagaagttgtaaactttgcgtcagcaaactaccttggtttgattggcaatgaaaagatactcgggaggaacttagccattttgttgttttcagatgttcaccttgactgtgagactaaaattgcaaagttcctgggaacgcaagattcaatcttgtactcctatgggatatcaaccatcttcagtgtgattcctgccttttgtaagaaaggagatataattgtagctgatgagggtgttcattgggcagtacaaaatggtttgcagctttcaagaagcactgttgtttatttcaagcacaatgacatggcttcacttgcgagcactctggaaaaactaactcatggaaacaaacgtacagaaaagattaggcgctatattgttgtggaagctatttaccagaattctggccaaattgcacccttggatgagatagttcgattgaaggagaaataccggtttcgtgttattttggaggagagtcattcttttggcgttcttggcaagtctggacgtggccttgctgaacattatggagttcctattgaaaaaatagacattatcactgctggaatgggaaatgcattagctactgatggtggtttctgtacaggaagtatcagagtggttgatcatcagcgtctaagcagctccggttatgttttctctgcctcgttaccaccatatcttgctagtgcagcaatttctgctgtggaccacctggaggagaacccatcggttcttgccaatctaagatcaaacatcactcttctgcataaagagttgtcagatgtacaggggcttgaaattgctagtaatatattgtcacctattgtcttcctcaaattgaagacatcaacaggttctgctgttgctgacctggagctccttgaggttatttcagagaaggtattgaaggaagattcagtcttcattgcagcgacgaaacgatcgagtttggacaagtgtcgtcttccggttggaatccgcctattcgtatcagctggtcacactgaatctgatatcctcaaagtatctgaatccctgaaaagggttgcagcatcagtgctctag

SEQ ID NO: 7049 - DNA, 461 bp, Oryza sativa
  unsure (1)..(461): unsure at all n locations
  Clone ID: PAT_MRT4530_13680C.1
ccgcngaaatngggagcaangggtcangganaatccttccaatnnnaagctcntctcttcaanatggggatcaaccccatcntgatgagggccccacaactngaaaaaanganacnccggaaaaaccggcnnaagcnggnggggcgggggtaccctnaaannnnnanannttnncnnnnacgaanaaananattaanncccctccttcnccnatcttnnnctttcgtttccntcnacnnnngagggcccgcccntncngngtntcncccncnnttnnttcntcccccncnctctctcgctnccctccttcnnctcncntcccnntnccccccngngggggggggnnctantccccnttccccctcntntatantctttnnntcccttncntctccntnccnnccnttctgnnccccnccnttttttttttttttttttttcngnnncgnncccnccngccc

SEQ ID NO: 7050 - DNA, 411 bp, Oryza sativa
  Clone ID: PAT_MRT4530_13681C.1
atggccgtcggcgggagaagagggagcggtgcgcgacggcgtcggcggcgggagaggagggagcagcacaagctctccgccgcaacccgcctccaccaccgtcgtcgtgtgcgctcgtggcggaggacggcgagagcggtggccgtggcactcacggcggaggccggcaaggacgtagaagctggagcccttgtgcgcgacggcagcggcgaggtcggtcccctcctcgagggggacacgacgaagacgacgggcagcacggcgggtgcctgctctagctccccgtggctcctctacggcgggtgcctgctcaccgtgatgctggccggtcctggcagcggccgcgtgctggtgctggagcggggcggcgcgcccacggagttcccgccggcgccgctctgggagagctag

SEQ ID NO: 7051 - DNA, 1158 bp, Oryza sativa
  Clone ID: PAT_MRT4530_13682C.1
ttaaaaatagtgagacccacgtgggcccacatatcattccctttcctactagctctcccagagcggcgccggcgggaactccgtgggcgcgccgccccgctccagcaccagcacgcggccgctgccaggaccggccagcatcacggtgagcaggcacccgccgtagaggagccacggggagctagagcaggcacccgccgtgctgcccgtcgtcttcgtcgtgtccccctcgaggaggggaccgacctcgccgctgccgtcgcgcacaagggctccagcttctacgtccttgccggcctccgccgtgagtgccacggccaccgctctcgccgtcctccgccacgagcgccaccaccaccaccaccacgcaatcctccaccatcgccgccgccgccgcctgcaccggattttacctccgaccccagcactccgccggcgcctgacgcgccttccggcgacttcttccctccggcgccaccgaccacgacgacgccgacgagccccggaacgactccctccccgaccaccgtcgccgccgacgtctcgaaaactccgtcggggtccggctcgggacaccacggaggcggccctacgaaggcgaccatagtcgctgccggggcgggcgcggctgccgccgtcgcgctgctcggcttcgcctgcgcgttcctgatcaccggccgcgcccgccgccgcggcgactcgcagaagctgctcggccccgaccgtgccggcgcgcatcgcagcgccgccacctccgccgccgacttcctctacgtcggcacggtggagcccaccacccccgcgcgccaccacgggcccaccaccgccgatctcgtggggtccccgacgccgaccacccgagcccggagctccgcccgctcccgccgctgcggcgcgccgcaacgctgggctcctccgacgaggacgggtactacacgccgcggcagctctccgggggctccggtgggggcggcgccgccgaggcctggagctcggcgagcgcgtccagcccgcccaccaccaccacggcctcacgccgcagcctccccagcatgaccagcgacttcttccccccggtcgctgccatcgccgcgccacccgccccgccccccgcgcgctcccgccgcacgcccccgcgcacgcgcttctccacgggct

SEQ ID NO: 7052 - DNA, 452 bp, Oryza sativa
  Clone ID: PAT_MRT4530_13683C.1
atgatatgcactagggttcctgatcttctgaaaggttctgataaacaacgatttgggcggagtcacgacacaaatcgatccagcttcttgaacgcgcacgctcttgagccccgcaatcgcagcaccacgtctcctctggttatcacccgtgtcgaaacgcagatgacctcgacgagaaggctaatccctgtttgtcaatcgaaggacacaaacttgttttgcagtttcccggcagctcggtgtgaattttgacatgggaccaaaaccatctgaaagtagactccataagctttcgaacaagtaataatagctcaaacttggtgtgtgttgaaatggagagggagaggcccttatatagcctccgaatgatggttatggcagttggaattgtcgaaaatgccccacaatcgttattgggagtacttctaaggtcgccatcgccgtccatccat

SEQ ID NO: 7053 - DNA, 607 bp, Oryza sativa
  Clone ID: PAT_MRT4530_13684C.1
tcgcatccgtacgtggacatcgtcaagtcgccgaaccgcccgcggagccatggcgctgccctcgtcggagtctgatcgacatcatccggtcaagccgccgcatgcacacatccgtctgcacatcttgttgtcgccggtgaagtcgcggtggccgatccatctacacgcacagaagcctcaccgatgccgccgcatctacctgaaactgcgacgtcgccgagatgctggacgtcctcgctttgtcggctgcaagcttcaccgcgctggagcgggctaaccatggaggaggtcgtcgtgaaccgccctgccggagtgcgccgaggatcgccggagctaccgccgactgccatgacttccatctgttctcatgccggaggtcaagcatcacgcatggcatcgaaaccagcggatgacgatggaggcaagtatagctgcagcacaggaggaaggacgacgagccagtgctgttgaacaccacggcaacgagctagcagatgcatgctaattaaactaattattgtggcaacgtggccgaccaaccggagggtgacacatcatcaccatgctacagttctatgcataagaagttgtccaaaaaaaaaaaaaa

SEQ ID NO: 7054 - DNA, 4359 bp, Oryza sativa
  Clone ID: PAT_MRT4530_13685C.1
atgggtgcagccggggctacggtggaagcttcaattgcatggcttgtggaaagcattcgcggcagtttcttcagtgtgtagatgggaggcgcgatgcgtggggttgagcttaccgaaggtgtcaagaagcttgaatttgagatgaggaacgtggagggggtgcttgctactgccgagggaaggaggattgacaagaagccacttatccagtccctggatgatctaagggagttgctttatgatgcagaagacgttatggatgagcttgactactaccggctactacaacagattggaaaaggcgaaggttgcagtgctgctgctgctaattatcctgcagcaaactatgcgtcttcatcaactccattttctccttatcaacttctacacagtgcgaggagccaaattactgtttgggccttatattttcgaaaaaggaaacaaggagagagagacttaactcattgcaccatgctgccttttgagatcagacttgatatttctatgaggatcaatggaatagtgaaagattatcctcaatctggcaattttgtgaggggaattcttcgaccaaatgtctcacacccagctttaacatcaaatcagaggcaaaacaagatcaggaacacacgcttgacaacttctgttcctattgaacttaaggtgtacgggagggatgcggacagggacaggataatagagatattattaaatgaggaatctagtgatctacgtgttttgccaatagttggcattggtggtattgggaagacaacactcactagatttatatacagtgatcgaagaattattgatcattttgatttgcgaatttggatctgtgtatccacttacttcaatgaagtggacataacacgtgagatcttagagcatatatttgaagataaacaagataaacaggaattcaaagatgttagcaatttcaatgtactacaggagattcttttgaagaatattagagataaaagatttcttctcgtattggatgatatgtggaaggaaaaagacatgagtggatgggataagctgttagctccattgaaacatagtcaagtaaccggctgtatggtgctagcaacaacccgaaaaaactcagttgcagaaatgataggaacagtgaatgcattccaaatcagtggtctggatgaaaaggagttttggcagttcttcaaagcatgtgcgtttggcaaggaaaactacgagggtgatcctagtttgcaatccattgggcgacaaattgctaaagcactaaagggctgcccactagcagcacgaagtgttggtgcacttttgaacagaaatgttagctatgaacattggaggacaattcgagacaaatggaaatctcttcaaataaaagatgatgattttatacccatcctgaaacttagctatgattatctaccttctcacctgcagcgctgtttctcctactgttctttattcccagaggatcacccgtttagtgcagcaactttggttcaggttgaccggcactatgttatgcatgatcttatgcatgatttagcacaacaggtttcagcaaaagaatgttatacggtaagagggttgcaatctagcacaattcgacaaggtattcgtcatttgtctatcataaccactggtgatgataatgataaaaataccaattttcccactgagaaatatgagatattacaaaagattaggcctttgcaaaagttgaggagcttgatgctttttggaagcagcagtgtatatctattgaagtccatacaaactgtatgcaaggaagccaaatgtttacggttgttaagagtttgcgtcttgaacgctgacatcagtgctatacatactttcctaaatcctcatcatctccgctatcttgaatttattcgtgtctcggagactaaagatatgttggtatatggagactacaaggatgctgcttttcctcgagctttgacaagtttttatcaccttcaagtgttggacgtggggttctctggaaatatttctgtgcctgctgctatgaataatctagttaagttgcgccatcttatagctgatgctaaagtgcacttttcgataggtggtgtgggcaacatgatctctcttcaaaaacttaagttcaaggttcaaaatattagcggttttgatataagacagctccaatccatgaataagcttgtaactcttgtaatttctcatcttgaaaatgtgaagactaaagatgaagccaacggggccagacttatagataaagagtatctaaaaaagttgttcttgtcatggagtgttggcagcatgagccttgaacctgagaggacaaaagatgtgcttgagggtcttcaaccacatcataacctgaaagctctgtgtatagctggttacactggtcctacatctccaacatggctttctagtaatctctcagtgacatcactgcagacaattcatcttgtcaattgcagggagtggcgaattcttggatctcttgaaatgcttccagtgcttagggaattgaaattggttaagatgtggaatctagtggaactctcaattccctctttggagaagttgattttaattgagttgccgaaattggagaagtgctttggtacttatgggacagaattgacttcccgtctcagagtattgaagatcaaggactgccctcaattgaatgagttcactcctttccagagcttctcttctttcagaaccgagcagaagtcatggtttccatctctaaacaaactcaccattgggtgttgtcctcatataagcaaatgggaaatacttcctctgagagagatgcaatcactgaaggagttggagttagtacacctgcatgcagtcaaagagttgttagtccttccactggagaagttggttttgattaagatggcaagcctggaatattgcagtgggctaacttctccatccctgcaaatttccacttccttaggagatcgaaatgagtcgctatctggtcttcatgatctcacaattcatgattgtcctcgtttggtagtttcacatcctctcccgttttctgctcagatgcggcgcttctccatcagcgggattccaactcttccaacaatggagttaacatatgatttgaaaatcaaatctgaagagttggttatgcttgatgacaagatcatatcattccataactttgcgcgcataagatcattctgtctagtggattgcccaaatttagtctctctatctactgaaggggagagagtactcctaggatacacctctcttgagcgtcttcgaattcagcgttgccccaagctgatgccgttgttggtcatgagtgataaggtggatgttgcattactcccaccatctcttgagaacctggagattgatatgagtcctgagctctctgctgcgtgggatctcaaactgcaggagcatggacagattatcccactgcagcctcatccgtcactcgaagaactcgatatctctaacctcacagacaaggaccagtcccgtttgctgcaattgttcccaaccatcacagcactgtacatttggcagagtccagagctgacatctctccagctgggatactccaaggcactgcgggagctgaagattatagactgcggctcacttgcttcgatcgagggattcggctccttaacaaaccttaggtccctggcggtatccaactcacctggagtacctgcattcttggagcttctgtcacatcagcaactggcctctgcggagatcttgtcccgactggaaaccctccaggtcggcgatggctccgtcctcaccgtgcctctctgcagacggctcgcgtctctgcgacggctatccttctggtcatgggatagcaggcgtggcgagacgatgatcgacctgacggaggaacaggagagggctctccagctcctggcctccctccatcgcctcgatttctggcacctgccgaatctccgttcgcttcctgcaggcctacgacggctggcctccctcgagtggttagacgtcgaagactgccccggcgtcgcgaggctcccggagatgggccttccaccgtcgctgacacggctgcatagtgcagactgcattcaaattaacaagatcttgcacattgttgttgtctgtgctgcacttgcttccttcagcacagatatacttctggagccaatgtatacggttatatggccttacaacaaagaccactatatctatgcagttaatttgggtgaattaattagtaagcttttagccttggttattgtcatggtgtttgagacaatcgtccgtgttgatggttatgttggacgtcatgtacagacgaaagccagtgtaattgattag

SEQ ID NO: 7055 - DNA, 928 bp, Oryza sativa
  Clone ID: PAT_MRT4530_13686C.1
gcacgagggagcgatcacgcgagtgctcctctccatcgcaaggggggaaaccaggcgtttcatgggtgcatgagatggcgactagatgggaatgcgctggagcactgttggtcgacgcccgcacgccgtcgtcgagtccaccaagtcgtggaggtgctgtttcgtctatgtcatcatgttcggccggatgacctcgtcacgctgcctcgccggaggacgctgtcgcatccgtacgtggacatcgtcaagtcgccgaaccgcccgcggagccatggcgctgccctcgtcggagtctgatcgacatcatccggtcaagccgccggtgaagactctactcgttgctgtgatctcgccgccaaggggctcgatggcgacccaaggtaaaaattgagattgctttctttctttcatctacagcatgcacacatccgtctgcacatcttgttgtcgccggtgaagtcgcggtggccgatccatctacacgcacagaagcctcaccgatgccgccgcatctaccgtgaaactgcgacgtcgccgagatgctggacgtcctcgctttgtcggctgcaagcttcaccgcgctggagcgggctaaccatggaggaggtcgtcgtgaagccgccctgccggagtgcgccgaggatcgccggagctaccgccgactgccatgacttccatctgttctcatgccggaggtcaagcatcacgcatggcatcgaaaccagcggatgacgatggaggcaagtatagctgcagcacaggaggaaggacgacgagccagtgctgttgaacaccacggcaacgagctagcagatgcatgctatattaaactaattattgtggcaacgtggccgaccaaccggagggtgacacatcatcaccatgctacagttctatgcataagaagttgtccaaaaaaaaaaaaaaa

SEQ ID NO: 7056 - DNA, 200 bp, Oryza sativa
  unsure (1)..(200): unsure at all n locations
  Clone ID: PAT_MRT4530_13687C.1
aaatnntctttttttagggggtgaactttggttataacggttaatataatcatttggggtcctttaaaacacccttgggccccgcaacattaaaattaagcggtttgggggaacatggccccccccatttggccggggggaaatattggttaaacccttaccatctttaccaaatttacgggaacgaaaggggttttttt

SEQ ID NO: 7057 - DNA, 374 bp, Oryza sativa
  Clone ID: PAT_MRT4530_13688C.1
agggggattattaattcttaacatccaatctaaacctaacataatatttcgttttaaaggaccgcctaatgcacacaaaaaaaatatattttttttctatcaaaaaaaaccatgagggaaaacccaactttaccactcctcaaatttccacacttgtcaacaccaaaaatggaaagtaccccaaaactgagcaacatccacaaatttgacaacccaggccaacctcataaattttaactgggttcatgaggggattaaaaaggctaccaatgggtcctttaaagctaccatggaggcccaccaatgcccaaaggaatttttttcaaaccccttcctgcaaccctaccaaataaccctataacccgtcgcattac

SEQ ID NO: 7058 - DNA, 523 bp, Oryza sativa
  Clone ID: PAT_MRT4530_13689C.1
aaccccccggtggttgccagagtcaccccgtggttttcaatctggagatatcgtccaaggtcatgcagcgcaaccatgtggctgctcaacatgctaggatgatcgcgcaaacagtctcactgtccagccacttgaccagtgttacaggcgattgtgtcagcagctacagctacaacagtttgctggcgtctacttcgatcaggctcaagctcaagcccacagctaggttgggccctaaacttccgtcaaatgatgcggtatctacccaagctacaacatctgctccctggtgagcattgcctaccgtcggtggtatctggtgattgaattggtgagcagtatgagtagtaccggagagaaaaatgaaagtcatggcatgcatgcgtggtgtggacaaagttgaaacatcggggtggataccaatctgaataaaaatgtgcatggccaaatgttaaacatatgcctctgtaaggataaatcctagtacattgttgaaattaattaaaaaaaaaaaaaaaaaaaa

SEQ ID NO: 7059 - DNA, 1373 bp, Oryza sativa
  Clone ID: PAT_MRT4530_1368C.1
gcacgaggctctgctccaatccgcgctcctccgtttccccgcgccgcgcccctcacctccgtccctgcttcctcccggcgaccaccgcccgccgcgcgatgggcggcgccgccgtctccagcctgcttgccaccccaacaccgacctctcgacctcgacccgtctccaccaccaccgcccccttctccgtcaacctctccaccgcagctgcccgcgcacctcgcctcctcctcctctcgcgccgccctcgccctcgccccgccgccgcggttctcggggtgtctgatgatacaggggtcaagatggctggctccgacattgttggcaagaacgatttgctgattgttggccctggagtgcttggtcgactggtagctgagaaatggcaggaggaacatccaggatgcaaagtttttggccagaccgcaagcacagatcaccacaacgaattgtcgaatattggcatcattccctccttgaagggatccacttttcctcagaaggttccatatgttattttctgtgctcccccatctcgttcggatgattaccctggggatgtgagagtagctgcctcaaattggactggtgaaggctctttcgtttttacatcaagtactgctctgtacgattgtagtgacaacgaattgtgcaatgaggattgcccatctgtgccaattggcagaagccctcgtactgacgtccttctaaaagcagagaatgttgttcttgaggcaggaggctgtgtcctcaggctagcaggactctataaaatagatagaggtgctcattttttttggttgaggaaaggaactttggacacacgaccagatcatattatcaatcaaattcattatgaggatgctgccgcccgggcgacgcccataatgaaaaagggacacaggggtcgaatctttttgggctgtgacaataagcctctttccaggcaagaaataatggactctgttaacagaagtggaaaatttgacacgaagttccaaggttttactggtacagatggtccactgggtaagaagatggagaattcgagaactcgttctgagattggttgggagcccaagtatccaagcttcacagaattccttggtcttgacagttgacatgcttgtgtatgcttgcaaaaatcttcaactctaaatgaacagcaacacgttgtgaaccagttattttgttttgtttccattgcggttttttttaaaagacgtaaatactgtatatcttgttctgctatgtgcttatatcagttagcgttcctaagtctgacccgttgtaccatggtttcggcccagagaaatatttccacccgtgtcatgttggccctcgttctggtccgtccaacatctatttgaaaa

SEQ ID NO: 7060 - DNA, 750 bp, Oryza sativa
  unsure (1)..(750): unsure at all n locations
  Clone ID: PAT_MRT4530_13690C.1
agttctatagtcacaaagtaattcttttgttctttactgggtagctttagcaaacttacgctatccatcagttctagagcttatgtaattggaagatgggtttcttctcctggaactatccatcagttctagacattttgttgtccaaacttttaattcattgcgcaatagcattactaacaaccatatatcttttggttagctcttgctgtttggaggacatggaactggtggttggctaagtaggtatgatgtttactacaatgaatgtattattttagacaggggtaagcaccagcaaattttgtgatttttttttcatgttgttgtgagcatgcattgggatcattgatatggaattagcattacatttttcttgatgtcaacacatgcacttattttgactgtcttgttgacacccatcagttacatgggcaaaatcccttatatcatgggacgggggtagtagatggttttcataatcacaaaagagtgcaatcagtgcatgctggtaactaaaaaataagatgtgattccacagtgatacaaaatctacttctcatactaagacagagtagctttgacaaaacattctttgcgatataactgcaaacaaatgccaacattgatcaagaaaactggaaaagtaagcgggttaatatggtactcttgatcgntactacccgaacaagcattatggaagacagctagcangtggttgaggtatcgagttatcctactactaccatg

SEQ ID NO: 7061 - DNA, 474 bp, Oryza sativa
  Clone ID: PAT_MRT4530_13691C.1
agaatgagatcaagcaatttgtggcaaaggaggttgttttctacaagaggctcaacaaagttttcttcgcggattcaattccgaagagtccttctggcaagattctcaggaaggacctcagagcaaagcttgcagccggcatccctaccaatgataatacacagttgaaaagctaaatctgataatattttttcctctttatacaccagtttcaaaaatcatgtaatattctttatgaaatggcagaaatacgtatagaagggccatatggttcaattcttttagatggctaagttatactttgtttgtatgcccgttatgtgtaccgtgtcatgtatagatacctttttttttctttttgaattttgacaacaaggctgattataatgtataccacgtttcaattaaaatattctcttcatttgtaattcaaattgcacgtgttcttactgcttaaaaaaacggacgcgtggg

SEQ ID NO: 7062 - DNA, 304 bp, Oryza sativa
  Clone ID: PAT_MRT4530_13692C.1
cgacgacggcaaaaacggttcatatttaatcctaattatacaaggcacggcccgtctactgctaaggagggtactaaagcatacaaaatagaggcctaatacaatgctctgaccgacaggagccgcatccatacaattacattctcatccgggacgggcgaagacgacactaaattgacatgaaggacctaatatagcagaaccctaattctgatgccgcacttgctgtcttggaagtcagatcctccgctttagacggtcttgaccgccgtgcacaattctggcacattatgcacttggtgga

SEQ ID NO: 7063 - DNA, 160 bp, Oryza sativa
  Clone ID: PAT_MRT4530_13693C.1
tacggtgagatgtgatcacaccgaccgaactttaaggtttggccagaaatagtgtggaataaccaagggaaatggtgccacctgtgtggaactgggatacacaccctttattacacggagacctttaggttttggtaataccgaaataatccgccacagt

SEQ ID NO: 7064 - DNA, 256 bp, Oryza sativa
  unsure (1)..(256): unsure at all n locations
  Clone ID: PAT_MRT4530_13694C.1
ctctttctntgttttctcgcactcaacaattgcccctcggaagtcaattaatcaacgacttctcaattaaatacaaaccaacgcctctggcgaatgcgcgcatatcaacaagtccaattcaaaccctctccctccatcaatcccctaaaaaaggacacaaaccttcaaaatgggcttcctcgattggaacgacggtgcctctgtcctgtcaaccctcacatcatctcgatcgccatacctcttctcactctctctt

SEQ ID NO: 7065 - DNA, 504 bp, Oryza sativa
  Clone ID: PAT_MRT4530_13695C.1
atgccgccgccgtgcgcctcgccgttgaccgcgccgcccgcgccgctcgcttctcctccggcgcggactcgggagtggcgggggcagctggagtggataatgcggcgccagcgggcggccggcggtgggagcggacggcttctccacctccacctccagcgctgccacgcctcctcgcctcccacgccgcggcggcgcggcctcctccccgtcgaccgcgtcggcttgtccctgtcgaccatccggcgggtggccaccagatctgcctttcccgactgcggggcggcgagggtggcaggaacagacggcggcgaggacgaagcggccggcagcgagcctgagggcgacggggagatgactccgatgccactaagctcgggctacgacacgccgatggagcccgggcttggaggtggcggggttccctgggcgttctggcggccgacggcgtggtcctcgtcggcgaggtcctcttgtatgattcctctttgtgttcttgtgtga

SEQ ID NO: 7066 - DNA, 554 bp, Oryza sativa
  Clone ID: PAT_MRT4530_13696C.1
atgtaccgttcctccagaccaacatcccccttcaagaaccccacggctcgccgtatccttttctcggatgcggtcaggaaggatggcatcttcctgaagatcaccgaaacatcatcctgcgaaaacccaagctccaccagcagccgtgttttcgtcgcgacagcctccttgcttaggaaagccaccgcaacgagcccacggtggaacaccctcgagccgcggaccatgcctagctcctccactcgcgccacggcgtcccggagtttcatgggattcgaggttcggcttcaccaccttgtcgaggttggcgctgaggagggaggagttcttcctgagggccctgaggatgctgtccaacgagccgaacaccgggagccaaaggcgaggttggtggccagggagctgctgcgaaaggggatcttggcgagggggacgaggcgcgcgatctgggagcgcgggatgcccaggtcgccgagctcggcgacgcgcttggcgaggtttccctccacgccggcgcacagcagcctcgggtcggcggcgacggcggtggcgat

SEQ ID NO: 7067 - DNA, 669 bp, Oryza sativa
  unsure (1)..(669): unsure at all n locations
  Clone ID: PAT_MRT4530_13697C.1
ccggccgcatcgtttcgctcctcctcctcacccagcatcgcctcaccccgtcgccgccatctctctcggccgcctcctctcaccaccgcgcccgtttcctccaaacccttcgccgccgaggactacctcgtcgccgcctgcggcctcacccgagcccaagcagccagggcttcggagaggatctcccacctcaggtccccctccaagcccgacgccgtcctcgccttcctcgccggcctcggcatcccgcgccccgacatcgccaccgccgtcgccgccgacccgaggctgctgtgcgccggcgtggagggaaacctcgccaagcgcgtcgccgagctcggcgacctgggcatcccgcgctcccagatcgcgcgcctcgtccccctcgccaagatccccttccgcagcagctccctcgccaccaacctcgccttctggctcccggtgttcggctcgttggacagcatcctcagggccctcaggaagaactcctccctcctcagcgccaacctcgacaaggtggtgaagccgaacctggcattcctcaagcaatgcgggatagatgcccgtgatgttgccagcaatccaaacctgtactccagccggctgttcacctngaatcccatgaaactccgggacgccgtggcgcgagtggaggagctaggcatg

SEQ ID NO: 7068 - DNA, 537 bp, Oryza sativa
  Clone ID: PAT_MRT4530_13698C.1
aatacaccacttcttttaaaattgcaattcgggttcttataaagtcaccacaccaacgggttgtggcagggtagcaacatgatgcatactaaaacacacgcacacaaacctaaaggcgagggatacagtttaaggatgcaaagcgaaagctaaactggaacacagctgctcaaggccagggcaaagtagatgactggatcaaataattcattgcctggctcgcgatttcgccctgctggcctcctctggggttgatgggaacagctccacgtaccttgtcccaatggtcatcttgtccttgcacatggctgtctttgcaacctctgctgttgggaactccacaaaggcttctccagtggccttaccatctggacggtacgcgatgtgcacattttcctccgtcagctcatactccacaaagaacttgatgatgtcttcagtggtagcagagtagggcaggccacggagcttgagcacctcaatatattccatgctgcatctgtcttcagctggtttcttgggccgtggaggtgggga

SEQ ID NO: 7069 - DNA, 1526 bp, Oryza sativa
  Clone ID: PAT_MRT4530_13699C.1
gtcccctcctcccccgcgctctccctctccccctcacgccgtcgcgtcgctgtccccgacacctccgcctccgcctcccgctcccgccgccgcaggtccgccgttcgccgcctccgttgccgaccgccaccgccccgcgccgccttccccgcctcagcctccgcctccgcctccgcctccgcctccgcgcatcgcaacgcaacctcaggcgcagaggcggcgacttgactcccccctccccgccctctcgctctagggtttcctcccctccccgtcgtcagccgccaccccaccccctcccccgccgggcttcgccatgtacggtcaccgcggggcaatgatgggaggcgggggggtttcggatgggtacgagggatcaaagaggccacgaatgatcgaatccaatccatacttcgcagtgaccgcaggcagtcccttggatgtctcaaagagggccaggatgatggaaccagcccctccctatttcggagccatgggcagcagcgctgctggtggcaccagtgccttctaccagccctacggcaccaacttacctggtgcaggggctaacagtgccatccagaactttccaggggtccgtctacgagggctcccctttgactgcgacgatcttgacatctgcaagttctttgttgggctggacatagtggactgcctcttggttcacaagaatggccgcttcaccggcgaggcttttgtcgtattcccatcagccatgcaagcagagtttgcactgcaccgcaaccggcagaacatgggcaggaggtatgttgaggtgttcagatgcaagaagcaagagtactacagtgcaatagctgctgaagtgaaccagggcggcttcttcgactcggagtaccgtcactccccacctcctccacggcccaagaaaccagctgaagacaagagcagcatggagtatactgaggtgctcaagctccgtggcctgccctactctgctaccactgaagacatcatcaagttctttgtggagtacgagctgacggacgaaaatgtgcacatcgtgtaccgtccagatggtaaggccactggagaagcctatgtggagttcccgacagcagaggttgtgaagacagccatgtgcaaggacaagatgaccattgggacaagtatggatcatgttgctaccgtgccacaacccgttggtgtggtgactttataacgagtcaggcaatgaattatttgatccagtcatctactttgccctggccttgagcagctgtgttccagtttagctttcgccttgcatgcttaaactgtatccctcgcctttaggtttgtgtgtgtgtgttttagtatgcatcatgttgctaccgtgccacaacccgttggtgtggtgactttataagaacccgaattgcatttttaaaagaagtggtggattatgagatgcctgcacttgtaacagcagttgcgcccggttggatgcattttgtatggcaatgacatgatcattgttttccttcaaagaaaaaaaccacgagcaa

SEQ ID NO: 7070 - DNA, 1792 bp, Oryza sativa
  Clone ID: PAT_MRT4530_1369C.1
cattggtctgataagtctttgatttgctagtaccggcatcgcctgcttcgctttcgtcacgttcttgatttgggcgggcgcggagatttagaacggtgctgaatttacaatcttgggaccaagaggagaactactctcaatgatggaaatggtattgccagtcgcgaatgctacggctgcggcacttgcacgggtttctgctgtgttcaatgccccacttgcccgtgctgttgtctttgggattcatattgatggacatttggttgtggaagggcttctcattgctgccatactgtttcagctctccaggaagagctacaaacctccaaagaagccactcactgagagggaggttgatgagctctgtgatgactggcaaccggagcctctatgcccacccatcaaggaaggagcacggatcgacacgcctacattagaaagtgctgctggacctcatacaactgttgatggaaaagaagttgtaaactttgcatcagcaaactaccttggtttgattggcaatgaaaagataattgattcctgtgttggctcagtggagaaatatggtgttggatcatgtggaccacgaagcttttatggaactattggttcgtatttgctctggctattttcaataatctatatcctatggcctcagaagaagaacttagccattttgtggtttgcagatgtgcaccttgactgcgagagtaaaatagcaaatttcctgggaacccaagattcaatcttgtactcctatgggatatcaaccatcttcagtgtaattcctgccttttgcaagaagggagatatcattgtagctgatgagggtgttcactgggctgtgcaaaatggtttacagctttcaagaagcactgttgtatatttcaagcataatgacatggcttcacttgcgagcattttggaaaaactaactcatggaaacaaacatacagaaaagattaggcgctatattgttgtggaagctatttaccagaattctggccaaattgctcccttggatgagatagttcggttgaaggagaaataccggtttcgtgttatattggaggagagccattcttttggtgttcttggcaagtctggacgtggccttgctgaacactatggagttcctgtggaaaaaatagacattattactgctggaatgggaaatgcgttagctaccgatggtggtttttgtacaggaagtgtcagagttgttgatcatcagcgtctaagcagctctggttatgttttttctgcctcgttgccaccataccttgctagtgcagcaatgtctgctgtgaaccacctggaggagaacccatcagttctcgccaatctaagatcaaacatcgcccttctgcataaagagttgtcagatatacccgggctcgaaattgctagcaatatcttgtcacctattgtctttctcaaattgaagacaccaaccggttctgctgttgctgacctggaactccttgagattattgcagagaaggtcttgatggaagattcagtcttcattgcagcaacaaagaggtcgagtttggacaagtgtcggctcccggttggaatccgcttattcgtgtcagctggtcacactgaatctgacatcttcaaagtatctgcatccctgaagagggttgcagcatcagttgtctagtgagtttatacggctgttgagcgactgttgatctcagcttcttacatgatgtgtcctacatttaggtacataatttgtatgttcatcgatctggcgcaattcattgtcatatttaccaagaat

SEQ ID NO: 7071 - DNA, 1578 bp, Oryza sativa
  Clone ID: PAT_MRT4530_136C.1
atggcacaggtttcttcggctataccgcaggctgcgttttcggttggcacaacaagttttgctgctggtccgtttgcaccggtgcaacctgctgttccggctgagatggcgcatgcttcgacactgccggtcagtgctgcgatgccgtgcatccctgtgtcgttagcggcatcaaatgcacctgttatggcagggacagcagaaggtgcttttggtccggttgatttaaaaggaaaagcaaaagtggaagatgctttactaagggtcatacgctataagaatgttcatcaaagttttattgtgatatctgtgaaagtgaggatcatttggtcaaaagttgatgtggcaattggtgatgacctgtatgaactggtttttaaagtggagccagaaaatggacctgatgagcctgaacctatgcaaatggagaatgaaggagggaatgataattgtaaaaaagattatgggagtaatctgcatgataatgttaaggaaacaggaatgtcaaatcctgttaaaacttcttcaattggcatgagtggtctttccaatgagaagggtgatatggtaaaggatatttggtcttcggttgatgagggtaacacccctttagagcgttggcaggctaaaattcgtagattaagacaacatttgaggggatgggctaaacatactagtgatgtgtatgaaaaagagaagaaagatttattacataagcttgatgtgattgataagaaggctgaaacagatcttttgactcaggaagaaattgatattctatattatttgaggaatagacttgcgtgtttactgagagaagaagagattaaatggcaaaggaatgctaggaattttactccattattttttgttgtaagcttgggaattttcatgaaacttagtaacaaggactggaaaataattgaggaaagaattgaaaagaaacttactagttggaaaggcaaacatttgtctgttggaggaagtttagctatggttatgatatctttttttgagattcctaaaggtgttcttcaaaaaattgattattatagatcacgtttcttttggcgaggagatgagcacaaggagaagtataggcttacaagatgggatattatatgccaacccaaagataagggtggtctaggagtgcataatttagaaattcaaaatcaatgtcttttgagtaaatggttatttaagctaataaatgagcagggtgtgtggcaagatctgttaaaaagaaaatatcttagtaatcattttttaagtcaagttacgaggaaacaaggggattcgcatttttggttgggtcttatgaaagtcaagactacgtttctaaatatgggtaccaggattgtgaataatagtgaacaagtaagattttgggaggacaaatgggtaagaaactatacctttaaagatagattcccatcgctttatgctatagttcttttcagggcaacatactggctccagtcttgggctcaattactaaagtgtgatgaagatataaagttagtgaagactgcatgtcacaaccttgtgtcaacggttatgcagttttttcgataa

SEQ ID NO: 7072 - DNA, 327 bp, Oryza sativa
  Clone ID: PAT_MRT4530_13700C.1
atggctgcaggtggcgatggaattggtgaagacctgggctgcgtgatgaagttggcggtgcggcggtggcggcggttggaagcggcggtggcggtgggggcatcggaagagcttaacggattcttgcgggatgttggccttgccgtaggcggcgataagggtggcgacggtggcctcctcgggggcaatggagaaggagggcatggtgtcgaggaggaggcagcgggcgtggttgagcatgcggtgggaggcgacgatcgggatgaggagggcgaaggtggacggctcggggttgaagccggcgcggcgttgtttgccacccaataa

SEQ ID NO: 7073 - DNA, 231 bp, Oryza sativa
  unsure (1)..(231): unsure at all n locations
  Clone ID: PAT_MRT4530_13701C.1
attccttctccttcctcctgcatactgtctntntntctctctctatctgatcagctgttccgcttcctcctcttcttctctcccccaaccccgtagccctcccacccatcgagccaggcggcgncgnganggccgntggctaaggcggnggccggtgccaaaatctcgagcaatcgcgtcggccgtctggccggnttgcgacatcgctcgtccgagggccccntgtcaccg

SEQ ID NO: 7074 - DNA, 271 bp, Oryza sativa
  Clone ID: PAT_MRT4530_13702C.1
aattcacatcaccatatttaatggggcaatatatggggctattattaaagaagcatattattgcctgattttacaccccaatagctcatacatcccaacaaaaaatcgtcaattcaacaccggcatcaacaaaaccccaaaactcacttttttttgacactgaccccatatgctccatctattatcaccgaagtcatcatgttcaagaacagtccatgctcaacaacgccttccaaagcttagatctactttcctgctgccaacgcattct

SEQ ID NO: 7075 - DNA, 390 bp, Oryza sativa
  Clone ID: PAT_MRT4530_13703C.1
ggagaaaaaccaagtatattcaacattcttcgtgtcctggaatatccggttatacagcagaagaattatacagtgctcgtgtgctagtacattttgggggtggaaacgtaccttctacctcgagcctgcttaaataattgttacaaaatgagaagtatgagaagacatcgacacaagattaccatttacacccaactcagcttttctaaggcagatcccagcagccaatttgcaaacaacaaagcaaatgggatatacagagtagagacatgcgaaagttatatgcccttcgtccaaaagaccatgcgtaaacagaagcagcagcaatacagttgtcaaggtctgccggcgatcctcttggctccaagaatgtccaaacccacgcgtccg

SEQ ID NO: 7076 - DNA, 290 bp, Oryza sativa
  Clone ID: PAT_MRT4530_13704C.1
ggcatctgaacaccttttttttttttttatgaatgggctaggataaatagactgtttacaaaatgcccaaaatttccctgggggcaggggggcagcacaattatatgatttcataccaaaatctattttaaaaacctaaataagatgggcccctcaatagctgggatttcctacaccgtgcataatttccaagttggaaacttttattcggggaaactccccatggcctgttctcactgcttcaaccccaaaatcggggaccaggcacccgccaaaaggaatattgttta

SEQ ID NO: 7077 - DNA, 1464 bp, Oryza sativa
  Clone ID: PAT_MRT4530_13705C.1
ctaggtgtacacctgccttcctcgtcgaatgggactgtatatgatccggccccagcctcctcctagatcagcacggacagattgctcttcgaactcctcttcggtctcatggaataaacctagttcttgtgcatcagagtcgtatgggaccaaacaatcctcagcgttaacaggagcctcttcatcttcctcgcttggaaattgttcgtcatagtcaatgatgagatcttctgggtttctcttggcgtggcgttctttaagagtctcaaatttcataccatcgagtggccaagcttcctctggccgcttgccccttcttaaagcaacgtagcaaaatttctcatcctcaaaaccacgcaaaggcacaccattggacctcggggcaaccacaaaagcaccatttttcaatgaggcttcttgacatacaatgctcttcatttcacttggagcagcacgtgtggatttttcaattttgcggcactttctcttttccatccaaaggatatacgagcgcatttggcttataatctttgctccttgaggagttccaggctctaacaaaaccaaaacatctcctgttaggtcccagagctgcctcactattgttattcggtcattcaaagaaggaatctccccgagtgcataagatgaaattacaagatcgtgccgccgctcatgtttttcaatgttgcggttcaactcttggatgctatcatagctatgaataagtggtaaccccttcaaattatcgagaaggttcttccctgctctttgcatctctttggatggctcaaccaaattaaccttctctatagactttggccacactgccctcattgcccaaagtgctgaactcggccctgctccaaaatccaacactttggcaggtgcaaagtctggtaacctccgacggacctcacggagcacacggtggcacgcggcgtagatggctggcatccgggaggcaacgtatgcgaccgtctcgtcctcgcggtaccgaaggccgatatctccataggcagaccgcaccttccaccgcgcggcccgctgctcggcgcctgagggcgcgcgcggatcgtcgatgagagcgccgcgcatggcagccgcagcgagctcggtgccggttccctttgcacgctcgaaggaggccgagagctgaagcaccttccggttcatgtgcgccttgtcctggtcgcggaggtaccgcttaatggcgcggcggagggagaggggcacgagctggatgccctgggactgcttggccgccgcacggatggtctccggcgtcagcagcctcggcgccgtctccggcaagagcgccgccgccatgtctccgctctcgctgcggcagcgttctttagagctaaccgcctttctcacccttctgcgagtatcagggttaggacttaggagtgggaaatgaagtggttccatactctgatagatataccgttggatcgtcat

SEQ ID NO: 7078 - DNA, 267 bp, Oryza sativa
  Clone ID: PAT_MRT4530_13706C.1
atggctggaggagggcgagattgcgatgacgacgacgtgcgcgagtggaggaagatggcgagtctgcgatggcaacgatgcgtgcaagtggaggaggatggcgaggagaggcgcacttcacaagtcagaacacaaaatgccttaaaattatggatgacaaatgaggttgggaggtcattattcgctaaggctggagaactcggagcaccagttggaatcatgatgatgaagaatacagtaggtgccaccaatgctattttacaataa

SEQ ID NO: 7079 - DNA, 1338 bp, Oryza sativa
  Clone ID: PAT_MRT4530_13707C.1
gccatctaattctgcctttgtttaattaagaaattgactgttatgaacatgttaaaatgatacttctgaggtgcacttctgaggtgctgggcttccgactgtgtactgctggttttcagccctcagagttattccaaaaaaatgttctgacctagaagaattcacgcgcatcttcctcattgagaaactaggtgtacacctgttacagatatgtattgctgaagcaaaaattaaaacccacagcacagccacaaacaatttatgagcagcgtcacccagcgaatccgttgctgaagagctccagatcttccacagaaatgtggttatcaccatagactaaactggccaaagatccccccaaagtgacctccgggcttgatgatgcatggtggggttcttgctttgggtgatcacgacacgctcgaatgcgccttccgatgcatcccgtttggtggcacggcatacatccagctgtacctgccttcctcgtcgaatgggactgtatatgatccggccccagcctcctcctagatcagcacggacagattgctcttcgaactcctcttcggtctcatggaataaacctagttcttgtgcatcagagtcgtatgggaccaaacaatcctcagcgttaacaggagcctcttcatcttcctcgcttggaaattgttcgtcatagtcaatgatgagatcttctgggtttctcttggcgtggcgttctttaagagtctcaaatttcataccatcgagtggccaagcttcctctggccgcttgccccttcttaaagcaacgtagcaaaatttctcatcctcaaaaccacgcaaaggcacaccattggacctcttgtaggcacgttgtgatgacgtcctctccaatctctgaacaaagtggcagtatttatctgtattctccaatggacaccgaccatcatgaggacacggggcaaccacaaaagcaccatttttcaatgaggcttcttgacatacaatgctcttcatttcacttggagcagcacgtgtggatttttcaattttgcggcactttctcttttccatccaaaggatatacgagcgcatttggcttataatctttgctccttgaggagttccaggctctaacaaaaccaaaacatctcctgttaggtcccagagctgcctcactattgttattcggtcattcaaagaaggaatctccccgagtgcataagatgaaattacaagatcgtgccgccgctcatgtttttcaatgttgcggttcaactcttggatgctatcatagctatgaataagtggtaaccccttcaaattatcgagaaggttcttccctgcggacgcggg

SEQ ID NO: 7080 - DNA, 345 bp, Oryza sativa
  Clone ID: PAT_MRT4530_13708C.1
atggtgtacgacggtgtgtcggtgttggaggccaccttcttcactggcggtgataggggatcgatgcaggggaggccgatggaggtgctggagatgatgctggagatggtcgcggaggatcaacggttcagacccctcgtcccccgccgcaggccgtcatccaccaggccggccgtcgctaatcgtcgccacccgtcgtcctcgccgcccttcctggttctcgtcaacgccacaatcgtcgtcgcccgctcgtcgcggcggcctgtccaggtcgtcgccgggatcttgagcttcggccgtcaccgccgccggccggcagggcgccagatctggtgtcttctctag

SEQ ID NO: 7081 - DNA, 165 bp, Oryza sativa
  Clone ID: PAT_MRT4530_13709C.1
gcattgattaaggctgaaggagcaatgtcggtgatggaattagaattgaacctagtgggagttggggtatggtcatcggagaaaaactccgccggcgaaaatgagtaccggggaggagttagcggtccgtctgtgaagataggttatggcaggcggagcacataa

SEQ ID NO: 7082 - DNA, 656 bp, Oryza sativa
  Clone ID: PAT_MRT4530_1370C.1
ggtttctgtacaggaagtatcagagtggttgatcatcagcgtctaagcagctccggttatgttttctcagcctcgttaccaccatatcttgctagtgcagcaatttctgctgtggaccacctggaggagaacccatcggttcttgccaatctaagatcaaacatcactcttctgcataaagagtttgtcagatgtacaggggcttgaaattgctagtaatatattgtcacctatggtcttcctcaaattgaagacatcaacaggttcttctgttgctgacctggagctccttgaggttatttcagagaaggtattgaaggaagattcagtcttcattgcagcgacgaaacgatcgagtttggacaagtgtcgtcttccggttggaatccgcctattcgtatcagctggtcacactgaatctgatatcctcaaagtatctgaatccctgaaaagggttgcagcatcagtgctctagtgacaaactgacaaccttgcatctggcatgatgtgttctacagttacgtaaaaatctgtatgctcgttgatctggctcaatttgctgtcgtgtctagcagaattacaaataaaattttgtaaaacagtttgaattaaaatatctggtagttttgttcttctaaaaaaaaaaaaaaaaaaaa

SEQ ID NO: 7083 - DNA, 351 bp, Oryza sativa
  Clone ID: PAT_MRT4530_13710C.1
atggtgatgatattggaagagagaagagatgccagctacgaaaggcaaagtgacagaaaaaatgggggtgcatcttctccagcctccatcgcctcaagacaggagcaacgacaagaggccaaaggctttggtttcgaagaccgtggcaggcaggcaggcctcatccaagctgtgcacctctcaactgttggcatcagctgcaaattccatagatatggcaaaggaagctctaatagcacatccaagtgtataattgaaaaccaggtttacacaagatgggaaacagattaccgcaatgctttggcgactgtggcattttgtggatccaactttaaggccctgcgaagcaca

SEQ ID NO: 7084 - DNA, 726 bp, Oryza sativa
  Clone ID: PAT_MRT4530_13711C.1
cggacgcgtgggcggacgcgtgggcggacgcgtgggcggacgcgtgggctgtggctctctggtctttggttacttcagggtaggaagatgagcacgttagatgccacgcgagcagagctcggccttgttgttctgtacttgaacaaagccgaggccagggacaagatatgcagggcgatccaatacggctcgaagtttatcagtaacgggcagcctggcacggcacaggatgtcgacaggtccaccacccttgctcgcaaagttttccggcttctcaagtgggtcaatgatctgcatggtcttatcagccctcctgctaaggggactcctcttacactggtcttgcttgggaagaacaaggagcgcacagaccggattgtaaggatatccctctactgctggatggcctcttcagtctgtgcagggctagttgagcttggagagcttaagaggctatcaaaatcaatgaggaagctggcgagagagctgagggatactgacaaatatgagaatgaccagtacaagagcaagatgaaacagtcggatgaacggctgctagcactggtgaaggcggccatggatgttgtggtggccgtagggcttcttcagctgtcacccaagaagatcactccaagggtaacaggggcatttggattcgtcacctcactcatttcctgctatcagcaacttccatctcgtgctcccgctatcaaagtgaaggcatga

SEQ ID NO: 7085 - DNA, 1235 bp, Oryza sativa
  Clone ID: PAT_MRT4530_13712C.1
ccggccggagaaatagccgtggggaagaaagccactgctcctccctgctccagtctccgggaggagtggaagggctcggcaaacatcaggtagccgtccctcctttatccacttcgctctcttctctgcagcgctgcatcctactccctggttagcaatagcaagggtaggaagatgagcacgttagatgccacgcgagcagagctcggccttgttgttctgtacttgaacaaagccgaggccagggacaagatatgcagggcgatccaatacggctcgaagtttatcagtaacgggcagcctggcacggcacaggatgtcgacaggtccaccacccttgctcgcaaagttttccggcttctcaagtgggtcaatgatctgcatggtcttatcagccctcctgctaaggggactcctcttacactggtcttgcttgggaagtccaaaaatgcgctgctctcgactttcttgttcctggaccaatttgtatggttgggaagaacagggatatacaagaacaaggagcgcacagaccggattgtaaggatatccctctactgctggatggcctcttcagtctgtgcagggctagttgagcttggagagcttaagaggctatcaaaatcaatgaggaagctggcgagagagctgagggatactgacaaatatgagaatgaccagtacaagagcaagatgaaacagtcggatgaacggctgctagcactggtgaaggcggccatggatgttgtggtggccgtagggcttcttcagctgtcacccaagaagatcactccaagggtaacaggggcatttggattcgtcacctcactcatttcctgctatcagcaacttccatctcgtgctcccgctatcaaagtgaaggcatgatggatatttgccgttgtagcccaaagggagtccatcactggaatctgcagacgtaattcttaagcatggattgtgagataatctgtctatgataatcagtatagaatactttcagttgtacgtatggtttatggcttcacacaataccctcctgaactgtaatgaacatggtttatgtgttcatgcatgtcttctactttgtactccaacatggctgccaaatttatactcattggagcatgtatgcccactactccccaacatgctagtagaatagaagtacaataatttcttttgagagagatatgttataatagttcttcactaatactaagtatctatggcat

SEQ ID NO: 7086 - DNA, 1180 bp, Oryza sativa
  Clone ID: PAT_MRT4530_13713C.1
tctcgcacgagggacacagcatagtaaccccggccgggatctcatcgaccatcacctctcccacacggggcgtacgtgctaagctgcagcacaacccaaagccatatatctccgataatggcgaactcaccgacgctgacaatgctggtgttcctagctattgggctatctctcgtcctctccgcagccggcgtgtctgtggagagcgtggtcaccgaggcgttcttcaacgggatcaagaaccaggccccgaacggctgcgccggtaagagcttctacacacggcaatcgttcctgaacgccgcccgctcctactcgggcttcgccaatgaccgcaccaacgacgactccaagcgcgagatcgctgccttcttcgcgcatgtcacacacgagactggacatatgtgctacatcaatgagataaatggggcaaacatggactattgtgacaagagcaacaaacagtggccgtgccagccgggcaagaagtactacggacgcgggccgctgcagatctcatggaacttcaactacgggccggcgggaaagaacatcgggttcgacgggctaagggacccagacaaggtggcgcaggacccgacaatctctttcaagacggcgctctggttctggatgaacaacgtgcaccaggtgatgtcgcaggggtttggcgccaccatccgggccatcaacggtgcgctcgagtgcaacgggaagaaccccggtgccgtcaacgcaagggtaaactactacaaggactactgccgccagttcggcgtcagcccggggggcaacctctactgttgagttgcatgcacacgctgctcggctcatcgtgatcgactgaataatgaacagagtaataataatgaataaaacgtttggtgcgtacgtacattgcatacgtgcacggtacgtacatgctggaagctaagtgacgtcaaagagtttagtactaaaaagtgatctttctattcgatgttactctatcttagggcggagtaagtataaatgtgtaataagaaataaaatgttaggatcgcgggatcgaaagatgagtaaacatgtgtaccggtggaccacttaaataattatttctccaacccaagtactttcatgcttttccaagaaaaattaaatacgtaaaaattttcccctgaaaaaaaaaaaaaaacaaaaa

SEQ ID NO: 7087 - DNA, 349 bp, Oryza sativa
  Clone ID: PAT_MRT4530_13714C.1
gcacgaggcaggtctctcagcagctcagcccctcactgcctcgcatccatcgcgtcgcctccacgcctccgctttcgcttgcatcgcgccgcctccgccctccgcctccagcacgggcgccgcctccgcctcgacgtcgcctctgcccttcgcctccagcgccagcaccgcggccgccgcctccgccctccgcctccatcccacctctgggcctccatcccgcctccgccttgtaccgtgggtctgtggctgttgtgacttgtgaggttcagacttgagatctatcctgtgataatttggtgcttgatgttgcctattgtttggtatttttgtgatatatatgtctgtg

SEQ ID NO: 7088 - DNA, 200 bp, Oryza sativa
  Clone ID: PAT_MRT4530_13715C.1
gcacgaggctcgcccaaaccgctgccgccgcctacatatacactcctccgcgtcgcaccaccacatccacaaccagttgcgccacaggcgcgcgagccaccaccgcaggcgagagattgtcgtcgtcgtcgtccgttgctccggccgtgacgacgacggcgtcatggcgtccacggatccgctgctcggcggcaaggagg

SEQ ID NO: 7089 - DNA, 553 bp, Oryza sativa
  Clone ID: PAT_MRT4530_13716C.1
atagcgaaggactattgctgctcaccagcaccggtaaactttatgcatcgtttggcccaccgggagtttgcccaccaacgtacttattttgcccaagtagaaggctctccaacggacgaagacctagaacccctgcggcggggcataactttcgcggattaccctaccagaccggcgatcgccaaaattatcactgaaccagattttccccccagaaatcctcccattcgttatcgagcctccattcccaccagttggttaagcattaccctaacggaggggcgcaatcgtcaggtacgtcgaatgacagcggcagtgggcttccctaccctacgattggtgcgggtgcaaatacaggttactggtcgctctccccaacagggcaaaggtaagtcagcagcaacttggtgcttaaccctagaaggtttgagtccggggcaatggcgacccctgaccccttgggaagaaaatttttgccagcaactcttaacgggaaatcccaatggtccctggcagaaaaaatttggcgatcctctacagtcagacctacagg

SEQ ID NO: 7090 - DNA, 388 bp, Oryza sativa
  Clone ID: PAT_MRT4530_13717C.1
gaatgatgttaatgtgcagcgcagcggcagaggggatggcaaatttgttgaggctgacctacagtctccctgctgcagcggtgttggcgaagatgaggcgctggacctccctgcttccgctggagtagatgtaggccttggcccgccaccgccgcagcgccttgaggtactaatacgcggccgcccgcctgccctcgacgaggccgacgcgtgccgcccccacgcccttggccgccgccgcctcgcgcaagcccgcgggctctcgccgccgcctccacgctgcgcgcgcgccctcgccgccgctgccccgcacgcacggtttcgcccacacctgaccaaaccgacgcacgggagtgcccgggtgggaggcatatctatccattcctaa

SEQ ID NO: 7091 - DNA, 160 bp, Oryza sativa
  Clone ID: PAT_MRT4530_13718C.1
atggcatgcgatgtactggatactggtatctgtccgcctcctgcatcggccaaccgtgtgcacagtgatagcagcagcatgattgcgaatggttgtgattcagtgtcggcggcaatgatggccggccgggccctgcgcgccgacggaggaggatgccccg

SEQ ID NO: 7092 - DNA, 669 bp, Oryza sativa
  Clone ID: PAT_MRT4530_13719C.1
atgcggagggagggagtggcatcctatgcggtttgggagctcgccaacaggcgactagggaagcaaaggccggcgggcggagagagagcgagcggcgagcgacgaccagtgcatgttgggtggatggaggcatgcggcgtggggaggaaggcggaggcccacggacaagtggagccacaggcctagctcgcacagtcgactaccgtttttaaccttcggaatatggttttgtgccgtacgatgccggagccgatccaatcttacagattttgggacaccggatgggcttcaagattcgtgcatcacgccttttcctccaactccggcgacctcctctttttctccggcgccggcaaggaccctacgggttaggatcgcggggtggggtggggtgggggtgggaaggggagggggaggggaggagttcgccggctctagaaggatggctgggggaggcggcagcccggcggtgggcggcggatcgggcgggcggtgaggcgccggcaacgccgcagggctggaggagggtggtgggccggcgtcggtggcgggggcacctcgccgccaacggctcaaggaggaaggggggaggggagggtctcgccggcgccgttgacgtcctccggccagccggcgaggcgggcggtggcggcggatcgggcagaggag

SEQ ID NO: 7093 - DNA, 1873 bp, Oryza sativa
  Clone ID: PAT_MRT4530_1371C.1
atggcggacgatcctctctccaactccaccaccaacaacaagagggcagaggggatccagctccagcacggcgactggagaacccacacctccataacttcaatttccaagttatatatatataaaaaaggcaatggcggacgatcctctctccaactccaccaccaacaacaagagggcagaggggatccagctccagcacggcgactgcgagagcgagagcactgcgcccttgctgctcgcgccacacgagtcctaccgcctctccgccgcaatcctccccttcctatttccagctttgggcggccttctctatggctacgacatcggagcaacgtctggtgctaccatatcgctcaagtcatccaccttcagtggcaccacatggtacaacttgtcatcgctgcaaaccggccttgtcgtcagtggctcacgctatggtgctctcatcggttccgtcttggctatgcatgctgcccatatgcacattacagagactgctccaagttagataagatgcatgctaattgctctcaactaattcttcattggtcgtgggttgcttctcggctatagtgctggcagtctttttctcgaactggtttataggtggcgctatgtatgtgcctccagtacacctttatgtctcatcaccgggattgggatgtgccgtttacctgcttctcataggtggcttctgttatgtgccgttgaagggaagaggaatattatggagtcaaaagaaaatgctacccgttgcttatgtcgattgaggggtcaagcttctcctgatttggtttcggaacaagttgatttgattctggatgaactgtcatacgttgatcaagagaggcaagcaggcttcagtgagatctttcagggaaaatgcctcaaagcaatgataatcggatgtggcttggtgttctttcagcaggttactggtcaaccaagtgtgctatattatgctgcgacaatccttcagagtgctggattctctggtgcatctgatgctactcgtgtatcagttcttcttggcttactgaagttgattatgactggtgtggcagttcttgtggttgacagacttgggagaagaccattactgattggaggtgttagtgggattgctgtttccttgtttttgttatcttcgtactacaccttattgaaggatgctccttatgtggctgtaatagcacttctactctatgttggctgctaccagctgtcattcggtccaattggctggcttatgatttcggaagttttcccattaaggctgcgagggcgtgggttgagtattgctgttcttgtgaattttgcctccaatgcactagtcacttttgctttctccccattggaggatttgattggaactgggatcctcttctctgcgtttggggtgattgcagtggcgtctcttgttttcatattcttcatcgtgcccgagacgaaagggctcaccttggaagaaattgaagccagcctgtagatccagctgccctgcggctgctggcacgtaggagaactgcttattattcagagatgttgcaagctgttggactgactgactgactatctttgtggtgtggtaaggtaacacagtgagatccattgagagtgagttatgttgctttcggtcgttgctttggttggagaaagagtatagttcaaacatatatgtccatactgggttgttgttcataatacatgagcacatcattttttttccttgagaacgatatatgtgtgattaatgctgtacagcaggagcagttggcttatgccatgttattgggcacctgctgaatatttggcatgatctaaaaataataatgtcttcgtcccagaataattacatttcatggaggtt

SEQ ID NO: 7094 - DNA, 267 bp, Oryza sativa
  Clone ID: PAT_MRT4530_13720C.1
caggagaaaaatgtgctgagttcggaagcatgtcgccagaaagaataaacaatattgtgaagttcctgggcatatcgccgcacatgaaattgtcgattttgtggagataatcctgtaatggtcctttcgacgtttgtgactccgtgttcggttgtttgttggatggagtacatgatgaaatgtcactctttgttggacgttagtactctttgttggatggagtactacagaatagtactagtagaatttttttatccatgctcattc

SEQ ID NO: 7095 - DNA, 186 bp, Oryza sativa
  Clone ID: PAT_MRT4530_13721C.1
atggggtggctagccaaggccacacaaaagacacggcagccacctggtcagaccgaactgagcacagtcacaccggttggacatgccggccagaccggccggtggccctcggttagaccggtgacggcactggcgcctcggtcttgcgagaccgaggccacaccattcggttattacctctcttaa

SEQ ID NO: 7096 - DNA, 764 bp, Oryza sativa
  unsure (1)..(764): unsure at all n locations
  Clone ID: PAT_MRT4530_13722C.1
gactcctatgggcgattggtaccggtcgaggccggcggccgctaccgccgccgcgtcttcttcccccaacttcgtcgctccgcttccctctccgatccgaagagatggcggtgccgctgctgacgaagaagatcgtgaagaagagggtcaagcagttcaagaggccccatagtgaccgctacctaggcctcaagacaagctggcgcaggcccaagggtattgactcccgtgtcaggagaaagttcaagggatgcaccttgatgcccaacattggttacggctctgacaagaagaccaggcactacctccccaacaagttcaagaagtttgtggtgcacaatgtctctgagctggagttgctcatgatgcacaacaggacctactgtgccgagattgcccacaacgtctctacgaagaagcgcaaggagatcgttgagcgtgctgcgcagctcgacatcgtggtcaccaacaagcttgcaaggctccgtagccaggaggacgagtaggctgttttatcagtataatgttttggtctggtttgattgtaggaaactgtcgcgcctccaagtattctcctttcaatcgatgtggtactgtgaaagataactattatgtcaacctttttgctaccagcagctactctaatgtggccaaattactatcgcatcattagcctacaaaaaaaaaaaaaaaaggggcggccctggatgaatgctgnattgtatctgttggatttatttgtgttgaggtatcgtcctgatcac

SEQ ID NO: 7097 - DNA, 195 bp, Oryza sativa
  Clone ID: PAT_MRT4530_13723C.1
atggccgaaggcgatggtagaggtggtgctcaccggagtgcgaggggatgcgggttccggcgacggacctcgacggaggaggggcggacgggcgggagcggcggcggcgggtggatgcacggcgcgggagcgatggagagctcgggagagttcgacaagatggggaaaaagagagggggtggcggtggagcttaa

SEQ ID NO: 7098 - DNA, 885 bp, Oryza sativa
  Clone ID: PAT_MRT4530_13724C.1
atggcggtgccgctgctgacgaagaagatcgtgaagaagagggtcaagcagttcaagaggccccatagtgaccgctacctatgcctcaagtttgtttcaaattcatgggttggtttagtaggctatggaagtgttttggatttgcttgaagtatgtggtgatttgcttagtcttgatacacacaagtgctattttgctaactactactccctccgtttcacaattatatcgaagtttgtttgcaaagtctgttatggacttctatgcacttctattgcaccagttgtcctgccaagctggcgcaggcccaagggtattgactcccgtgtcaggagaaagttcaagggatgcaccttgatgcccaacattggttacggctcagacaagaagaccaggcactacctccccaacaagttcaagaagtttgtggtgcacaatgtctctgagctggagttgctcatgatgcacaacaggacctactgtgccgagattgcccacaacgtctctacgaagaagcgcaaggagatcgttgagcgtgctgcgcagctcgacatcgtggtcaccaacaagcttgcaaggctccgtagccaggaggacgagtaggctgttttatcagtataatgttttggtctggtttgattgtaggaaactgtcgcgcctccaagtattctcctttcaatcgatgtggtactgtgaaagataactattatgtcaacctttttgctaccagcagctactctaatgtggccaaattactatcgcatcattagcctacatgtcctgcattttgcgtttttgctctggatgaatgctgtattgtatctgttgaatttattgtgttgaggtatcgtcctgaccaaaaaaaaaaaaaaaaaaggggcggcc

SEQ ID NO: 7099 - DNA, 2106 bp, Oryza sativa
  Clone ID: PAT_MRT4530_13725C.1
aacagaattcagagataccgtagttgcttctattctcgaaaatttactgaaaattccacaaaggaaggattacatcatgactgactattccctaagggcacagatcaaaattggtaagatccactaattgaacacaattgaggaattgcaggtacctgtttctgccatctctacagttatctagtggctctgaaaatatatcatcttagcattttaaagctaatctatctctccatcaacaatgaaatgcctcataagaacaatttctttcacaagattcctgtaggtgaatggtcggacagcggccctcagaaagtgcccaggagccttgctcttgcgcttatcttttgcgcttctgccccttggactctcctgctgctcatcctcatcctcaatctgctcctgctgctcatcctcatcctcagtctgctcctgcttcataaccattgtgtttgcacgggccattctcaattccatctctttctcctgttgcatccgtcgcctgttatactcatttgacgcttcgatgcttgtcttgaccaacttctccattttatcagaacttttcatggcctgcttccattgctcatcccagtacttctcactctcatcatcactttctacttcttctgtttccacctcttccctgacatcgattacttcgtcgtcatcataaccaggttcttcatcatcatcggtatcaccaccctcatcaaacccatcatcctcaacccaatcaacaacctcagttccactctcatcaccaccctcatcgtcactctcgttatcatcaggcgcatcgcatccaagctccatctcctctagcttcaccttccattccttggtgtagggatggagcagttccatgggatgatttgtgagcaggaactccaggcacctgtttttgtccacgtcgctcagtttcgagtacgcattcacaacatcatccacataagcttttggactcgccttcacaatcctgcataggccaccgaagtaggtagtgcgaatgacctggccatcatgctcgagatcaaacaagaactggttctctgtcacgggatcgaccaaagggcggagctggctatagaaattcttctgcggctcgaaccgcgactggtagagcggccgcttgacatatatgatgtctgggcgcgtccatgccgcgcaccgtgtgatcagctcacgcgttgggttgccaagcctccccatgaggttccatttgtcaagccgctgctcctcgctggcctggatggccacctccgcggagagcgtccactgctcccaggggagctcgtcggggcgccacctagggtgtctcacgaagacccagtagtaccggaagccgacggcggcgtcgagctcgttgaggcggttggagaactggttggacatgtcgaactgctcgacgcggtcccactcgtcgtggtcggagacctcggacatgagggagacgcggtcgtcggagaagcggccgcggatgggcgggccgacgacgatgccgcgccaggagtagggcccgtagcggccgaacctgtaccagtcgtgccggtggcggaggcgcgggtcgtcgggcccgtccatgaagcggacggagcggtcgtagccgaggccgatcatctccagctcggcgtcggtgaaggcgtcggcctggttctccttggcggcgcgccgcttcctccggtagaaggcgttctcgccgaggcggcggctgcggatgcgggcgcgggacttggcctcgcgccgcacgtcgccgccgccctcgatgcgtccccccgagggcttcctgtgcttcttgctgcggcctgcgcgggccacggtggggtgttcctcgggcgggtccgtccgcggcgggcgcggaggcggggtcgaggaggcggggaaggaagcggcggcggcgccggcggcggcggaggaggaggatgcatggatggtggtggagttgcgcctgcgtcggagggcggcgggaggcggcggggagacggtggcgaggaggagggggtggacgaggcggaggccggagtagtgggggttgcggcggaggaggcgaggggattgcggggttttggggtagaggagggtggccgagccggacgcggacgccat

SEQ ID NO: 7100 - DNA, 1472 bp, Oryza sativa
  Clone ID: PAT_MRT4530_13726C.1
ttttcgtgcttctctggaaaaatcgaagctgcctgatctaaattctaatagagttaaaagaagaacattagttacatctaagctgttacacgagctagcacgagatgagctatgtcgcccgactgttgtacagacactaggcaaaaccacagcgggctattataacttataatagatctctccctctacatacaacacgagagcaggtaggcgcacacgctaaagtgctaaaaactacagcagccgacgagcagggcagggggggtttcgcttcaagattgttggtctctgaagaggcgcctccgcttggaggttggctgcttctcctcgggcgtctccgcgaccaccatctggtcctgctgcatcaccaggccccggttccgggtgagcttcctgataggtgttctttgcgcgcatagctccggtggatcagcctggtcatgatcttcggcgcaggggatgttctcggggttcctgtgtggcatcagttcttccccgtccggaacgacttcttgcataagctggaaatggatgacaaaaaagagggccaattgtagattagttgatgcccagaacttccagtctttgaaatcaaatctgaaaacaaaatggctgtaggagacttctcctgaggctatcgcactagcagcaggagcatttctaggatagactatatgatgcccgttgtcatctatgtttattgccaccctgccatctttaactaggaaggacagtgcaaaaacgttctcaacagtttgggcaaaagaacgcctgttcaaaacaatgttctccagccttgcccttttattcctcctcaggatatcaaatatgacagacacattcctatcagtgtctgtctttactccctccaaagattcagcaagctgttcaggacgagcattttccgttggcctcgcagtccgttttctattggcaaccacagccttccgttgttttacttctgtattcatgggtccaagcatagtgcagcatccaggtgcagccctgaagacatgggacacagaaagcccaacatccccccagcgcaatgaggcagcctcagaatcaaggccccctgattgcccaaatttcttcagcatggctgttacgaaatcagagggagtgattccttcacttgactgagacctaacggatgttaccaaagtgtttgcaatgtccaacagagtttctgcatcagctatttgctccctaggcctctgcacgagctcgtgcaggcagtccacctgcgtgatgatggcggcgaacgtgtcggagcccgccctcgccatgtcatccttctcatccaaaaccaaaccaaaccccacccccacggcgagccccctaccgctgatgagattcttcacggcgaggtaccgcgaccggagcagccgccgctccgcaaccccctgctgctgctgcctcccgccgccgccgctgctgccctccgccatgagctgggggcggggcgggcc

SEQ ID NO: 7101 - DNA, 1032 bp, Oryza sativa
  Clone ID: PAT_MRT4530_13727C.1
atggcggacatgatggacgagaagtatgggaaaatcggtggaacttccattgaaacaccgcttaattgcaaacaactcattagtttgaactaccctggtgtcgtcaagaatccttcgatgatgatagaaacacttggtggagaaagcaagttgacaaagtatgtgtgtgaagagaatcacttccgtgttcgctccatcgcagcgaatttgcaaatgacgcacttgccgatgtgcaagagattgccagataaaagagaaaatcgtatcactctgcacatgtttgcaatggaacatccggtgggtatcatgtactatgcagcttccgtttattcgatggctttcaatgatgaccatgcacccctctcactcaacttccagcctggtaacccttactgtaagccagctcgaggcgtggcctgcaggtctacatccctactcatgaaggtcaaacgtcgatacagaaggaggagagagagtgaagatggaggtctgaagactggttcccagggggagagggatgggaattcagcaaacgggcaatattctgcagaggttcttggtgtgattggacaaaaatatgaatttccatacctgtgtgactttcaatacctgccgtgcgaacaccaatccagcgggggagaagcggagagcctcattggaaagattctcccttcggccggtgaggatattagttatgtggacaaagacactccatctttcatgctacctgagatgttctccaagtttgacaaacccatcccttacaattacaaggcaggccaccagctcccgaactctaagcaacagcacgagatggactttcgtgccaagctaatccagcacgggaggcataagcggaccaactatgcccatgttgtgtcaaccatgggtgattttgagattcccaagaaaccccatccgattgctgtagaacagcttgaagctcagaaaccaggagctactacggatgagattacaaaggggctcttaaaaaaaagggccctgagagccttctcacagaggctcttttag

SEQ ID NO: 7102 - DNA, 228 bp, Oryza sativa
  Clone ID: PAT_MRT4530_13728C.1
atgcgggccccgcatgacagtggcacaaggggaggaggtggtacctggcaagtgggtcccaccaggcagtggctagtgggagggggtggcaccggccgggctcggctcggcttcaagccagctgcctggccatggcgagcggcggcggcgcgcgcggtcacgacggggactggcggcgcgggagacggcggcggccagcacgaaggcggcagcgcggaccggcactag

SEQ ID NO: 7103 - DNA, 1193 bp, Oryza sativa
  Clone ID: PAT_MRT4530_13729C.1
cgcgagtataggcaagtaagccagcaatcattggcccgcgcccaagcgcgcaacatgctgcgggatgaaaacatggcgacgaaaaatgtgacacagcaaaaagattataatgccaagctgtcagactttggcctagcacgaactggacctagtggagaccaaacccatgtatcaactcgggtcatgggtacttatggctatgcagctcctgaatatgtcatgacaggccatctgacagcacgaagtgatgtctatggctttggtgtcgtccttctcgagatgatcataggcaggagggctgtggacaagagccggcctagccgtgagcacaacctagttgagtgggcacgtcccctcctcgtgcacaatcggaagctgttcaggattatcgatccaagaatggaagggcagtactccaccaaggctgccattgaggtggcaggccttgcgtaccgatgcttgagccagaatcccaaaggacgacccaccatgagccaggttgttgagacctttgaggctgtgcaaaacatgcctgaatgccaagacatactcttgcagaactgcatgacgggtgcagtgacactctacgaggttgcaaaggaccctacggagagcgtcgagccggagaagataaaacaagaacaaccagcagcaaaaacggtcaccgtggcaccggcaccggtaaatggaaaacccgtgcctcagagcaggagaacacggccagggaatggccggagcaagagcgagccgtctttggaatgcaagctgtacatcccatctccagactctgatggccagcagccaggcctggaggcattgtcatccccttccagagatggaagcataaaggatccaccggacgaggatttgtacaagatataaaagtcacacagaagttttttatgacgattcaagttttcgctaccggcgatttcgcattgccatccatccatcttgttgtcaagatcgatcagagtcaaagttggtgttaaaattttttctgatggcggaagaactctacctcgttaggtttcttgctgttccgactagcaattgtatgtagagaggagcgttgtggaaagcatttgtaatgtgagatgcctgccgcgacgaaaagttcgtgttgtaaacttgaaaccattctctgggaagaggaagatccacatcataatcgatgtgtcagtgttgttgtt

SEQ ID NO: 7104 - DNA, 609 bp, Oryza sativa
  Clone ID: PAT_MRT4530_1372C.1
ccgggctgcaggaatcggcacgagggccacaagcagaggccgcgacattaatctcacaggaaatctagtcgtctagtaagctctactgccaaatcttgatatcttgaaagctttcaattcagcttgcaatatatcaatacctgttcccctttcctaattcctacccttcctcctcgtgctacagccctgccgttctttgggatgatgatgatggtgagattgcctgctatgttcgtgatctgcatcttggctgttccgctgctgccagcgctcggctcggagccgccgtcgacaccggtgccgaccgttggcgtgacggcggcgagccacctcgtcggctccggtggccacagctacttggacgtcaggttcttggatactgtgactgtgaccatcccgtcctcgacgaccttgcatctccgtccgggatcgctagagctccgccctctcccgccgctcccccgcgtcggcccaccttccggcgagttcgcctctcggatcttcgcctccgaccccagcaccacgccacccgtcgccgttgaggcctcgtcctcctcgctatccccttcctcgccgtcggcctcctcccccacgcttggctccggctag

SEQ ID NO: 7105 - DNA, 203 bp, Oryza sativa
  Clone ID: PAT_MRT4530_13730C.1
tcatagatcccgcccatttagtcaaggagaaatggagctgacaacagcacacaggggagggcaagaaggcaaacaaaagcaagcccaaacatttttgagcatgcttgataatttatccagccctcatagacccaaaaaaaaaaaatggcacccttggacatcattacaggacggacgaccgatgggtaaacaaggtagggaga

SEQ ID NO: 7106 - DNA, 465 bp, Oryza sativa
  Clone ID: PAT_MRT4530_13731C.1
atggcgtgcagcggcgcagagcagagctattcaggtgctcatacagcattgtggagcatgaagaagtgcagaatcacatgtagccatgtggtggcggtggcggtggcggcggcggtggcggtggcggcggcggcggcggtggcgcggtcgcgatgggcaacacctggcgaaatcggagccctaggggggcgtcgctgccatgtggggcccaccgcgcagtgcctcctcggccaggctgggagtggatgcggatgtggatgtgaagctttggtggcggcgacggtggcgacgtacacccacgcttcacgcttacgagcgttcatgccgccgcgcgcaggcctcgcccggaagtacggcgacagacggtgcatgttcctggctgcgcgcgacgccgtgatggccggcgaggtcgacgcaaaccatggcggcggcaccatgaatgccaggctcgccgtcgtgcgctga

SEQ ID NO: 7107 - DNA, 1790 bp, Oryza sativa
  Clone ID: PAT_MRT4530_13732C.1
ctgcaggaatcgcacgagggagagaactagtctcgagttttttttttttttttttcagggggataaaaggagagataatttcattgattcagtaatatacaattatacatgatggtgttctgatcatcacgataaattattgatagatatataagaaggatctacatatgttccatggatactattgtactcaacaacaactaataatgctatacctttgaagcacagagaaagtgaagcatccttggcttcacaatctcggaaatctttataataactaagaaaagcaacctgtaaattatgatcattgcaactaatatcgcaagatccacccacttagagtagcttaattccacctgtaagtaattctttaggatgtattcgccactaatcgtgagcccgccaccgccaatatcttcaaagaccaagcccaacagctcattcttgtacagtccctgcgttgcatacttgtggtaggagatgaagtatgttgggtatttccaaactggttttggcagatcacttgggagtctgaagaaaccagcgttgagcatcagtacaccttgtacaccagagccagtgattatccctagcagaaaatctggcacaactgctgcaacaatcatcatcaatccttctaccagcattgtgcaggcccacaaaactgcagcaaagtagatgaagtggtctattcctctttgaagccctgtcaggtaataggctattgcccctggaattatggagatgaggcctaggtatggaattgaggagagtgtgttggatatcacaaattctgttgcaccataatgcccactcatccgttcttttcgaaatatcttcatatcttcaacaaaagatggaaaacctccaattgccatcattgttaatagggttgatgtaaacattagcatggaagctcttgcttggattgatgcaaaatttgagccaacattaaaaaaaattgtaccaatgcttaagcaaatggcaatgtagataacaaatcgcaaccaatagtagcctgcatctctgtgcatgttaacaattgatcttttggttagcacatatgttttggtcaagaatgttgcctgcctttgaggaattggagaggcaccctcaaagtctttgttaatcattctcaggaagtgatcagaaggattcctcctcaagggacatgggaagccattagattcgaagaactcgattgcatctgaagctgctccaaaatacaccgtcctcccagtggccaggaggcagaggccatggaagagctcgaacatctccgtgctgggctggtgcacggcggcgacgaccgtcatcccgtccctcctggcgaggccggcgatgcggctcatgacgtggtacgacgccgcgctgtcgagcccgctcgtcggctcgtcgaggaacagcagcgcgggcgacgccagcagctcgacgcagatgctcacccgcttccgctgcccgccgctgatgcccttgcacacccggccgccgatccggacgccggcgaccgcgccgagccccatctggcggatggcgcggtcggcgcgggcccgcttgtcttccgccggcatcgagtccggcagctgcagctgcgccgagtagtggacggcctccgtcaccgtgagcgtcgccatcagcacgttttcttgggtcacgtaggcggatgttccaaacgaaagtttctctcgcaggccattgatcaggatgtctcctctcattttcatgttggggctcagcctccaaactgggaaaaggagaggagatagctgcagcccggaggctccatccat

SEQ ID NO: 7108 - DNA, 366 bp, Oryza sativa
  Clone ID: PAT_MRT4530_13733C.1
ctagggtaggttgccgccgccgccgttgcctccttccaccgtttgcctcaacagcgggaggctgtagcagacgcccgcccccgggaggccctcacgaccgcccgcatcgattccagaggacgctgtcgccggcgagcagccaacgaacttgccgctcaagacgctgtggctggattgatggcgctgagtaatggaccaatccaaggcgccggcgtcgacaaggacagtaacagtggcgacgtggtttgcagggtgaagcgcacggaatacagccccccgatcgaaggcgaatacgacgacaccggtgatcccaggaaggtggacgttgtttctagtagcgtccagacaatttctagtagcgtccat

SEQ ID NO: 7109 - DNA, 492 bp, Oryza sativa
  Clone ID: PAT_MRT4530_13734C.1
ctctctaaaacaaccatccaaccagaaccaactaggtagctagagagggagggaggagaggaaaaaagaaacaaacaaaagaaagggaggaagagaaaaaaaaaaactagagattcattcaactaacaagcccgcagcagctaagctaaatataggagctaggaaaagaggggagagaggaggtcgccgacgcagcaagaagagagagagagaggaaggcgagaggccggagaaggcggaggcgcgcgcggcgttgcggccggcagcggcacgaagtgcgcagaaaagcttcgtcgtcccacggaaaggtgctccaggatcagaagccggatcgatcgatcgatggcggcctcgtcgtcggcgtcgtcgttgccgctgtcgtccggctcggtgatcaccgtctcctcgtcgccggcggtgggcgcgagctccggcggcggcggcgggtcggggtcgccgtgcgcggcgtgctcgttcctgcggggctgtgcc

SEQ ID NO: 7110 - DNA, 576 bp, Oryza sativa
  Clone ID: PAT_MRT4530_13735C.1
atggttttgaaggtcgtgctcatggcaattaaggaccggttcgcgagctacagttgtgaaacattaaccgtgccaaccacaagccagcgccgcatgctcgccgtcgaccccaacacccctggtgacgatcctctgttcgcgcacgccggctccctccactccggctcccttgccatctcccccgcgctgcctcgacgccggctcgctcgtcgtctcccaaacgccgctgctcgcgaccacaggagaaggaacccgctgcacaacgctcttcccggacgccgcgtcgccctttcttctcagaccttcccggtgaaagcggcgttggagcctgagatcaagcgccgagcggcaagaacaacagtggcggcagcagcaagcccgacgtccggctccctgtgcgccatgctgcctgactcttgctcgccccacaggccacagctcggggtgggttgccgccaaattggggtgcggcggcggcgcacgggaggcatgaacggcagcggcgcgtgggaggaggagacagtggcgagcgagtccggtcgcgatgaggacgaggcagcgccgtggcgatgttga

SEQ ID NO: 7111 - DNA, 1125 bp, Oryza sativa
  Clone ID: PAT_MRT4530_13736C.1
atggatgacaacggcggcatccttcctctccctgtcggcgccatccacctccgcctcgtcctcctgcgccagatctgcagcgggcagcgtccagcaggggagcaactgcacgacatcctcgcgctggtcgggacccggcaggccatgcggacaagcatcctgtcgcgtgcgggggcgagggtgtggcggtggtgggctgcgatagcttcgaggatttcgccgacggttccacctcgcctcgcaggcctcctccccaccagccggccagcctccgcagagctcgcgtgcgctaacctcgtcgaccagggagacttcgatggggcacgccgcgtcgtggatgccgtgctctctgccgctggccctcggggcgaggttagtgaccgcctcgcgcatcactttgcccgcgtgctcctcgctctatgcagtgaagacaagggaggccatagcagtgatgaaggcacgtcagagacaagggaggccattgcggcgctcgaccgcggcgtgctcctctgttgcaccggcgaccgtgaccgtcgcaccatcctgccgcaccctggctgctctccgccggccatcgacgtggagaggagaggagagaggaaggaggagcacagtgcgcgcggcgcggccgtctccctccacgccggctcccttgccatctcccccgcgctgcctcgacgccggttcgctcgtcgtctcccaaacgccgctgctcgcgaccacaggaggaggaacccgctgcacaacgctcttcccggacgccgcgtcgccctttcttctccgaccttcccggtgaaagcggcgttggagcctgagatcaagcggtccttctcgattcagtcctcctcctttctcgtctccaagcagcattacgttctgcttggtttcagccgagtggcaagaacaacagtggcggcagcagcaagcccgacgtccggctccctgtgcgccatgctgcccgactcttgcttgccccacaggccacagctcggggtggccggttgccgccaaattggggtgcggcggcggcgcacgggaggcatgaacggcagcggcgcgtgggaggagacagtggcgagcgagtccggtcgcgatgaggacgaggcagcgccgtggcgatgttga

SEQ ID NO: 7112 - DNA, 1095 bp, Oryza sativa
  Clone ID: PAT_MRT4530_13737C.1
tcagattgtccacgtcatcactttgtctttcccctcttctctcccttcctcctttctctcactttttcttctcagtccgagcaagccagccggcggggcgagggtgccaggcaggagaggaagatgtcgggaggccggcgaacggcggcggccgcgacgatgtggaagcaggagggtctccccccacgccgccaccaccgccaccgccgacggcgcaggcgccagatctgcggtgacgtcctcgcgctccccgtcagcgccatccacgtccacctcgtcctcccgcgcccgccctcccatgccgccggcctccgtcgcctttccacgtgccaccatggatgacgaccatggatgacgacgacggcgacttccctctccccgtcggcgccatccgcctccgcctcgtccacccgcgcttgccctcccacgccgctggcctccatcgtctctccacttgcgggcatggatgacgacggcggcgacctctctctctctgttggcgccatctgcctccgcctcgtcaacccgcgcttgccctcccacgctgccagcctccatcgtctctccacgtgcggctatggatgacaacggcggcatccttcctctccctgtcggcgccatccacctccgcctcgtcctcctgtgcttgccctcccacgccgccggagcaggagggcttccctcacgccgccgccgccgaggcgcaggcgccagatctgcagcgggcagcgtccagcaggggagcaactgcacgacatcctcgcgctggtcgggacccggcaggccatgcggacaagcatcctgtcgcgtgcgggggcgagggtgtggcggtggtgggctgcgatagcttcgaggatttcgccgacggttccacctcgcctcgcaggcctcctccccaccagccggccagcctccgcagagctcgcgtgcgctaacctcgtcgaccagggagacttcgatggggcacgccgcgtcgtggatgccgtgctctctgccgctggccctcggggcgaggttagtgaccgcctcgcgcatcactttgcccgcgtgctcctcgctcatcctgccgcaccctggctgctctccgccggccat

SEQ ID NO: 7113 - DNA, 585 bp, Oryza sativa
  Clone ID: PAT_MRT4530_13738C.1
atggacaaaattaaggatagagcgattttactattttgcccttcatcccttttggacgacagggaggagcacagtgcgcgcggcgcggccgtctccctccacgccggctcccttgccatctcccccgcgctgcctcgacgccggttcgctcgtcgtctcccaaacgccgctgctcgcgaccacaggaggaggaacccgctgcacaacgctcttcccggacgccgcgtcgccctttcttctccgaccttcccggtgaaagcggcgttggagcctgagatcaagcggtccttctcgattcagtcctcctcctttctcgtctccaagcagcattacgttctgcttggtttcagccgagtggcaagaacaacagtggcggcagcagcaagcccgacgtccggctccctgtgcgccatgctgcccgactcttgcttgccccacaggccacagctcggggtggccggttgccgccaaattggggtgcggcggcggcgcacgggaggcatgaacggcagcggcgcgtgggaggagacagtggcgagcgagtccggtcgcgatgaggacgaggcagcgccgtggcgatgttga

SEQ ID NO: 7114 - DNA, 795 bp, Oryza sativa
  Clone ID: PAT_MRT4530_13739C.1
atgacgacgacggcgacttccctctccccgtcggcgccatccgcctccgcctcgtccacccgcgcttgccctcccacgccgctggcctccatcgtctctccacttgcgggcatggatgacgacggcggcgacctctctctctctgttggcgccatctgcctccgcctcgtcaacccgcgcttgccctcccacgctgccagcctccatcgtctctccacgagggcttccctcacgccgccgccgccgaggcgcaggcgccagatctgcagcgggcagcgtccagcaggggagcaactgcacgacatcctcgcgctggtcgggacccggcaggccatgcggacaagcatcctgtcgcgtgcgggggcgagggtgtggcggtggtgggctgcgatagcttcgaggatttcgccgacggttccacctcgcctcgcaggcctcctccccaccagccggccagcctccgcagagctcgcgtgcgctaacctcgtcgaccagggagacttcgatggggcacgccgcgtcgtggatgccgtgctctctgccgctggccctcggggcgaggttagtgaccgcctcgcgcatcactttgcccgcgtgctcctcgctctatgcagtgaagacaagggaggccatagcagtgatgaaggcacgtcagagacaagggaggccattgcggcgctcgaccgcggcgtgctcctctgttgcaccggcgaccgtgaccgtcgcaccatcctgccgcaccctggctgctctccgccggccatcgacgtggagaggagaggagagaggaagtga

SEQ ID NO: 7115 - DNA, 518 bp, Oryza sativa
  unsure (1)..(518): unsure at all n locations
  Clone ID: PAT_MRT4530_1373C.1
atgcagatccaacggccgcaatcaaacggcccaaaatacgcgcgcccctacgctcgatgccgcttggcgcgcgcgcgcgcgcgcgcgacgccgngacgtcatcactatccccgcaatggcaagagacacccatggcgcgaggcgccaccaagaatagccaccgtctcctccgtgcttgtctcgccgccggccacctatatagctccggcgcgcgccatggcgaaacctcaacacgggaaacccagggcccatagccggacgaggtgctcggtcgatcgacgcaccatggcccgcgctgatctcgccctcgtcgccgtcctcctcgccgcgtgcgccgccgtggcgctcgccgcggaggcgcaggccccggcggccgcgccgaagtcgtcgtcgtcctccaactcctcctccggctcacatacctcgccgtcgaaggctcccagtcccagcaagtctcccgagaagtccggcaaggctcccgcggcggcgccgcccaaggccgccgccgaccaggcagc

SEQ ID NO: 7116 - DNA, 303 bp, Oryza sativa
  Clone ID: PAT_MRT4530_13740C.1
atgtcctccccggacctcggctcctcactcgtcaccctctctatgcagtacgttctgcttggtttcagccgagtggcaagaacaacagtggcggcagcagcaagcccgacgtccggctccctgtgcgccatgctgcccgactcttgcttgccccacaggccacagctcggggtgggttgccgccaaattggggtgcggcggcggcgcacgggaggcatgaacggcagcggcgcgtgggaggaggagacagtggcgagcgagtccggtcgcgatgaggacgaggcagcgccgtggcgatgttga

SEQ ID NO: 7117 - DNA, 349 bp, Oryza sativa
  Clone ID: PAT_MRT4530_13741C.1
ttgagattactccctagtatatgtaggcatgatataaacgaaatatgaagatatcaacatcaagccatccaagtgctggaatacgacttggccacctattacattcctgatttcagacggccacaaaatttacatatgagctccattttggtcacaataacataaataaggtgttgcgccaccaataatgggcttatggacctgtaacttcgtgtgggaccatgggccaataataggatttatttgcaccggcgagataaaacaacctgtgaagaggtgtatcgattgcttaggcgcaaagtaacatctcgtatggttgtaggcgggtcattaatgtttctcccaaatt

SEQ ID NO: 7118 - DNA, 303 bp, Oryza sativa
  Clone ID: PAT_MRT4530_13742C.1
atggcctcatcggccttcgtgaggccgaacttgctatggcgaagtcgtcttccttcgacatacactcttcgcctcacattcttcgcccaagaggcctttggcttggcgaggtttggtcgaagggcctcatgccataccgccaacaagcccctcacgggcaagggtgagataggagcttcggccgagaccgtgcaagccatgtgctttcgcctcttgcggatggtagagttactttttattttccccgggccgaaaggaacagtaatgggctttccctacatgggcttattactgtgcggctaa

SEQ ID NO: 7119 - DNA, 279 bp, Oryza sativa
  unsure (1)..(279): unsure at all n locations
  Clone ID: PAT_MRT4530_13743C.1
aagccgaggttaaacaccgggggggagcacgaaaccatgcgatatctttaacactgatgctaccatgagatagtngatgccactgtagatctggacattagagatataccacttaactcacagcgtgacccatgcatgcagatgcatgcatgcaggaaacaaatgccacaacacacacagtgagtctgaatctcatgacattcatttgtctttctctcgtccccccaattcattaacatcttatacatgcatactccacacaaaaaaaaaaagacgaaa

SEQ ID NO: 7120 - DNA, 174 bp, Oryza sativa
  Clone ID: PAT_MRT4530_13744C.1
atggccacgccgccggacgtcgccgcccgagccgctgaaccggggcagacgtgcggcgtgcccgactggcgtgcgtcggtcaggaatgaccggtctgtgaccggcctgtcgccggtcacgtctgactggacggacggccgtgccaccacgtcgcatctgtctccggcggagtag

SEQ ID NO: 7121 - DNA, 2266 bp, Oryza sativa
  unsure (1)..(2266): unsure at all n locations
  Clone ID: PAT_MRT4530_13745C.1
atggccatgcttctccgccgccgcctcccgctggcccgcctcctccggccgctgcaggccgaggcggcggcttccactacctcctcaccgccgcctctccagaaccgtcccgccgccgcgtcgccttcccacgcgctgggatcacgtttagggtttttgaatggggtaccaggtgccccgggggcgcgtgaggcttcggcgttcactacggccggcttcctcgccgccggcgcggccgccgctctcgcgtctctgccggtggcctacgccgatgccaatgaggtgggcgttgtagactcggctgtaagctctgatgcggctgtgaaacctgtgaaccctgatgcggctgtgagctctgatgtggcggtgggggaggatctggcccataaggagaggaagaggataatagagctcattcagagccgagggatgccacacgggtcatacccgcaatttgatgtggcagtgaagggccaaaaggtggtcgttaaatttaatgtaccatcaacttgtagcttatcagaccttattgttgatctcgtaacacatatcggacttgaggcagaacaaggtggtggcggctctgagatgctactgcgtgcttggaacagtgtagctgcacgtcagataacgttgaaccctcacaagaagacaacgagcaatggagatgacaatgaagatgatctttgtgtcttgatatttgaaccacttgtgggatctcaatattctgaagttgaattcatcaagcgtggtggatttagtttgagagagcttgaagctttgacaagtgttttgaaattagtgggccagaaagatgttaagcaatcatcagggaagggcaataagtcatacacaacaagaaaaggaaatggtcagagatccaagcatgtaccatctatggaaaaaactatatctgatttagagggtatgggagttcgggtctatggatttgatgagacctcaagtattccaatggatggtagtggtactgttatgtgggagaacattgctggatatgaacctcagaaaagggagatagaggacactatcctcttggctttacagagccctgaagtgtacgatgaaattgcccgtgctacacgatgcaaatttgagacaaaccgacctcgagctgttttgtttgaaggcccaccaggcactggtaagacttcttctgctcgagttattgccaagcaagctggagttccgctgttatatgtgccactggaaatcataatgtcaaaatattatggtgaaagcgagcgccttttgggatctgttttttcacttgccaatgaccttcctgatggaggtataatttttctagatgaggtagactcttttgctagcgctcgagatagtgaaatgcatgaagctacacgaaggatattatcagtaattttgcggcagattgatgggtttgagcaggatagacgtgttgtggttattgctgcaacaaatagaaaggaagaccttgatcctgccctcatcagccgttttgattcaatcatttgttttgacttaccggatcagcaaacccgcgcagaaatatctgcccagtatgcaaaacatttgactaaatctgaattgtttcaattttcattggccactgaagagatgtcaggaagagatatcagggatatttgccagcaagcagaaagacattgggcatcaaagttgataaggggacatgtacctagagatgatgtaggggagccgaatctactttgagttgaatagtgtcttgcatggtttgaactcctcagaggatctttgccgaatagaacaagtaaggaatcaagactccctgctttgaagttagcttgaggaatgtacttatctttacagttccacaccatatgttaaatgatgtgtatatagattttaggcatctcttctcgtgacgcatgccggcgcatgaaaattgcgtttacccaaattttgattgtcctatcacagcacgacaaaacgtataattctagagatgaagtaacagtgggtaatgcattttgcaaaaaaaaaaaaaaagccccgggggccgccccggtacccaattcgccctatagtgagtcgtattacaattcactggccgtcgttttacacgtcntgactgggaaaacctncgttnccaacttaatccgccttgcagcacatcccccttcccagctggggttttttcnaaaaaggccgccccgattcnccctccccacaatttgcncccccngaattggcaaaanggaaattttttaccctttatatttttgtt

SEQ ID NO: 7122 - DNA, 705 bp, Oryza sativa
  unsure (1)..(705): unsure at all n locations
  Clone ID: PAT_MRT4530_13746C.1
ttttttggagaagctagtttaaccaaggatctgattctttgtataaatttccagagtaactggtacagtgaataagttggctcattggctgagttctgctacaaaatactttcagtatgcagtttgacttgcagcagtagtttcaacctcaggtgagatattgtgtgagagaggatactgaatggctggactgtttctcctgtgcaaaatcttggctcttagttgaggttcctctgtacaatggcatcaggacgccaagaagaaaatagaaaattaagttacatataaaggcaagaggagtatacatgcggcgaactactacttcggaggtccttcaatctgtagggtaccaatatacagtcttgtcatttgacagatgttagtacgccaattgtagtatgcttccgggagttctgcctaacaggaatggacgatatctttgccaacttgaattgtgttgatgacaacaaagattccatccattgccaactttagcttctacagacattagtgattttcttttcctcatactatgatacacttcaagccatcggatggctaaaaagcagccaaaccaccagttacctttcgaagcttcaaaaaatgccatctgaatactgattcttgatattaggtaccatgcttgagtccaaggtgtggagatccagacgtnaaggnttaatgaaaggatttaggttcacatgg

SEQ ID NO: 7123 - DNA, 469 bp, Oryza sativa
  Clone ID: PAT_MRT4530_13747C.1
gaagtgttcgtgagagcagttatggggtgaccgtcatcaaggcagcaatttaccctggaaatgtgctctctattcacatgaataaaccatcaagtttcaagtacaaaagtgggatgtatatgtttgtaaaatgcccagatgtttcgccttttgaatggcatcccttctccataacttctgcacctggagatgactacttgagtgttcatatccgtacattaggtgactggacaacagaacttagaaacctatttgggaaggcttgtgaggcacaagtaagttccaagaaggctacacttgcacgacttgaaaccactatcatagcagatggtctgaaagaggagacttgctttcccaaagtctttatagatggtcctttcggcgcaccagctcaaaattacaagaaatatgacattcttttgcttatcgggcttggaattggagcaacgcctttcatcagcatactgaa

SEQ ID NO: 7124 - DNA, 699 bp, Oryza sativa
  unsure (1)..(699): unsure at all n locations
  Clone ID: PAT_MRT4530_13748C.1
ccacgcgtccgcctaatagaacgtttccgtaatatgcgggtgatttgttgcaacagtacacgtggtgggggtggcacgcgaggcgtgggaggcgcgggggcccgatgggaaggattttcccgtcagcatgattttttgacatagcgctggtcgagtaggaagctttgcaaggttggctcttagtttctttccctgacgtgcggattgagaagcagagctgaccggcagctgctccggagaactctaccgctgcacaatgcttcgacgaaatgctgtgggtgaggttttgttgattgcactatatgaaggtatccacgaaatgctgttagggtcattggaatcggagtgaatgaactccttccttctctctaatactccctccgtttcaaaatacaccattgactttttagcacatgtttaaccggtcgtcttattaaaaaaaattgtgaaatatgtaaaactatatgtgtacatgaaagtatatttaacaatgaatcaaataatatgaaaagaataaataattactcaaattttttgaataagacgaatggtcaaacatgtacttaaaaagtcaacggtgtcgaacattntgaaacgagggagtatgtgactagcaccagtctagatctgaagaaaccagttcatccctctgtttttctggtgcaatgggaagtttggccggcttcttagcgaatttct

SEQ ID NO: 7125 - DNA, 2343 bp, Oryza sativa
  Clone ID: PAT_MRT4530_13749C.1
atggcgggggactacgtggacgtgccgctgggcggcggcgggcagagcacgctgccgccggtggcgccgctgaagaagcagccgtcgcggctggcgtccgggatgaagcggctggcgtccatggtgcccgacacgatgaagctgaagcggacgcactccagcgcgcagccggcgctgcgcggcctgcgcttcctcgacaagacgtcggcggggaaggacgggtggaagaacgtcgagaagcggttcgacgagatgagcgccgacggacgcctgccccaggagagcttcgccaaatgcatcggtatggcggattctaaggagtttgcaagcgaggtgtttgtggcattggcgagaaggaggagcatcaaaccagaagatgggataacaaaggaacagctgaaagaattttgggaggagttgactgatcagaactttgattcacgactacgaatattctttgacatgtgtgacaagaatggtgatgggcagcttacagaggacgaggtcaaagaggttattgtgttgagtgccgcagcaaacaaacttgccaagttgaaaagccatgctgcaacctacgcctcactgatcatggaagagctggatcctgatcatcgcggttaccgtgagatttggcagctggagacgctactccgtggtatggtgacagcccaagggcctccagagaaggtgaagctggcttcagcaagccttgcaaggacaatggtcccttccagtcaccggagtccaatgcagaggcgtttcaacaagactgttgacttcatccatgagaattggaagaggatatgggtgctctccttgtgggcgatcctcaatattgcattattcatgtacaagtttgtgcagtacagtaggcgggatgcatttcaggtgatgggctactgtgtctgcatagcaaagggtgctgccgaaacactcaagctgaacatggccgttatactcctcccggtgtgccgaaacacactaacaaggctccgatcaacagcactcagcaaagtcgtaccatttgatgataacataaacttccacaaggttatcgcactgacgattgcaattggagcggctactcatactcttgctcatgtaacctgcgacttcccaagattggtatcatgtccaagggacaagttcgaggccacactggggccttacttcaactatgttcaaccaacatactcatcgctggttgcaagcactccagggtggactggcatcctcatgatcttgataatgtcattctcgttcacacttgcgacacattcgttcaggaggagcgttgtgaagcttccatcaccactgcaccaccttgctggtttcaatgccttttggtacgcccatcacctactggtgattgcatatatcctcttggtgctgcactcctacttcatatttctcaccaagcagtggtacaatcgaacgacgtggatgttcttggcagttccagtcctcttttactcctgcgagagaactatcagaagagttcgtgagagcagttatggggtgaccgtcatcaaggcagcaatttaccctggaaatgtgctctctattcacatgaataaaccatcaagtttcaagtacaaaagtgggatgtatatgtttgtaaaatgcccagatgtttcgccttttgaatggctatggattaatagattcttcaatgcttccaggcatcccttctccataacttctgcacctggagatgactacttgagtgttcatatccgtacattaggtgactggacaacagaacttagaaacctatttgggaaggcttgtgaggcacaagtaagttccaagaaggctacacttgcacgacttgaaaccactatcatagcagatggtctgaaagaggagacttgctttcccaaagtctttatagatggtcctttcggcgcaccagctcaaaattacaagaaatatgacattcttttgcttatcgggcttggaattggagcaacgcctttcatcagcatactgaaggatctcctgaacaacataaaatccaatggaaatgtaatagagatgcacaattacctgacaagcgtgtatgaagaaggagatgcaagatcagctctgattgccatggtccaatcacttcaacatgccaaaaatggtgtggatatcgtctctggcagcaagatccggacacattttgcaaggccgaactggagaaaggtattctcagatctggccaatgcccaccagaactctcgtataggcgttttctactgtgggtctccaacacttacgaaaatgctgagggatctttcactagaattcagccagacgacaacgactcggttccatttccacaaggagaacttctaa

SEQ ID NO: 7126 - DNA, 705 bp, Oryza sativa
  Clone ID: PAT_MRT4530_1374C.1
tccccgggctgcaggattgtataaagagttattagtttagttttatctttactagctggaatatattgaaatgaaatctgtctagttctaaatttggcctagtgtagttgtagagggtaattcctatgaggaattaggtatgccccacaaggaggttggtattgtcctggtggtggcatgtagccttgtggagggcactgttggttaggaggatacccattgttgctctcaccatgcatgtccttgcttgcaaagtaatatattagttttgtcagccattagttagatataaaggtgtatatattttaacctaatttgggtaaacctaaaatattcctgttgggtgatcactagtgtgcattagttctgtactagttaggtaaaaggtatgattgcatttaacaaacatagttttgtaagaaaagagattagttttgtttgctattagaattcatagttttgttagttcagtcagaaatactttaacctctactttcaagttctgtcagaaatacaacaattagtagttttgttagccattagaattcctagttttgctagttcagtcagaaatactttaatctctactttcaagttttgtcagaaatattgcaattagtagttttgtttgccattagaattcctagttttgttggttcagtcagacatactttaacctctactttcaagttctgtcagaaatac

SEQ ID NO: 7127 - DNA, 642 bp, Oryza sativa
  Clone ID: PAT_MRT4530_13750C.1
atggccgccgccgccgcctcctcctcctcctcctccgccacgctctgcaagcaccacggaccacccaccgcgtcccgccgccgcctccgcgtctgcgtagccatctccgtcacggcgctcctcctcgccgccgtcgtcgccgctgccgtgctggccgtcgccgcggcccgcccgcgcccggccgacgcgacagtcaccgcgctccgcctcgcctcgctgtccgtctcgcccggaggctccgtcaacgccaccctcgacgccgtcctcgccatccgcaaccccagccccgtcgccgcgttcgcgcacgacgccggccgcgccgaggtctactaccgcggcgcgctcgccgcggacgccgacgtgccgcccgggcgcgtcgcgccgcgcggctcggaggcgctggccgtcaggctcaccgtgctcgccgaccgcctcgccgggcgcgcgccggagctgtacggcgacgtggtcggcgccgccggggacgtgtcgctcaccgtgcggacgaccgtgccgggcacggtcaccgtccttggcgtgttcaggcgccacgcggtggtgatcacggcgtgcgacgtcgcgctcagcgtgcgccggccgggcgcgcacagctcgtcctgtcgggttctcaccaaactctag

SEQ ID NO: 7128 - DNA, 210 bp, Oryza sativa
  Clone ID: PAT_MRT4530_13751C.1
atccatccactgttaggtatttcttcgtccgtgatgttaccatgaattgagttccctacggttatagtgtatgaactgcttgatgctatcctatcggaatgaaatgaaatactaaaacagggagaaaaaatagagttcgccagcaatccgttcatggcacactgtattgtcatcactttcacttcgccttgtctactagatctcaaaatt

SEQ ID NO: 7129 - DNA, 205 bp, Oryza sativa
  Clone ID: PAT_MRT4530_13752C.1
ctctttttgccgaccaaagaataaagcccagggggggggtgtattaaaaaaagcctagggtaacccaccgaacggtgaaacatatcccagaaagaaaaggtagagtccaccaccccatgtcaccacggcgtaaaaaacttagggatgaaaggacaagacaaccgatctcatcaaggaagcgtgaaagggatacagagcggaagca

SEQ ID NO: 7130 - DNA, 410 bp, Oryza sativa
  unsure (1)..(410): unsure at all n locations
  Clone ID: PAT_MRT4530_13753C.1
attccaaattttaatacaagacacacaccaggaggggggacactttttttatccaactatatataaaagggggaacacactaccaaaaaccgnaaagaccgggagcaactttgaaaggaggggtgcaggacctaggggggaccccacacagggggggcaaattgagagccacctgggcccgggccggagctgggggctcgccaacaaaccccccaaaaaaccgcacttgccgcatgatagaccgcaccaaggggcaaaaagccgggcaaagaaatgggggcgccatcaaccccatctgatgacagaattggggccgcaaaacctggcaagtgcctagtatgagcccgcgggaccgcccccaaggggggcccaaggggcggcactggggccccacgaacccattggacggg

SEQ ID NO: 7131 - DNA, 481 bp, Oryza sativa
  Clone ID: PAT_MRT4530_13754C.1
ttcattttttgggatatggaaatattgcatacaggttatgggaagctagcaaaggaagtaaaaagattagcaagatctggtgtgcttgggtaggacaggatggctcccatggcttcgatgagtgtgacacctatgagcaatctgactttgccattgtcaacttctcttatacaattgagttgggcaggaagtggtctcctgatgatcaggaccttcctatctctgctggatctttcttcgtgattgatgatgctggacaccgtggaaagagaagaaagaagtcattttcagatcaagaagcatcttcagaggagtcgaatgagcaaagcagcttcgcccatgacaatagccaagctatcataacaggttccccgacaggtacttcacacaatcttcaagttggcctcttatccaccaaatctatgaggagggaggtgcgcacgcagaaacgccttgctgttgagaaagcttgtgatatttg

SEQ ID NO: 7132 - DNA, 453 bp, Oryza sativa
  Clone ID: PAT_MRT4530_13755C.1
aagcaccccccgctacttcttcacgccctcgacgggttctttgccagggcagcttcgcctcagcctcccgcaatcttctcacagaagaaaccatgcagcgccacgcacagaagggtcgaaaaaaagggctacccggccacgttgacaccttgaccgttgctaaaaaagaatcgataaatcgatacttggtgaatggtgatagttacacactcttgtaaatactgcgaagcgcttactgatacctactgtgatagttgccctctgttgtaatttgtatttgtagtgcttgctctgaaacttagatcacgtttgactatagttttccacttccagtccttttacggatatatgttgccctattacagagttgtttacccggaagagagaaaaatgatcccattcgatgccagtgttaactgatgattattatatgatccctgtcaccaagtcatg

SEQ ID NO: 7133 - DNA, 412 bp, Oryza sativa
  Clone ID: PAT_MRT4530_13756C.1
ttttggttttttttttttttttttttttttttttttttttttttttttttttttttttgttacactttatttacataaattaatattcagtatataaaaaaaaaaagtgttatttaaaatgaaaataaaatatacccatgcaaatattattgatgcccgaggggaaagcagaactccacgggggggggggaaaaacaaatggattttggacggtgggacaaaaggaggggaagccccccccctcacatttggtggactgaaacacaccgcccattaaatgggcagtggggggcaaagggtgggtgacaaaaaaaaacaacggtggtcctggagagaaatggagcctgggacggccatgaaaattaaaagagacacgggaccgctcaaggggaccaggcacgagggcttctac

SEQ ID NO: 7134 - DNA, 2741 bp, Oryza sativa
  unsure (1)..(2741): unsure at all n locations
  Clone ID: PAT_MRT4530_13757C.1
gcacgaggttttttttgtttttaaattgatcagaaacaagatcagcatttggattagatatttcgtttgttcctttctgtcagtacttagtacacattgcgcttgcacaaaacatatttacatttctcaagaaacgctagctcgtatacttttggttgttaatgaaggtgattcaagaagcctcctcaaaaccagggcttcacaaactccacatctaaagctatagagtggcagctcttcttcctcctaagacctaaacctcaaaaattcatatgcgctcgaacaacatcctcaataggagattggcagattgggcaactcctgttgctcgatttcagctgatcggcgcaattgaaacaggtgcacatatgtccacacctgtaaagtagagagtcaacttgcgtctgatggcagatgcagcagcttcccctttttgctggtgtgtcgggttggcttggcatcaaccctgcttcgcgaagtgcactgcacatctcctctttaatggagtgctggatctttacttgggatgcaatacaactttccaccaacttccgtagttcatatatttcatgatggacctgtgccatttcacttctaaccctgacctccatttcaaggaagttttggttttcatgatgttgatgttcaaacgaagaatgctgccagccttcttgttggtggagatgggagacaggtgctaatgaacactgtgcagataccctctgatcagcattctgttgttcatcattctgtctccagtataagcgctcatcataatatccttcaaaatcatcaatcatgtgttgttgcctttgtttgcgcaagattgttagcaacatgttgttcattttattgctaaaatcactctcaagagactttgagacatttttgctctcaagaagattgcagatgtcagcattgccagacaaagcaccgctgtctgcttgtgtggcaacacacaatgatctccatgagttaggggaatctatccaggggcgatcattaaattcattctgagtgtgattctcaatatccccaatttcatcctgattccagctgtctggactcatggcttccactggtgcaggccaaccaagactacttatccatagtgccctctcttcccatgaaccattcaggctttggttgtcttcttctcttagattatcaccccttgaggatggagtgcaaagttcatgcaatgtgcttatggtacttggcgagacatcatcaacggtactatgctcgtcatacctcacgaaactcgatggctcagaatattcctgattctgggtacataattttaccatgtttttgcaaccttcctgacattgattttcactgttgctgttctgcccatcattttgttcatttcctaaaccatccgaagaaactagtctctcaacagaaccagtagacttctcagccaaaacctggccacccttatgttggttaccagcaatgcacttgctgagaaaagcttgtgttaggcattggcttgtggtataggcctcatgctcatgttttggaaggcgtggcctgactggttttggtagagtccaaacttcatccttaactttaaatccctgacgcaacagcctaagacgaagcatggactgcaaggtgtcaaagagcatgacaatattagcggaagccacataaggaacaaacaagcttaaaaagtacttgtgttcgcatagatacaatctgcaaaacgaaacatgataatgtgatttgcacatgacaatgatcagcagtgccagttgggaacatgatctaccaaacagccatatggccccatccttgggggactggatcctgcctttgtgcgagaaccgcgacacgacgtggcggtcggcgaccgcggcgagctcgcacctccggcaatgggccatcatggcgacgagctcctccattgcgcggcggccacgcaccgtgcggactaccagctgcgtcggcctggacccgttgataccggcgatgttggtgggcggctccaccccggcgcgcatcggcgcgggcgacgggggcgcggactgcgacatcgcgacctccttgttggcggcgtccagctcgtcgtcggggatcgacgacgtgccgctgagcttcttgacgatgcaccccacgcggccccgcggcgagccgccgtcggagtcggaggccaggtcgcagggccgcggcgtggcgggccccaccgcctcgatctcccgccaccgctggatcagcgacgacgcgcgcggcgccgcgggcgggagctccgcgccgcacctggccccgcctccgcaccccgcccccgccccngacgacgcgtccgacggcgctggggacggctcccggaacacggcggcgcgggcggtcacggggcgggtggccgacgcgagcgcggacagctcggcgtccctcgccctccgcctttgctcctgcggcgcgggggcctcggcggacgccgtggcggacgcggccgccgccgccgccgcccaccgatccagtatctgcttccgccgcctcggcgtgggctccgccgccgccgccgccgccgccgccgccgcgccaccagcagcatcgtggtggtggtggtggtggtggtggtgttggtggtcggggcagcgcgggcgcggcgactgcggcggcgggacgaggatgttgaagaaccccctggcgggctgcctggaggatgccctggaggggtccctccatggcgtggagtcgtgcggcatggcggccaccgaagatgttgccat

SEQ ID NO: 7135 - DNA, 347 bp, Oryza sativa
  Clone ID: PAT_MRT4530_13759C.1
ccgggctgcaggaattcggcacgaggggagagtcacattgttcgcttggaatgctactttactgtgttgtgctccctcatcatgaaaattgtttcacgatgaaaagcagttgtttcaccatgaaaggaaattatatgaaaattgtcatgggatgaaaacctgattggaacttggaaacagcgaaatggcacaagcaaagcgcacgtacgcgatgcgaggagacatactctgcctttgtcaataggatggttcgcatgaatcggactaccagcaatgactgaagcggaaaaaacgaaaatactcacgctcgggcgatcggcgcagggggagccggatcgggcgctccc

SEQ ID NO: 7136 - DNA, 489 bp, Oryza sativa
  Clone ID: PAT_MRT4530_1375C.1
ccacgcgtccgcgtttctcttgatgctgatgctgctgcacgaagccacgagcgcctcgcctcctaaggatcgcctgcaagagccgattttaatctctcccgccgccgacgaatggctcgcgacccggccttcacgttcctgcccaacggtgtctagatttggatgtagccttctggatctgaattgcacgagcataacaaagcttaagcactgagcatgcggatgccttggacccctttgtactcgacttagtacaaaggcgaaagctctagttaccttgcagcgttatttcgagtgattgtatgaggagggcacatttgcctgaaaacacgttaacttagtggatgtctttatatagcacagtacggcgcgacatagcgtgatgctgttgtatctgtacgacatgcagaatgcccctttgatgctttgatatggaggagaattcagacagccaagaacaaagtggttggaagaccatacccatggggg

SEQ ID NO: 7137 - DNA, 1145 bp, Oryza sativa
  Clone ID: PAT_MRT4530_13760C.1
tcctcagagctcttcttcttccacgcgccagggtggtccaaactcatcgacggggggctcctcctcctcctacccccacagggaaggatcgacgcaaccaagcaagaattgagaacttgtgttgttctatgtctcgttcttgctgcgatttgaagtaatcggggatcaaaaatcgttgtcaagactgaagaatcttgattttttttttcagtgcataggaggaagaagaggagaagctgggacgttgctcctcacgcgggtgatctcgcaccggcatggtctttgcctcgccgggaggaagaaggcgtcgtcgcggcggggatggtcgatagggcggcggacgtggtcatcggggtcaccgccggcgtcgccgcggcggtggccgcggcggcgctcgtgctcctcgccatctgcctctaccggaggcggcgcgccagcgccagcgtcgccgccccggcgcggtcgccggagtcgtccaccgcgacgctgcgcgccaacggcagcctcaactccagcgtgtccctctccgtcgcctccgactgggaccaccacccgccgccggcgaagcacgccgccgcgttctgggcgtggaggggcggcgccaacaacggcagccactccccgccgccgggctccgtctccgggatcccaaaataccattacaaagatctgcagaaggcgaccaacaacttcaccacgattctggggcaaggatcgtttggtcctgtgtacaaggctgtaatggccaccggagaagtggttgctgtaaaggtgctcgcgagtgattcaaggcaaggtgaaagagagtttcagacagaggtagcattgcttagtaggctgcatcacagaaatcttgttaatttggttggatattgcgtggataaaggccagcgcattttgatttatgagttcatgagcaacgggaatttagcaagccttttgtatgatgataataagcggagtttgagctggcaagaaaggctacaaattgctcacgatgtagctcatggcattgagtatttacatgaaggggctgttccacctgttattcacagagatctaaagtctgctaatatactcttggatcattcaatgagggccaaggttgctgactttggtctatcaaaggaggaagtatatgatgg

SEQ ID NO: 7138 - DNA, 445 bp, Oryza sativa
  Clone ID: PAT_MRT4530_13761C.1
atggaaacgacaagaactactcggattgtatccatattggtttccctagttctacttggacaaggggacacctatgggtataaatacaagaccccctaggaggagaggggagacacccactacaatcaacatacacggaacaatagatcaagacataagatcaacatacaagaaaacatacgtcaagacaagacgccgggcacgaactcgaggaggaagactaccatgttgtcgactacgagtcagagcttcagaccgccatgtcgacaacagttagataggctaccccaaatattgtactgtctcgcatataccttagtaccaacaatccccatactatgcaaataccggaatcacgacatcaaacatcgacatactacttataaaactacccacatgtcagctacagagacccgtcgacaagacgccagctacgggacaggag

SEQ ID NO: 7139 - DNA, 993 bp, Oryza sativa
  Clone ID: PAT_MRT4530_13762C.1
atgggccgcgccgtcggcgcgctggtcgcctccgcgtccgcctcgccggcgccgctgcacgcgctgaacgggctcgtggcctccatccgcagcccgtggacgagctccacgcgcgcggcgaagcatctcgaagtcctaaagggggtgaccgtactcaaggacgtttcttgggaggtgcagcgtggggagaaagtcaggctcgtcagcgtcaacagcgccggcaagacgacccatctccgcatcgccgcggggctggaggaccccgacaccggcaatgtcgtcaaggccaagaaaaacgtgaggatcgcctctctcagccaggagttcgaggtctgcgcgttgctcaccatcagagaggagttcctcgccgcattcgaggaggagatggaggtgaggtctcgcctggagaaggtgcaggccgcgctggagggtgccaccgaggacatggacctggggaggctcctcgacgagctcgacctgctacagcggcggtcgcaggatgtcgaggtcaagatccagaatgtcgacgtttgatgtcacgattccggtatttgtatagtatggggatcgttggtactaggatatatgcgagacagtacaatatttggggtagcctatctaactgttgtcgacatggcggtctgaaggtctgactcgtagtcgacaacagggtagtcttcctcctcgagttcgtacccggcaaaatcagagacagcgcgagatccctacggccggcctctgtaggtaccggatagggccgatccaggcatatctctgatgtcgatatctgtcggcttgtcttggcgtatgtaggcttgtatgttgatcttatgtcttgatctattgttccgtgttttctatggtgggtgtgtgttgatcgtgtcccctctcctcctaggaggccttgtatttatacccataggtgtcctcttatccaagtagaactagggaaaccaatatggatacaatccgagtagtcctcgtcgtttccat

SEQ ID NO: 7140 - DNA, 3576 bp, Oryza sativa
  Clone ID: PAT_MRT4530_13763C.1
atggaggatggcgccgtgttctcccccggcgcggcgtcggagtcgttcctccccgccgccaccctccttcgcgcgacggaggcgacgacgagcgcggcagacgcggcacccattacggagactaactacacgaggctgtgccacaagaagagcatcctcaccgtgaacgggcagttccctggcccgaccatctacgcgcgaaagggcgacctcgtcatcgtcaacgtccacaacaacggcaacaaaaacatcaccatccactgctgcacggtggtcggcggtcggttaccggcgtcgtccggcggcacggggagccggcggcgtgcgttggttgccaggctcggaggcctgctgccagcgacgagcggcggagggcagccggcgacgcgacagccggagagcggcgtgcggcgcttctcagtggtcggcgaccggtggccggcggtgtgcgacggcatcgtggtgatgagtgctaggatggtcggtggctatggtggtcggaggctgaccttggctccggcagccagctcggcgagttggccacagccggtgatgacgagggagcctctagttggtttgagggatgagttgcaaagggagaagaaggtagaggaggaagaagaagtatgcctgccaataatgccgtcacaggtgaacctcgcgtgtgacttggaattgtgtcctaaggacagtttttccgcaccaacaaaacacttcgctagtgagaccagaggtgaaactaggcctagggctattggttcacgtttttgggtgctcgatggagaagatagtgaggaggaagaagagcaggaagaagcgcttgaggattggcagaggaagaggacggcagggttagaaaaaacgccggcgaagttctcaaaaagagaggatgttaatgcatctactttctcggggaacctcgataaggcaagtggcgagctgcaggttagagccgaagaggagaaggaggttcggaagggagggatggcaaggaggaaagatgattacgatgggtgcagcaacaaagattgggggcaaagaggtagcttcagggaggaggaggaaggttttggaacaggctttcagggaagtcgcatggggtttgatccgggctatggttttgggcagcagggtagcttcggtcaaaggtggcagaggcatggttaccgcccgagacgggctcgtggctttggcccaaggtgcggcggttttgcaggaagaccagggagagggtcagcaagaggattcgggtcacaacgtccagcttttgagaggaaaatggatgatatgggaagaaagggagaggagaaggggggagctgctagctcggagaggaatggtggtgcaggccgggtgaaagtgggggaggtggaggtcctggtgctggcaagaaaggagaagcaaccaatggttgagaagaaagaagaaaatggggactttgtggagatggagtgtgatccatctttgtttgaggatcagcaactaggggtagagaaagggaaaccaacggagaaagatgataactcttttgttgttctttttccatcgaaagttgaacttcaacgagcaattgcatttggaggggctgatgtgaaggacaatgggttagccaccgggatgcgcttgcaatttgaggaatggtttgaagaagaggaagggtaccttttgcccaaagtttgggtaaaggtgtacgggctgaggaagaaattaagggaatatctcacactttgggcggtagggtccttgttgggtgctacccaaatggtggatatgaaaaccacaaggaagaatacctttggaagaattttcatggctgttttaagtccaaagttggttcctaggagggtggatgtagtgattggagatcattactttgagcttgagtttgagttagaaaagaagggatatgacgaaagtggagatgaggtggagatagagcaaggtggggatggtggggatgataaggaggatgggggtcaagaggaggatgaattaagggaaaaggagaccaagaggtcgaagagtgatgatatggtgttagatgacaaagaggaggggaagatggagggaaatttcagtggtgacaatgggaaccaaggtatggatggggtgcaggaaaagtttttcggagaaatggcttcgaaaatcattgatggggctgttgtaagtctcttggaggaggtgtgtgataaagtaatgcatgaggaagggcagccggctatgcatgaaggggaaataggacagcgggaggttgaaggtggggatgatattgagcagggtgatggagaggaagaggtgggcaagatgatagaggagaaaatagtgcgggctgcaatggttaaagaggtggcgactacaccaactcgggctagtgtaaggctagcctcaagtgaaggagaacactcggtggaaaaggctacaaagagaaaggcacgaaagaacctggagccgcagtcaggttcaatagttagtttgaaaaatgttgaagagactagacttagaaattatgttgcacctaaagctgatttagttggaaacttagaaggagaacttgagtcagaggaggatgagatggtggataacttagtccttggtcacttatgtggtggcttagtggacgaagttatggacgaagaacccgatcacctaagttgtgacttaaaaaagggtttcaaggtttataagtccaagtcatccttcaaaagaaacaagggacaaaaagtgaaagtgatcttgaaaaataagaaaaagacttccaaggagtggaagctagacttcattgctcttttggaaactggaaaacacatttggagaaaggaaagtagagggtctaatatgttggaaaaatggcaatttaagattcgtaggctccgacagtttttgagagggtgggcgaagaatgttagcggggcgatcaagagggagaaggtcacggatgttgagaatgagttgttgagtgaaagcttcaaggagttggaagttaaagaagcaatttttcaaatggaacacaacaaagctccgggacctgatggtttcccagcagagttttaccaagtgttctgggatgtaatcaaggatgatcttatggccgtcttttgcgattttcatgaaggaactttgccactgcacagattaaaatttggaatcattactctccttcccaaacaaaaggacgccaggggacgtattgggctcgacaatagtccttgctgcttaaagaagatgagcgcgatgcacggcgtggaccagccacggaacccgtggtcggacgggccggagttcatcacgcagtgcccgatccggccatgcggcaacttcacctaccaagtgatcctgttcgaggaggagggcacgctgtggtggcacgcgcacagtgacttcgaccgcgccaccgtccacggcgccatcgtcatccaccccaagcatggcaccaccttccccttcaacaagccagacaaggagatacccatcatcctcagcgagtggtggaatgacgacgtagagaacgtgctcgacgaggcgaagcgcaccggcggagatgtggagccagccgacgcgaacaccatcaacggctag

SEQ ID NO: 7141 - DNA, 1725 bp, Oryza sativa
  Clone ID: PAT_MRT4530_13764C.1
atggaggagatgaacgaagtgaggttggagctggctgggatgaaggacattgctgatctgaagaatctcaagtcagaggtaagggaggtcaagaaattgttgcaggaactttgcaagcagaagggaactgatgcagggaattcagagacagaaggaggcactgttggtggaaatcctgaagcaagtgcagctaatgttcatgaagcggtggagttattccaaaatgtcaagcaatatggaatgaccgtggagcagtatatagacaaatttgaggagtatgtggacttggtgaggagagatcacccttacctgcaagaacagtatatcacaagctgttttattgggggtcttagaaatgacattaagcatgatgtgtgtgggcagaagccacaggttttgcttgagtcttacaggtatgcgaaaacatatgagaaagctgctcttgctaagaaagctacttatggggttaacagaaatatgagtaaaggatttaatgctggagggcagggcagaaatcagactaacaggaatcagcccagaaatgaaggggaaagaaaggaggagaaaaactattggttctgtaaagaaccttggttgccaaaacatcaatgcaaagtaaaacaagcactacatgctttgttagttgaggggaatgaagaggaaggcaccactgaagaaactactgaacatgaatccaatgaggaagatgaagggaaaaaccaaactgatgataaaggaaaaactaaagaggtgatgacgcatatgggacactatgaatatcaagttatgccttttgggttaactaatgcccctgcaacctttcaatctcttatgaaccaagtactccggccatttttgaggaaatttgtgctcgtgttcttcgatgacattctaatttacagtcagaaccaggaagaacaccttgaacacttgaaattggtgatgcaagtgttggaagaaaataacctagtaatcaggttgaagaagtgtgcttttggactgtctgaagtagcttatctagtacatattatttcaaagaaaggggtggctacagatcccaggaaggtggataaaattacagggtggtctattcctactgatgtcactgaactcagaaagtttttggggatgacagggtactataggaggtttattaaaggctatgggttgatttgtaggccaatgcatgatatgctcaagaaacagggacttcagtggggacctgagcaaactgctgcttttaatgagctgaagaacaagatggtgtccagtccagttctggctatgcctgactttaataaggagtttgttatcgaagctgatgcttgtggcacaggcataggagctaggctagtagagggaattcaacacaaattgatgttgaagttaatggagtatgattactctattgaatataaacctggttgggagaattctgtagtagatgctctgtcaaggatgcctagacaacaagaaggggtagaagaatccagccaagctattactgtggtagttcctgactgggttgaagatatcaggaggagttatgatgaagacctacaggcccataaaatactcagtctggtcggttcagaggctgatccaaatggggaatataagctggaatcaggattactgaaatataaaggcagaatatttgtgggtcaaaatacagagattagaaaagatctgttgagaggctatcatgcctcttcttttggatga

SEQ ID NO: 7142 - DNA, 1647 bp, Oryza sativa
  Clone ID: PAT_MRT4530_13765C.1
atggatgtgaataagaggttgagcaccataaaagatctgattatcccaaactggtgcccttactcattcagacctgggaactgtccctggtggtgtaataaccgcatgcgcagggatggcgccgactcggcgaattcttggggtatcccctccttatggcgtggacaatggactgagcagccgaggcagggagaacgcgaggcagcgcacgcgcaggcagctgacagcacaacaatcgccggccaatcgagcgggcgagcgccgagcggcagcggcggcgtggcgaactccggcagtcgcgcgcggcaagccggcaaccagcaagggcgagccggcgagggcgcgccgggcaaccagactgagagtttgatcatcaagaactcaggaaggcttttatttcctcaattgcttcagttcctcgtcacttctagaaacagaaagcatgattcaggtgctgaaaaacacaatcgaatagccctagtggctcagaaggtcattaaacctttgcagacagctttcctaccaggaaggaacattatggaaggagtggtaattttgcatgaaacacttcatgaattgcacaagaaaaagaagaatggggtgattctaaagctagactttgagaaagcatatgacaaagttgattggaagtttctacaacagtcgttgcgaatgaaaggtttctcttctaagtggtgcgattggattgactcgattgttaggggtgggagtgtggcagtcaaagtaaatgatgagattgggagttattttcaaacaaggaaaggtttgagacaaggtgatcctttgtcacctattctgttcaaccttgttgcagatatgttagccattttaatacaaagaacgaaagatcaaggcagattcaaaggagtggtacctcatttagttgataatggtctctctattttacaatacactgatgatactattctttttatggatcatgatcttgataaaaccagagatctcaagcttgtactaagtgcatttgagaaattatctagcttaaagattaatttccataagaggattccaatgcatcacaagagaatcaacaataaggattggcagggtgtggaggagaggattcaaaagaaactgagtagttggaaaggaaaatttctctcggctgggctaatgggggtgagggatgtcttttttaaaggcggtgcctttaaggtgggggatggttatcagataagattctgggaggattgctggattggtgatttaccttttgaaaagttgtaccctaatttatacaatcttgtaaggaataagaatgctattgttgcggatgttatagataaagtgccgttaaatgttgagttcagaagggctttggtgggggagaatttggttgcatggtttaacctagtggctaaagtggttcttgttaggctctcaaaccatagagacaagcttatttggaaagttaacaaaaccgaaatattttcggttattttcagggggacgtattgggctcgacaatggtccttgctgcttaaagaagatgagtgtgatgtgatgaaggaaggatgcaaactgttagagacatctgtcatgcacttctttggtaaagatggatggaacatgagaaagcggttaaaggaggaatgtggtcgttag

SEQ ID NO: 7143 - DNA, 1248 bp, Oryza sativa
  Clone ID: PAT_MRT4530_13766C.1
atggaggagatgaacgaagtgaggttggagctggctgggatgaaggacattgctgatctgaagaatctcaagtcagaggtaagggaggtcaagaaattgttgcaggaactttgcaagcagaagggaactgatgcagggaattcagagacagaaggaggcactgttggtggaaatcctgaagcaagtgcaggtgatgctgcaggaaccagtgaactagtaaggatgtttgatgagcagaggaatcagtatgtagggcaacatggagaagcaaatcattatgctgaagctatactaaaaggacccaggttggaaataccttttttcaatggtgatgaccctattgactggttgaagcagtgtgagaagttctttgagttgactggaactccaatagaccaatgggtcaatatgtctctagcacattttcagggaagagctgcaatgtggtttaggggagttggattaccttggcaagtcatatcttggccacaatggtgtgccatgatttgtacgcggttttctgcagctaatgttcatgaagcggtggagttattccaaaatgtcaagcaatatggaatgaccgtggagcagtatatagacaaatttgaggagtatgtggacttggtgaggagagatcacccttacctgcaagaacagtatatcacaagctgttttattgggggtcttagaaatgacattaagcatgatgtgtgtgggcagaagccacaggttttgcttgagtcttacaggtatgcgaaaacatatgagaaagctgctcttgctaagaaagctacttatggggttaacagaaatatgagtaaaggatttaatgctggagggcagggcagaaatcagactaacaggaatcagcccagaaatgaaggggaaagaaaggaggagaaaaactattggttctgtaaagaaccttggttgccaaaacatcaatgcaaagtaaaacaagcactacatgctttgttagttgaggggaatgaagaggaaggcaccactgaagaaactactgaacatgaatccaatgaggaagatgaagggaaaaaccaaactgatgataaaggaaaaactaaagaggtgatgtgtgtatcactgaatgctatccatggtacaactagacctgacactttttcagtgatgattcagattaatgggagtaaaatagttggtttaattgatagtgggagcaccagtactttcatggatctagatttgctattaagaaccactgtccattga

SEQ ID NO: 7144 - DNA, 546 bp, Oryza sativa
  Clone ID: PAT_MRT4530_13767C.1
atggcttgcaccgtagcgtcgagagcgtcggccgaggtcaacgagagtgagggcactgtcatggtgatggtggcacgagagaagcgccgaggggcgcatcgacctgccgtggctggaggcctgctgggccagcccaggttcggcctaaccaggggttcggccgaaccctggtggcttcagctccggctggccctccacgtggacgtccaggatgcactctcaatgacggttgtgagggggagagttgggaaagaggtggaggacgcaggtggcgacaacgccctcttgagtttgaatgggagagaggagagggccactggtggagaaagcatctttcatcccggctgccgcagccgctgccgcgccgcccaccggcgcgccgctcgccgcgccgtctgccacgaggtcccgtggtctgccgccttgccgccgcgaggccgcgaggcctccgcccaggcctccgtcccgccgcgaggccgccctggcctccgcccgccggcgcgccgccgcgaggcagccagccgcccgatctatcagtggggatga

SEQ ID NO: 7145 - DNA, 2490 bp, Oryza sativa
  Clone ID: PAT_MRT4530_13768C.1
atggtggataacttagtccttggtcacttatgtggtggcttagtggacgaagttatggacgaagaacccgatcacctaagttgtgacttaaaaaagggtttcaaggtttataagtccaagtcattcttcaaaagaaacaagggacaaaaggtgaaagtgatcttgaaaaataagaaaaattttatgtggcattggacaagaccgaaggggagacctgggggtattcttttgggggttaatttggaattctttgaggttgcaagtatagatgagggagatttctatgtaaagttccatgtgcaaaataaggtagatggcttccaatggtgcgttctggcagtgtatggggcaacacaagaagaatataaggaggctttccttgtagagcttgttaatgcttgtaataaagagtctatacctattcttatgggaggagacttcaatatcataaggaaggctagtgaaaagaataataataactttaatgtaaagtggccttttttgttcaacgctgtcatagacagcctggatttgagagaactagaactctctggtcgaaaatttacatgggccaactcgttgcacaatccaacttttgagaagttggatagagtgctaatgagtactgaatgggaacaaaagtatccgttagcaactgtcagggctcttaatagagaactctctgaccatactcctttgttgctggatacgggggctgggacacatgctaataaacaactgttgttcaagtttgagcttggatggttgctaagagatggctttgtggatctagtagcagacatttggagaaaggaaaggtgggcgaagaatgttagcggggcgaacaagagggagaaggttcttttgatagcaaaagcagacaagctagaaaagaaggctgaagtccaactgttgtctaatcaggagttagatttgaaactctttgtaaaaaatagattggcccaattgttgagggaagaagaaataaaatggtaccaaagggcaaaaactaagcacataatagaaggagaccgtaacatgaaatattatcatttagtggccaatggcaagcataggaagacgagaatctttcaattagagcaagaggagggtgtgattaagggtgatgtgcaattaaagaaatacatatccaagtattataaaaatctttttggagcgccgaaggaaaataatttttctatggtggaatcccaaagagatgatattacacaagtcacggatgttgagaatgagttgttgagtgaaagcttcaaggagttggaagttaaagaagcaaattttcaaatggaacacaacaaagctccgggacttgatggtttcccagcagagttttaccaagtgttctgggatgtaatcaaggatgatcttatggccctctttcacgatttttatgaaggaactttgccactgcacagattaaattttggaatcattactctccttcccaaacaaaaggacgctagtagaattcaacagtataggcccatttgtctgttgaatgttagttttaaaatttttacgaagataatggccaatcgaatagccctagtggctcagaaggtcattaaaccttcgcagacagctttcctgccaggaaggaacattatggaaggagtgtggtgcgattggattgactcgattgttaggggtgggagtgtggcagtcaaagtaaatgatgagattgggagttattttcaaacaaggaaagatatgttagccattttaatacaaagagcgaaagatcaaggcagattcaaagtagtggtacctcatttagttgataatggtctttctattttacaatacgctgatgatactattctttttatggatcatgatcttgatgaagccagagatctcaagcttgtactaagtgcatttgagaaattatctggcttaaagattaatttccataagagtgagttattttgctatggcaaggcaaaagatgtggagcatgagtacgtcaaattatttgggtgtgataccggggattacccttttaaatacttagggattccaatgcatcacaagagaatcaacaataaggattggcagggtgtggaggagaggattcaaaagaaactgagtagttggaaaggaaaatttctcttggtaggaggaaggaataagaatgctattgttgcggatgttatagataaagtgccgttaaatgttgagttcagaagggctttggtgggggagaatttggttgcatggtttaacctagtggctaaagtggttcttgttaggctctcaaaccatagagacaagcttatttggaaagttaacaaaaccagaatattttcggttattttcagggggacgtattgggctcgacaatggtccttgctgcttaaagaagatgagcgcgatgtgatgaaggaaggatgcaaactgttagagacatctgtcatgcacttctttggtaaagatggatggaacatgagaaagcggttaaaggagtaa

SEQ ID NO: 7146 - DNA, 598 bp, Oryza sativa
  Clone ID: PAT_MRT4530_13769C.1
tgcatgaattaggatcaagcacgaaggcccggttacttcgttgcacctagtcgtctcccgcgtgggaagaagacgacgactaggtctaacggcatcgtgcgtgagattagtagggacaaaggaggggtgtgtcgacgtttgatgtcgcggttccggtatttgcatagtatggggattgttggtactaggatatacgcgagacagtacaatatttggggtagcctatctaactgttgtcaacatggcggtctgaaggtttgactcgtagttgacaacagggtggtcttcctcctcgagttcgtgcccggcgagataagagacaatgctatgtctctcctgacagtatccagagacaccgtaggggactagccgtgcttatccctgaagtcgatatccgacgtcttatcttggcgtatgttggcttgtatgttgatcttctgtcttgatctattgttccgtagattgtggtggatgtgtctgttgattgtcccctctcctcctagggggccttgtatttatacccataagtgtctccttgtccaagtagaactagggaaaccaatatggatacaatccgagtagtccttgtcgtttccat

SEQ ID NO: 7147 - DNA, 107 bp, Oryza sativa
  Clone ID: PAT_MRT4530_1376C.1
gggttgggacccaagaaaaggagaaccattttctattactggtaaggggaaaacgaaagctctagatgtcaacctgtgccctccctctctatctctatgtgtctctg

SEQ ID NO: 7148 - DNA, 542 bp, Oryza sativa
  Clone ID: PAT_MRT4530_13770C.1
atgcgctctgaacgtaatgttatcagcagcgagaggagttctggcgttcccgagccgagcaacagagagaagggagaggaggcgcgccgatgctccagtggcggggaggcgctgacgccggcggtcggtcgtgttcccgactgccacgcacctagggatggaagtggccggaaaagggaaggtggaggaagaggggaaaggggaaaaatggattcctctcatcgaggcaagctctatggcgcgagggattggctgacggcgaggggcggtagcgtaaggcggttgcagaggtggtcgtcgactcggtcacggcggcaatggcgtggagcaagagaagacggcgccggctttgttctctcattggtcggcgacggcggcgcttacacgtggtggccgcggtatggttgggcggcggcggtagatgaacacggcacaggctacggtggcggcgcgacttggcaggcgaacggcaaggcagcggcgacggcgcacaaaactgtgggcgacggcggcgcaaatcacaacgacggcggcgattgcgc

SEQ ID NO: 7149 - DNA, 792 bp, Oryza sativa
  Clone ID: PAT_MRT4530_13771C.1
gtctgtaatgaccgtcaacagtgacggcgaatgctgcggtagcacagacgtcgccggaggggcagcgtcgcgttgcggtgcaggcgacggattggcgggcgatggactggcgagcaatggcgactcgctcgcgctgaggtcgcggcttcagcgtcggcgtccgtctgcaacagcacggtggtagcggcgtcgacggatggctgcggctgcgcggacgtgtcgccagtgcggttgtgaagtcggtgccactgggtcgcttgggtggctagctcggcaacgataacacttcttctgagatgtgggagctgttttgtcgcaattgtgtttagcttggcggcgactgtcgacgtttgatgtcgcaattctggtatttgcatagtatggggaccgtcgatgctaggatatacgtgagacagtacaatgtttggggtagcctatctaactgttgtcgacatggcggtctgacgatctgactcgtagttgacaacagggtagcctttctcctcaaatccgtgcccggcgagatcagagatagcgctttcatctctcctgacagtatccggagacaccgtagggtactagctatgcttatccctgaagtcgatatccggcagcgtgtcttggtgtatgtaggcttctatgttgattgtgttgggtgttgattgtctcgtggtgggtgttccttctcccctcctagggggtcttgtatttatacccataggtgtccccttgtccaagtagaactagggaaatcaatatagatacaatccgagtagtccttgtcgtttccat

SEQ ID NO: 7150 - DNA, 1324 bp, Oryza sativa
  Clone ID: PAT_MRT4530_13772C.1
atgttttgtgagtattgttgtgttgttctcaagttttctgcgactgtacagcaaaagttcaatactgtcactgatatcgtcatctttatacgtgatcatgataagcttcaagtcctgggactcgaacattatcacactttcacgcttggaaggaccgtgcaagattagccttgccattattttactctttcttgaattatctggaatcttgcagtttgccaatataactttctccagattaggagcattctataaaaatctcgacaatatataaaaattttggcccagatcacatgcacagaagcgcaaggttgtcagcttttgaaatgtcagaatatttatagatttgctacaatgcttctcctgtaataattggaaggagaattgagtttgacatgatcaacattataaattagtttggaagtcattatagatgcgatagaagaagtaatagtacaaatataaatagatgcacggcgaaaggaggtgagctttggcgccgtgacagccaaagcatctcttccagagcagtcatgaatggccaaactcttgagtgtgccacaaacaatctgactgaactcgaaccgtacagttcttgagctccatggattccaggacggggcaccgagaacggatacactcacggaatctgccgtccaaaaccatgctggaaagatgcaaagttttcaggcggcaagcagagatggcgccgaggagaggcagcccgaaccggtgaatggcgacggtttcgccaatggttaatctcgagcaccacgggccggcaccggaagccactgatgatccatcttctcttgtgtcgaggcatatatatgtcgggttgtcctacgatgtcacggtagtttgggagatgcagctggaatctgtcgaggcagtacggggcgttgtgggcgatgagcaggttggtggtgaaatcctccagctaatttgtccagctcaaccagctcgccgtggagtttgcaatcgtggacctcaactcgtggccatcgatgacgacgcacggcatggagcgccacaggtcacgccaccgccgggacagcgcgtacgtctgcacggcctgccgcgccgggaggaaggacacatgatcgtgtggacgaggcagtccggcaacgcgctcaggcggtcgccatcctcgtcggccttcggctggtcgagctcatcgccggtgttggtgttgtcgtcgcaagatcgatcgcaaaagatggtagagcttggatgcccaggtcgcagggacgctaccggcatgcagtcgtatgccattcgatcgaatttctcaaatatggttgaaaacatggaatacttgtag

SEQ ID NO: 7151 - DNA, 448 bp, Oryza sativa
  Clone ID: PAT_MRT4530_13773C.1
gacatcgtgtaaacgacatataaggaattgataatttatagaacacgatacctcagtcgtagcaaggggagtacacgcagcatcagttctactgaaagacatcgacatggcaacatcatcgtggctttattctatatgctccaatcgctataccagactttccaaagcgcacgacccaacacaaactcggggcactcatgactctaacttgaaacactctgacgaacgcaaaaccgccaaacactgacaggctataaaggctaaggatgagaggagatgttacgcaaactcttactcacattttgaagccgctctgtggagaccaccccctaactgggaggggatgattaccaccccctactgcttgccaccaatgacggacatcttatgccactgatgtatgactttttcatacataacgcccccattatacaaggacttgagaaca

SEQ ID NO: 7152 - DNA, 525 bp, Oryza sativa
  Clone ID: PAT_MRT4530_13774C.1
aattcactgcaacattagatgtcgacgtttgatgtcgcgattccggtatttgtatggtatggggatcgtcggtgctaggatatatgcgagacagtacaatatttggggtagcctatctaattgttgtcgacatggtggtctgaagttctgactcgtagtcgacaacagggtagtcttcctcttcgaatccgtgcccggcgagatcagagatagagctttcgtttctcctgacagtatccggagacaccgtagggaactagctatgcttatccctgaagtcgatatccgacgtcttgtcttggcgtatgttggcttgtatgttgatcttctgtcttgatctattgttccgtgtatgttgattgtggtgggtgtgtccctctcctcctaggaggccttgtatttatacccataggtgtctccttgtccaagtagaactagggaaaccaatatggatacaatccgagtagtccttgtcgtttccatgtagaactctggttgtctttccttgtccggaactccctccat

SEQ ID NO: 7153 - DNA, 360 bp, Oryza sativa
  Clone ID: PAT_MRT4530_13775C.1
agatgaacggcaaagtttttttttttggaagtcgaacacgcaaggcttattaaacgtcatatctggaacacgatttaacaccggcccttacaacaaatgcacattaaaggatggtacagagcggctgttcacctgaaccacaaaggagagagtgcagagagaatccaaactggtaccgtaatacgaacaaacatccagtgtgcagcatcgaatatgcgttgtgatcaagccatgatggatcgaaacgtacacggaaatcaacgatcgcataaagcaatttatttgcgcaatcacttactctaggggagtatggaggcaatgtaacataataaggacatgtcataacacttggcagatcat

SEQ ID NO: 7154 - DNA, 449 bp, Oryza sativa
  Clone ID: PAT_MRT4530_13776C.1
tgtcgacgtttgatgtcgcaattatggtatttgcatggtatggggatcgttggtactagggtatacgcgagacagtacaatatttggggtagcctatctaactattgtcgacatggcggtctaacgatctgactcgtagtcgacaacagggtagcctttctcctcgaatccgtgcccggcgagatcagagatagcgctttcgtctctcctgacaggatccggagacaccgtagggtactagccgtgcttatccctgaagtcgatatccggcggcgtgtcttggcgtatgtaggcttttatgttgtggcttctatgtcgattgtgttgggtgttcctcgtctccctctcctcctagggggcttgtatttatacccataggtgtccccttgtccaagtagaactagggaaaccaatatggatacgatccgagtagtccttatcgtttccat

SEQ ID NO: 7155 - DNA, 312 bp, Oryza sativa
  Clone ID: PAT_MRT4530_13777C.1
atggcggcggacggggtgggaggaggaggaatacagcggcggaggggagggctggccgcggcggcgcgtgttctggtgggccttgccggagtcggaggcgacaccggcggtcgtcaggggcgggtgggggaggcggcgggcagcgtgaggtggggccgtgtgatcaaaagtactcatcacaagtgcccgccatcgacaactatggcagcaacgacgagaagagatggcggagcctccgccatcgtcgccaaatgccacggtggtagcagctgcggcaaggggacaaggagaggaaggaggcgccagacctag

SEQ ID NO: 7156 - DNA, 504 bp, Oryza sativa
  Clone ID: PAT_MRT4530_13778C.1
atggcggtggtcgggttcacggtggggagggcgcacgcgggggcggccgcacggcttgccgtggaccgcgtgcacgggagggaagacggagggaggatgctgactgggcgcgacttgacccggtcaagcgggcccggggctgaggtggctgccacgtggtcggccatgtgggcaggggcgaaaggggaggaggaggaggaggaggaggcgcccgggatcggacggccgacgacgcgcgaggcgttccggcgagcggcggcgaaccggagcgagcggctaggaccatggatgacatcggcggtggggctgcctctctcggccttggaagctagcggcgtggagcggcggagcggcagcgcggcagggcacgacgctggcggcgccagggtttgtcgcagcggcgaccggggcgttggccacacgcgaacccgcgcgggaagggcgaaggcggtgggagcggcgtccttgccggtcgaccatgcgcgagcacgcgggaaacggtga

SEQ ID NO: 7157 - DNA, 205 bp, Oryza sativa
  unsure (1)..(205): unsure at all n locations
  Clone ID: PAT_MRT4530_13779C.1
cccacgcgtccgcccacgcgtgcgatcttgcatcagctcaggcttagcaagaaagattcttatactgtcttaagagctgacccatgaatgatgaatctagatcccgcaccatcaagcaactatgacgcttttcgcttgcgagaacgcagngctgtaatcgagcttaactcagaccgtatgcgcattttatggataatcttatgta

SEQ ID NO: 7158 - DNA, 445 bp, Oryza sativa
  unsure (1)..(445): unsure at all n locations
  Clone ID: PAT_MRT4530_1377C.1
gcggtttagggatgaataaacaatacacaccaagccaacatagagcgacgatgggaccgcttactactaacatcgtgctggccgtcgacgtggagacagctactgctcgggcgcggtgtnttgtgcgtggccgcccaaggatggcaccacggcccgaacatgacgacgcagatacaacgccccgtggttgcccgacagggccacctggtacgggcaggcctacggctcgggctccaccggcaatgggggcgcgggcggtatcatgaacgacagcctgccttcgtacagcggcatgaactgctgcggaaacgtaccaatcttgaaggacggaaagggatgcggctcatgctacgaggcgaagtgtgagcagccggaggggtgctctaagcagacggtgactgagtacatcacggacatgaactacgaggcgatcttggtgtaccag

SEQ ID NO: 7159 - DNA, 675 bp, Oryza sativa
  Clone ID: PAT_MRT4530_13780C.1
ccggccgggattactccaccctcactacattgtcagttgctactaactatttaaataccacgattactggagaacttcctctggtatccctccttattataacataatactatggtatgtgcaaagattcatactagaaatgatgtgcttacattgcatccaatacaaaccctcactctatggtaagtcatgttgcacgaacgacctcattcttccgtgatcacgcaagtgatgttctagtaaatgcctcatcgcttcgcgattgaagacgctctataggctcccgcgtaacatatgagatagacgttgctgcattccctcatcgtccaatataagagtgtacccagcacgtttatagatgtgtgcagaatcatgcttaacttcgttctcgcgcggtaacaaataactaagcaaataaggaagaacatggcagtgattacgctgctcctgtgcattcgtaaccctgcgtacaatacaaactctgaatgcgaaggacatccctcaacaagatcttacaatttatgctccactgctgtactgccttccaacgatctccaagatctgcaacatatctgaccacattgcgtatcggctatcatcccgttaccatggaggaacacacaaggactactcttgttactcagattgcgaaaataatgttgagaaagttcatat

SEQ ID NO: 7160 - DNA, 2128 bp, Oryza sativa
  Clone ID: PAT_MRT4530_13781C.1
gatgccatatagatttcctagggcggcttaggcgcggcccgaggggtttatgcggcttggccggacctaatgggccggcgcgggcgcgggaggggcggcccaagagagggggcgcggggagagagaggccgacgcgggtggacgcggtccaccgcgcgggacccacatggcggtggttgggttcacggtggggagggcgcacgcgcgggcgcggcacgccgggtggacggatggcggcgggcccacgtgcagccgcacggcttgccgtggaccgcacgcacgggagggaagacggagggaggaggctgactgggagcgacttgacccagtcaagcgggcccggggctgaggtggctgccacgtggtcagccacgcgggcaggggcgaaaggggaggaggaggaggaggaggaggcgcccgggatcggacggccgacgacgcgcgaggcgttccggcgagcggcggcgaaccggagcgagcggctaccgccggcagctagaggaggtcagggggaatcagtttaacggcacggatttgagaggggaggtacgacggtggctggcggcggcgaccaagctcgtcggatcggggatgtgctcgcgcgagggaagggacaagggggcgcgaactcgggcctagccgaaacggtacgcgaccgcgatgcgcacgcggggacgcgggacccgatggtcaccggcgacgcacgcgcggcgttgttatgtggcggcggaaacggcgacacgacgtggagacaaaggagaaggccggcggccttggggcagccagggggaggtcaaggggatccccgggagcgtggtagcgagaggaatcggagcgaaaggagccgacggtggtggattgcggcggcggccatcaccggcggagagaagaggaaatctcgccggggcaacgggagttcgattcaaaggggtgggagcatctctaggactcagggatcccgtttgtggcgtcggatggggcggaagagcaccaaggagggctggtgacaagcggcggcctccgggagcgggcggcaacggcggcgaggccatgccgggcggcggcgggtctaggggcggcgtctacgcgtgttcgggagtaccaccgagctatcacgcagactagagggggcgagggagagcgaggaaggggaacgggagggaaggggaagaagaagggtggccggagtcctcttcggctcctcgcgcacacgccggcttcaccagcgcgcgcgacggcgaagggaggcgaggtcggcagctgcaaggcggcaacaaaggcgcggcggcggtggaagagagatgccgagagagaatgagatagggaggctcggcctaggctttatagatggaaaagaggcggtttgggagggggaaccgacataggcggtcaagcgtcagggctgacgcggcggcgactgagcggctggcctcgagcgagcgcgcgcacgccggaacgagcggcacggctgaaaatcgaatggcggcagcgggaaatatcggcgatggcggcagcgctggagtgggagagagagagatcgaacgttggtggagaggaagagctcgacgtacggcagctcgtcgacgatggccgccacgacgccggtctgcaggctggaggcgtagtcggtgatggcgagctcccggaggcgggactcgggcacgcccagctcctgcatgaggtagctcttggcgaaggagccgacctggaagccgatggggtcggagctggcgatgaggccgtcaaggccctggatgcccgtggacagctgctgcacggtgaggatggaggtgaggctggcggtgtagctggacgccaccgccgccttgaacacgtcgatgcagtacccgctcgcgccgtccggcccccccgctccatcatgctgacgcggaggaggaggtcggtgatggcggcgcggtcggcggcgggggggagcggggcacggtaggagaccttggagcgcatggactggaggtggtcgccgagggcgtcgagggcggcgcggccgtagtcgttgtcgacgagcactgagcagccggcgaggcgaggccaagaaaatagaggagagaagaagcgagagcaggaggcaagagagcaaggcatcaggaggagggtgaggcctcagctc

SEQ ID NO: 7161 - DNA, 1044 bp, Oryza sativa
  Clone ID: PAT_MRT4530_13782C.1
ccggccgggattttctttcttcttccttatccttttctctctttctcagcctcacccgccgcttcgcccgtcatcggcgatcgcagcactcgcccgccgccgccgctccaccagtccacccacagcgcgagcagcgtgctcagcatgtacaccagtagcctccccgccagccgtggcgccgaccgatagtccaccccgccgtcccgcatcagccctaacaagaacccctcgtcgtgcggcaccctccttgtgtagcacagccacctcgccgccgaggcgcttctgcgggactcgcccgtgccggcgtcggtgtcctcgccgccccccccccccccccacatcgtccgtggccctgtggaagtagatgcggcgggagtcctcctcgaacgcgacggcggtgacgtcgcccgcgcggaggccagtcaagaggtccgagtaggccacctccttggctgcattcttgggcagcgcgaggcggacagcgaggaggaggaacgccaggacgatgggcgccacccaccgcccttcccagtagtcacatctagcctcctcccctcctcctgccattgatggatgcttacctaatttgccggaagtgacgacggaccggagcgcggcgttccacagcgcgtcgacagggtaaaaccagaggaggttgaagagaaacaaggtgagcacggcgcagacgagccaagcggagacgactctattgaggaagctgcaaaggttgctggtggtggtggtggtggtggtcgccggagttggacacgacagccgggtggcgccgtggcccgtgacgcggtggctcgcgcgtggccatagctgttcaaccgaatgcagcagggagacaactctcagcttgatcgtgtttgcaactatgcaccaacagtgtctccagtgggctgagttctgcactatccacgttggagtaaaatgaaaaagtgtaaagccacctgatgtttccggaagggtcacgactcttggtcttctataatcttgatgattcaactcttcatcttctctgtatatccattcattctccat

SEQ ID NO: 7162 - DNA, 249 bp, Oryza sativa
  Clone ID: PAT_MRT4530_13783C.1
atgcggccagctgcgcacagggagaggagccgtcagccggccgcgcacgggggaggagctcactgggtggccgtgctcttgggaggaactcccgggttcctcgtggaccaggtagcgcagttcctcctcactctccaccgccgcctcctcgacgacgactgtggtcctcccgccgaagccattccctcacctctcctccgcatcccttccatctctcctccctacctctgcctctacctctatccctga

SEQ ID NO: 7163 - DNA, 5261 bp, Oryza sativa
  Clone ID: PAT_MRT4530_13784C.1
ttagttcaattatctcctgcagcttcttgatctacataagcaggggattctttaccctacatcttctcggttgaagtgataatcgtaggtaatttccttagctgcatttacgtggcgttacgggacgaacactacgttcttcgggttccttattgagtttttttttgtgacatattttttttgttgatttttaaattaattctaaatccattctaaatttaagtttggatgtctaaattatcagtgccagattaagtccctacagtttattcatatatacagtgcgcacattacaatgtttaaacagcactacaaacatacgaccgaagtacactatcttagttcagatatctcctgcagcctctcgatctacagaagcaggggattctttgcccttcatcttctcggttgaagtgataatcgtaggtaatttcctcccccggatttatgtggcgttccgcgaagaacactaccttcttctcgttccttactgagattatttttgcgacacagtttggttggcaagagtggttgatgaatcttgcgatcccacccttgcgggtggcatcgatgatatgttcctttccaatcttgaagaagtaacaagcactcttatattgctgccgtttcccggactggtattcaatctctcttttgtcagcaacgcattgcccaacaatttcaccaacatactcattttcattatgctcgccttctggctcactttgcaacaaacccctctgatgagcacaccaaggatgaaagagaactgagcaattaacatcacgacaccccataaatgagcccccagttctgttacacattgagcattcggtatttcttttggcaggtgaagcccctgatatatcaaaagcactcattgtgattgtatttgggcattttgtaccaggtgtccacaacccacagaccacatgaacccactgccttgttcgtggaccaagtagactggaattgcgattagaggtccacgacttgctgataatgtccccacgtgcactacctattgaagcttcttttataccaaaagaagatatagcattgaagcttcttgatctgtgtccattaaatgaatcatgcctgacatattccccatgtaacttgcttgtacactcactgttcacatttcctgatgaataaacatatttatctgatctttttgcagttgcaatacccctcagcaagcttttgagaatattctgggctttcaatgcccttgtcatagctccacctccataaccacacagaacacagactgtgtcctgggtattgatcttgcagggcttacagaaccattgtcctcttggaacttttagaacaccatagcaagcttggtgcaccttgataaagcacttgctgcactctatcaactgattggaaggctccaggtttgagataccacaaacacaacatgaagcatctaaactaggcctttgtatatatctctccatcctattaagagatatgcatgctctttgattcttacttcctctacttcttgatgctgacagctgacttgtccccatatctgcaaggctaagaggctcatcttcttcaagtacacagcagggactttggcagtcagtcttgacgtgtggcctcgagacattagatgaatacctattctttttgggagaccacagttcatcttgtggactgaaacttctgtcaccagaggaagatttatctgcagaaccatctgaactcttttcctcagaaaaatggatattttctgtcttactgaggggtttgatagcatgacatctcttagcctttttaagaatcagattgagtggaacaattttgggagatttccgattatcattagttattcctgtagcaatcaaactagaatcaatactggcactcccactacaggcatcttcactgttagtttcatttacaatgcaattcagagacacatattttggcagtttgcggacaagcaatcgactcccttgctgttggcattttgttctatccaaagtggtcatattatcttcttgcttttttctatcagaggaatttgattctccaacataaatgccctcatcatctgaccgttcattgtcaacattgagaactttgcagttgctgtgaagccgtttcacatgtttattcagatgcgtgggaggatgtttcctcttggtttttgatactctgcgtgaaaatggaccagccttatgctgcggttgagaatccccttcccgggatgacagatcaattttcctagtacaatcatcggattctgatttgtttgcacagcacctcaatgttcgtgttttctttgacatttcagaacattgtccctcattctcatgttctttccgtgtacttccctcagaaatttgattatttttgtgcttcactaaagatggctccaggtgaaatctagaaaaactattttgggcttcttcacatcctgtactaataggcaaatagctggatgaggaacatttctcaattcgtgacccttcatcaaacacaagatttttgtgttcaagaccatacttgttcaattcaggtgatgcagaaaacttggtcacaacatcgctggagaatccagaagagaaaccggattttagttctttaaatattccagaatctctacaagcactcgctttctcttttacagtttcatagggccaatggccacctacagccgatgcttctgttacattcttcagctgctgtaatgtaggaacacaaggtcggttcaatacttcagtagagacctcattctggaaagaagctttagagtcgctttttctagcaattatctcgcttgagcactggcatattaatttttcactctcccctagcgtgcaacatctggcagcagcttgcatgccatcatccttgctcttttgtactgtatgatcagtttgatcgattctagcaacacagtgctttgtaaatccataacctgccaaacattttggggctaaagagcagcagcattttccatcccggtaaggactacattctgtattattaggtgcatcaagcagagtgttcttagtcaagctgttggctgtgtgtcccatagaacttctgtagtacccatcaatgggacatgcatggcaacaggactgcaacataagctctctagaacataatgaggatcttggtatgaaagtagagcgggtgcgcacttcatctagccctatgggctggaactggagtgccatcattacagaaatgagatcggcagaaattgccagctctaaaaccaagtttggaagaatcttcttgagctttgcaacagcatctatgcattgattttccgttctatcataaaaacagggagccccagtctcagaatgtgcaagatgggatttgtcagcaacatgattacaacacctgcaattcactggagaagaaacttctgcgcaaattttggagattccggcgttaggttgactaggcagcaaatgtggcaggcagtccccatttattaaaggctcttgactatttgcatgaagtacatcttgatgaacatatcccttggaagccactggaactggaagagacctgctatctgatatccttttcgtgtgaataatggcaggtgccaacttcaactgattatcatttgcccttgtctcaacttgtgtacttgcagtttttaaacgatcggaactatatgcaacatctggagccttaagaaggtaatgctcattactgttgagaacatcatcaatggactcagatgtactatttctctcaagatgtgaaagaaataatgaaataaatgaattctttgctgcatcatctgtaatctcattgagttcagaatggctggttccattagaaacatcaagtgatcgtttcctattacctgtaccaaatgatggctcaatgttttctatagttttgttggctttggtagtttgcttcggataagcatctgcaccaagtgattctgaaccatcttgaattattttgtgaggtacatcaggcatgcatgccctactgtcattgctcaaaactcttgtagaactaggaccaggactacgagacaagttatttaagtttttctccagaaagtttgcataatcatgtgccaaatgatttctactgtaagttattcccatgtttgctgttgaatatgttcgttcacttggcctgctaatagagttcatgttcatgtcatggatcatatgatttgctaagtttattttcgaactctgctgtatagctggattctttgagaaagcttcatgtaaaccgacactctttctataaaatgtttcatctggcttattcactagcttctcaacagaagtgaatcgtccaacctcattgtggatatcactggaataaactggattgtttatatgtccagtgctttttccatgtccactgaatagccctgttttttccatgttattgttcgttgtaaggagacttttagtccagtattcttctgaagaatatctcatatatgcccattctggccagtcccacttagtgtcagaaatggatgctccaacccccatgcagtacttgagccattgtacaatagtcatgccattatccataatgacaatttcaccagctttttctgcgggtcctcctgaatgctcacagaacttagccacagacattctcagccggtgacaaaagcaacgaactccaaaaatcccagcttcaccgacaaagaattcaccaccaacattcagacaggagacgcatatctgatcccctagaagcgcaggatgatggcgaggggttgattgggatggcaatttctgcactgcgcatgtgctcgagtcctgaaactggatggcgccttgggatatcccattgttaactgaacattcccctggaaaactaccctgcacatttgcacttgtgttctgaaacaacggccccaagcaggagggctgctcaacgctgctgctggcttccaagccgtgcctcggatgcttgggcagaggctccgcgcctccgagcggggaagcgcgagtaagatcaatgacattagcagcattgcctgcattgagcatgccaaacaacgccttccggtccgaaacatgggtggcatggggatggttcccagccacctgagcaagcaacgaggtgctcggcgccgctctcgcgggctggccgtactgcgagctcggatggcttgcggccagctgctccggcggcgccgctccctgtgcggcgaaggggcggaggatgtggcgcagactggcgctgtcaatctgcacacggacacagtagaacgacgccat

SEQ ID NO: 7164 - DNA, 1530 bp, Oryza sativa
  Clone ID: PAT_MRT4530_13785C.1
aactagtggatcccccgggctgcggccacgctaatcggggccctgctcgccgccgtcgtctggtgcgccgcctacctcgccgccgccatctcctccgccttctgacccgccgccgcgcgctccggggaactcctcctcctccagccaaactacctccccccgcttctcccctctctaaaaccctagttcttctcggtcgctccgccgccgccatggggtacgcgcagctcgtcatcggccccgccgggagcggcaagtcgacctattgctccagtttgtatcagcattgtgagactgtgggtaggacaattcatatggtcaatctcgatcctgctgcagagcacttcagctaccctgtttctacggatattagggagctcatatcattggatgatgtcatggaggaacttgggatgggaccaaatggcgggcttatctattgcatggagcaccttgaagacaatttggatgattggttggatgagcaactggagggttatttggatgatgactatcttgtgtttgattgcccaggccagattgaactcttcactcatgtcccagttctgcgtaactttgttgaacatttgaaacggaaaaatttcaacgtttgtgctgtgtaccttcttgattcacagtttgttagtgatgtgacaaaatacatcagtggttgcatggcttctctttctgccatgattcagcttgaacttcctcatatcaacattctttcaaagatggacctggtctccaacaaaaaagatgtggaagagtatctgaatccagaggcgcaggttctcttaaccaaatcgttagctgagctggcacccaattttggcaagctaaacaaatcattagctgaactggttgatgattacagcatggtgaatttcatcccacttgacttaagaaaagagagcagcattcagtatgtgctgtcgcacatcgacaactgcatccagtatggggaagacgcagatgtgaaggttagggacttcgatcccgaggaggactaatcatttgatcgcgtaggagctaaaaaaaattactatcgcagcattggtactacatagtactacctccgttctattataagtgcagcatgtttttccgcgttcaactttgaccatccgtcttatttaaaatttttttgaaaaaatttaaaaacataagtcacgagtaaagtactatttatgttttatcatctcataacaacaaaaatactaattataaaaaaattttaaataagacgaacgatcaaaattgggcgcggatacttatggttgtacttataatgggacggagagagtattcaagtatgcagaaaacatcgcaggattacaatgttgtttccgtatgagtcctatctgttgatcaacaagacagaatgctataatctgcaacctcctgtaaatcaagccgtacgttctctgtgtaatcggttgactggttggcattaacaagctgctgcttgccagaaaagaaaaacatgacttttctgaatgatttgaaacaaaaaaaaaaaaaaaaaaa

SEQ ID NO: 7165 - DNA, 1339 bp, Oryza sativa
  Clone ID: PAT_MRT4530_13786C.1
cgagcaacttctgttcgctccattgcatgtgcctccatcacaaggccgccgcaagcaccaaaacccagatgacgctgtgctcgccgccgccatctcctccgccttctaacccgcgccgcgcgcttcctcctcctcctcctccagagcaactacctcctcccccgcctctcccctctctaaaaccctagtccttctcgcccgccatggggtacgcgcagctcgtcatcggccccgccgggagcggcaagtcgacatattgctccagtttgtatcaacattgtgagactgtgggtaggacaattcatatggtcaacctcgatcctgctgcagagcacttcagctatcctgtatctacggatattagggagctcatatcattggatgatgtcatggaggaacttgggatgggaccagatggcgggcttatctattgcatggagcaccttgaagacaatttggatgattggttggatgagcaactggatggttatttggatgatgactatcttgtgtttgattgcccaggccagattgaactcttcactcatgtcccagttctgcgtaactttgttgaacatttgaaacgaaaaaatttcaacgtttgtgccgtgtactttcttgattcacagtttgttagtgatgtgacaaaatacatcagtggttgcatggcttctctttctgccatgattcagcttgaacttcctcatatcaacattctttcaaagatggacctggtcgccaacaaaaaggatgtggaagagtatctgaatccagaggcgcaggttctcttgtcacagctgaaccgacagatggcacccaagtttggcaagttaaacaaatcgttagctgaactggtgaggaagacgctgagccgctacggcctcgccgagttcgagctatgcaccagcgacgaggcctccgcactcgtcccctccctccgttccggcggcagcattcagtatgtgctgtcgcacatcgacaactgcatccagtatggggtagacgcagatgtgaaggttagggacttcgatcccgaggactaatcatttgatcgcgtatgaactagtgaaaaatactatagcagcattatgtagtgaccagtagtgataggactccatagtattcaagtaggagtatgcagaaagcatcgcaggattccaatgctgtttccgtacgagtcctttcggttgatcaccaagatagaatttctgcaccctcctgtatatcaagccgtacgttttctgtgtaatcggttgactggttggcattaacaagctgctgcttgccaaaaaaaaaaaaaaatctgaatgatttaaaaccaaaaaaaaaaaaaaaacaa

SEQ ID NO: 7166 - DNA, 390 bp, Oryza sativa
  Clone ID: PAT_MRT4530_13787C.1
atggcggatagggcactgagacttggtgtgttggtggtggtcatcacgtacgcggaccaactgcgagagattctcgtcttgtttcatctcgggaacatggcatggatgtgcgagctcggcgagcagcggcagggattgcgcggacggatcgaagcgccacggcgggtgtcggtgagggatggagaggatgcacgacatggcaatggatggatggatgcgtgtggcggcggaaagagggcgtcggttttgagaatttgtggcggctgcggtgatttgggcgtgagggcggaggcagggagcgcggcggggatgtgcgatggattgaacacgatagagatgccagataccgccttatccgtgatttcaccgcatgatgaaatcgtgcggtag

SEQ ID NO: 7167 - DNA, 1533 bp, Oryza sativa
  Clone ID: PAT_MRT4530_13788C.1
atggcgactctggagacgtgggtagggttcgggtcggccatggccggcgtgggcttgctttggtcccggatgccggagcacgtccacgaggaggctaggtacatcatcagtagcgtggtccccatggttatgtcctacttcaacccctacgagcagatcaccgtgtccgagtacggcgaggagcggttccggcggaacaagatgttcgacgccgtctccacctacctgaggagcgcgtgcctgggcagcgcaaccaagctcaaggccaagctcggcaacaacatcggggatgacccgcttgtgattctagacgagaaccaggaggtcgtcgactgcttggatggtgctcgcatgtggtggaggctgtaccccaaggcctccaagaacacagggagcaccatcatcagcatgttccccggggacacggacgagccgcggtgctacaggctggtgttccacaagcgccaccgccagctcgtgctcaagacctacctgcccggcatcatccggcggtggcgcgagctaaccgccaaggaccggcagaggctgctgttcaccaaccactccaaacaaggggagatcagcatgtggaccagtgtcccgtacaatcccccgtcgacgttcgacatgctcgccatggaccatgccaagaaggttgagattatggacgatctcagggcgttccagaaggggaaggaataccactccaaggtcggcaaggcgtggaagcggggctaccttctgtatgggccaccgggcactggcaagaccactatgattggggctatggccaatttcctcgactacgacgtctacgacctcgacctaacatctgtcaaggataacgccgagctgcggaagctcttcctcgatacgacggacaaatccatcatcgttatcgaggacatcgacgccatcgaggtcgagctcactaccaagcgcaagggcaagaagatggacaacagcgacgaagtcgacaacaaccatgtgctggtcgagctttccaacaagactgatgataaaagcaaagtgacgctgtcaggcctactcagcttcgtcgatgggctgtggtcggcgtgcggcagcgagagggtgttcgtgttcacaacgaaccacgttgacaggctcgacccggcgctgattcggccggggaggatggacaagcacatcgagatgtcctactgccgcctcgatgcctttaaggtgctggccaagagctacctggacatcaccgagcactcgctttttggtgaaatcgggagactgctcgacgagaccgacacgactccggcagatgttgccgataacctcatgccgcggggtaagaggaacggtgaaatcagtcgactgatcgatgagatcgacgcaccggcagacgtggccggtaatcacatgctacggtgcaagaggaagagagacgcggacgagtgcctggcaggtttagtggaaacactgaagaaggccaagatggaatcagcaacacctcctatggacacaatcgaggaagaggccaacaaagaggaacaaacctaa

SEQ ID NO: 7168 - DNA, 3573 bp, Oryza sativa
  Clone ID: PAT_MRT4530_13789C.1
atggggaacactcagattgagaacagcaaagcagccaaggaggatgatgagacctgccaaaacaagcatgatgattacgaggttcgtcttgaatcttacaaaaaagatgttgataaagagacggctcgccgccggatcaacctaaactctcgaaggcctgatgcaaattacttgatgactcttgacttcactattatgcgaaatacaacagttataaagaagatcaaaacaaaaaatgatgaacagaaggatggattgatggatgagttgcaaagtgtgaactaaaacaattttgtcagcgaggcagtttattatatttgtatggccaaacatagtactgctgatatacgaaggaatgttcaggtttgctccttacttcatcagagatatgaagatttctctccttgtcttacacaagggctactaaaggtattctttcctgggaaatctggagaagatttggacgcagacaaaaactcaagagctatgaagaagagaagcacactgaaacttctaattgaactgtattttgttgggattgttgaagatgctagtatatttgtaaacattataaaagatcttacatcattagaacacttgaaggaccgggaaacaactcaggcaaatttgtctcttctttctgcctttgctcgtcaagggagatttttcatagggttacagtctcatggtcaagaagcttatgatgagttatttaaggatctaaatgttacggctgatcagaaaaagttcttcaagaaagccttgaacacttattatgatgctgtagctgaactactccaatcagaacatgcgtctcttcgtctgatggaggcagagaatgcaaaagttttaactgccaaaggtgaactaagcgacgagaacactgcttcgtatgaaaaactccggaagtcttttgatcatttacaacgtggtgtatcctcgttagctgaagctcttgacatgcagccccccgtgatgccagatgatggaaacacaactagagttactacaggaagtgatgtagccccgtctactgcaaaagaaccgtctgcactggaacctatttgggatgatgaggatacaaaagctttttatgaatctttacctgatctcagagcatttgtgcccgctgtgttattgggagaggctgaaccaaagttgaatgagaagggtcgtgaacaatctgaacccgtcgcagaacaagatactgacgtacatgacaatcctcaaacttcttccatcactgaatatcatctggaaggaaaggcagatgatggagtgaaggatagtgaagaaaaagataaagataagggaaaaggtgtagacaaggaaaaatctaaagagaaggattttgacagaaaaactgaaagagagaaggagaaaataagagctgtggatggtgcaagtttagacaacctccttcagaggctgccaggatgtgttagccgtgatcttattgaccaattgacggttgagttttgctacctaaattctaaagcaagtcgaaagaaactcgtgcggacgttattcaatgttccaaggacttcactggaacttttgccttactattctcggttggtggctacactttcaacatgtatgaaagatgttccaagtatgcttctttctatgcttgaagaggagttcaacttcttaataaataagaaggatcagatcaacattgaaacaaaaataaaaaacattaggtttattggggagttgtgcaaattcaaaattgcacctgcagctcttgtttttagctgcttgaagtcctgcctagatgatttcagtcatcataacattgatgtggcctgcaatctactcgagacttgtggacgttttttgtatcgttcacctgaaactactattcgtatggctaacatgttggagatactgatgcgattgaaaaatgtgaagaatttggatccccgccacagtacacttgtagaaaatgcctattacctttgtaaaccacctgaaagatctgctcgagtttcaaaagttcggccacctctgcatcaatacatacggaaattgcttttctccgatcttgataaatcaagtgttgaacatgttcttcgccaattacgcaagctaccttgggtggagtgccaacaataccttataaagtgttttctaaaggttcacaagggaaaatacagccatgttcatctgattgcccttctaactgctggtcttagtcgccatcatgatgactttgctgtttcagtggtagatgaggttttagaggagacaagggtagggctggagctgaatgactatggaatgcaacaaaggcgtctcgcccacatgagattccttggagagctatacagctacaagcatattgattcatcagttgtattcgagactctgtaccttatcatcgtatttggtcatggaactcctgagcaagatgtgttggatccaccagaagattgcttcaggatcaggttaatcattacacttctgcagacttgtggccactatttcaacagaggctcttcaaaaagaaagcttgacaagttcttgctgcattttcaaagatatattattagtaaagggcccttaccacttgacatagaatttgacgttcaggatttgtttgctgagctaagacccaacatggctaggtattcatcagtagaagaactggatgctgcattacttgagctcgaagaaagtgagcgtgcagcctcagttgagaagcctgaaaatgaaaagctctcagacagcgaatctcagaaggtgcagccacatgatactgccttttctgctaacggcaggagctcagcaaatggagccgaggaaaatggcaaggatcatgaaggagctgacagtgaaagttattcagatagtggcagcattgatggtcatgaagacgaggaagatcttatgttcgaggataaatcaaatgacgcatctgagaatgaaggtgatgatgaggatgatggcattcctgctggttctgatgaagatgaaggtgttgaggttagacataaagtcgtgcaagttgatcctaaggagctagaagactttgatcgggagctgaaagcccttcttcaggagagcttggagtcacgtaaatcagaggtacggcccagggccactttgaacatgatggtaccaatgaatgtccttgagggttctaaggacccaagggctgtcgagtccgagagtggagaagaaactgtggatgaagagggtggtagtgctgggggtggcagcaaggtgcgtgttaaggtgctaatgaagaaagggcacaagcagcaaacaaaacagatgttcgttcctggtgactgctcacttgtgcaaagcacaaagcagcaagaggctgctgagcttgaggagaagcagagtattaagcgcaggatcctggaatacaatgaaagggaggaagaagaaatgaatggtggatcgtcacagatgggaaattggggtcaaggaggaagcaacaccggcagcagtatcagatcaggtggacggggcatttgggatggttcgatcagaggaggtcggcagcggcaccacattgctggtggtttctaccatagttatggaaggagacgatga

SEQ ID NO: 7169 - DNA, 149 bp, Oryza sativa
  Clone ID: PAT_MRT4530_1378C.1
aaaagaaggtgggaacctttttttagtcctggtttcgaacagaatcacccccaaggggcatactgggggggttttattttactctacgccgatactagttctaaattacattactctgagggctcgctttcggactcattcgataatcc

SEQ ID NO: 7170 - DNA, 429 bp, Oryza sativa
  Clone ID: PAT_MRT4530_13790C.1
cctcgcgcagcgcggtgctcgcgccttccgcgacggccacttcgacgaggcagtttccttttactctaaagcacaaactttgagaccaggagatcccattatccttagcaaccgaagttctgctttctgtatgataagtcaagtgttgagggagagatcagcagctgactcagagtaccaaccattgaatggtcttgatcccacaacgcatgcggaggtagcgctcaaagatgcagagaaggtattagctatcggcagtaattctccaagaccatatcttctcaaggcatatgcgcttatcctgttggagcagtaccatgaggcacgggaggctattctttctgggcttcaagttgatccccttcaccatgtcctgcaaagctggctcagtgatctgcacaaaaatacaagtattgcagcttgagcaag

SEQ ID NO: 7171 - DNA, 9526 bp, Oryza sativa
  Clone ID: PAT_MRT4530_13791C.1
tcatgccttaagattcgtggcatgaggcaagaaactgtgcggtggaaattgttcccgttctctcttcaagagagagcaaagcaatggtacacctctaccgttggatgtgtaaacggtagttgggagaagttgcgagacagattctgtcttgccttctttccagttactcgtattactgccccgagtatgtgcttctccaacatttccatacgggttttgatgcagcaacgggggttcccgatctttcgatgagaggaggataaacttcgatttggggaaggatacgacgttggcggtccgactacaactaccacaggggtgctgcgccttagcaaccggtacaccgactccacgttgttgctgttcttgccgtgccaagaacaaccttgaacctgataattaagttcacgagctagagctctagtcattggtccttgctgtgcaataggcgtggttgtatcgttggaagggatgtcctcatcatcctccccttcttgcatttgagtcgtcctcgactctaactcatcttcttctcccaaatatggctttaaatctgcaatgttaaacgtggggctaaccccaaaatcggcaggtagctcaagcttgtatgtattgtcattaatcttttgtagcactttgaaaggaccatcagctctaggtagcaacttagattttctcaaattagggaacctatcctttctcaaatgcaaccaaaccaaatcaccaggttcaaaagcaacatgtttctttcctttgctcccagcaagtttatactttatattcatgcgctctatgttctccttagtggtctcatgcagttttaacatcaattcagcgtgatattttgcatcaaagttcactctctctgaagttgggaggggcaaaagatcaattggagcacggggtagaaggccataaacaatctcaaaagggcacttcttagtagtagaatgttgtgaacgattataagcaaactcaacatgaggcaaacattcttcccacattttaatattctttttcaaaacagccctaagcattgtagataatgttctattcaccacctcagtttgtccatcagtttggggatgacatgtagtagaaaataaaagtttagtccccaacttagcccacaaggttctccaaaaatgactaaggaattttgtatcgcgatcagaaactatggtgtttggcactccatgcaagcgaacaatctcacgaaagaacaaatcagcaacatgtgtagcatcatcactcttatgacaaggtatgaaatgcgccatcttagaaaatctatctacaacaacaaagatactgtccctccccttctttgttctaggcagccctaaaacaaagtccatagaaatatcctcccaaggcacactaggaacaggcaaaggcatatacaaaccatgagggttaaggcgtaacttagctttttggcatgttgtgcagcgagcaacgaacctctccacgtctctcctcatcttaggccaaaagaaatgatcagcaaggatatcctccgtcttcttcacaccaaagtgtcccatcaaccctccaccatgcgcttcctgcaataatagcatacgcacggagctagctggaatgcataacttattagctctaaacacaaacccattggtgagaacgaatttgttccaagtccttccctccttgcaattcaacaacacatctttaaaatcatcatcgtgcgcatattgctcttttattgtttctaagccaaaaattttgaagtcaagttgggatagcattgcgtaacgtctagacaaagcatcagcaatgacattttcttttcccttcttatgtttgatgacatatggaaaagattcaataaattcaacccatttagcatgcctacggttaagttttgcttgacttcgaatgtgtttcaaagattcatgatcagagtgtataacaaattctttgggccataaataatgctgccatgtttccaatgttcgcactagagcaaacaattccttatcataagtagaataattcaaactaggcccactcaatttctcgctgaaatattctataggtttgccttcttgtaacaacacaccacccaatccaatcccactagcatcacattcaagctcaaaagttttgttgaaatcaggaagttggagtaaaggagcgtgtgttaacttatctttcaaagtgtcgaatgcattcctttgtgctgcagcccaagtgaatgtgacatttctcttggtaagctcatgtaatggggctgcaatggtgctaaaatccttcacaaagcggcggtagaacccagcaagtcctagaaagcttctcacttgggtgatcgttgttggaaccggccagctatgtatggcttcaaccttggcttgatctacttcaattccctgcggagtcacaacatagccaagaaaagagactcgatctgtgcaaaatgtgcacttctcaaggttaccaaataaacgttcatctcgtagagcatcaaaaacagcacgcaaatgaccatgatgatcctctattgatctgctatatatgagaatgtcatcaaaatataccaccacaaatctgccaatgaaagcacgtaaaacttcattcattaatcttatgaaagtactgggtgcattagtgagaccaaagggcatgactaaccactcatataggccgaatttagttttaaaagctgttttccattcatctcctaacttcatgcgaatctggtggtaaccactacgcaaatcaattttagagaacacaagtgaaccactcaattcatcaagcatatcatctagcctagggataggatgacgatatctgattgtgatgttgttaattgctctacaatccacacacatgcgccatgagccatctttcttaggaactaaaagcacggggatagaacaaggactaagagactcacgtacataccccttgtcgagtaactcttgcacttgacgctgaatctcctttgtttcctctgggttggtcctatatggcgcacggtttggcagagaggccccaggaatgaggtcaatttggtgctcaatccctcgaattggtggcagccccggtggaacctcctttgggaaaatatcagcatactcctgcaaaagattagtgaccggaggaggcaaagaaataggagtatcctcaattggaaataaggtttctttgcaaaccaaagcatagcaaacaacagtgtcagtgtcaacttcatccaaatctgattttgttgcaatgaaacaagatcccttcagcttaatctcatttttattattttgaacagagttggtgggtttcttcttatgcttctcaagttcattagccgcaataagatgctcactcctagtatgctcctgatttttttgtttgctagctctagcaagttcatcctttaaaataacttcaggagacataggatgtaacacaagtttttttccattatgcacaaaggagtattgattggatttgccaaagtgtaaagaatctttatcaaactgccatggcctacctaagaaaatagaacatgcttgcataggcacaacatcacagttgattgaatcatgataagaaccaatggcaaaatgtactcttaccaatcgtgttacctttaccttgccgctgctattaagccattgaatatagtagggctgcggatgtggctgtgtgctcaatgcaagtttctccaccatttcagcactagccaaattattgcagcttcctctatctatgatcacgcggcaagagcgttccttgatcacacacttggtttgaaacaaggtgtggcgctgattctgttcagccctttccatttgtgcgcttagcactcgctgcaccacgaggctctcatagtgctctgcagcttcagccccaatgtgttcctcatcttggtggggcgcgtcacctttccctgcattgttagttgcaagcaaagcataggtttcttcatctaaatcactagcggaggagtacccaccatcagctctcacgatcattacacgagtgcttgggcagtccttgcgcacgtgaccatagcccttgcagcgtaggcactgaatatctcttgtccttcctgatgaagctactgatgatgagctcttggaaggtgtagcagcaacccctcttgttggttcactcgggcatggtgtagagtttgttgtagaggggcgcagcttgttgtttgaggacgatggtgctgctgctcgagttgacggtgcagcaacgttggaagatgtccaagagctagcacgacctgcagaaatgttagtcctaaagctagctcttcgtccctgtacttccctttcagctttacaagcaagatgaaataaacgattaattgaattatattctttgtaggctagaatgtcctgaatttctcggttcagcccacccatgaatctagccataccagcatcatcattttctaccaatccacaacgaagcattcctgtttgcaaagcttgataatactcctctacagatttgtttccctgtctaagttgttgcaatttgtgcagcaaatcacgtgcatgatatgaaggaacaaatctagctcgcatgactcttttcattgcatcccaggtttggggagtgttatttggattggaacgaacaaattcactccaccaaatggatgcaaaatcagtgaactcactagtagcagccctaacacgtttattctcaggaaaatcatggcaagcaaatttctgatcaatggctaactcccaagtaagatatgcatcagggtcatatttttcatcaaagcaaggaatggtaaacttgatcttgcctaaagaatcatcattatcacgtacctcctgccgtggtggagcgcccatgccatggcgctgccggcgctgttgtctttgtggacgaccaagtacctcctcatcatgctcagtgtcagcagcgtactccagttcttcccttgctgcgatgctgctattagcatcatggccattgtggttgcgcctagccgatccatcatgaccatcttggcccattctctccaacgtattcaagatacctgcaagagaagtattcacagccacaagggacctctccaatgaggaaagcttggagttggtgtcaatttgagcagcctccaattgaccaaggcgatcattggcgaccctaacatcctcatcaaggccttcagcatgctccctcacttggcgctcaaaatgttgtatgatgccccttgtacgtggtgaatgttgagggtgctcccccgatcctccgagcaacttgagctctgataccacttgatgcagcaacgggggttcccgatctttcgatgagaggaggataaacttcgatttggggaaggatacgacgttggcggtccgactacaactaccacaggggtgctgcgccttagcaaccggtacaccgactccacgttgttgctgttcttgccgtgccaagaacaaccttgaacctgataattaagttcacgagctcgagctctagtcattggtccttgctgtgcaataggcgtggttgtatcgttggaagggatgtcctcatcatcctccccttcttgcatttgagtcgtcctcgactctaactcatcttcttctcccaaatatggctttaaatctgcaatgttaaacgtggggctaaccccaaaatcggcaggtagctcaagcttgtatgtattgtcattaatcttttgtagcactttgaaaggaccatcagctctaggtagcaacttagattttctcaaattagggaacctatcctttctcaaatgcaaccaaaccaaatcaccaggttcaaaagcaacatgtttctttcctttgctcccagcaagtttatactttatattcatgcgctctatgttctccttagtggtctcatgcagttttaacatcaattcagcgtgatattttgcatcaaagttcactctctctgaagttgggaggggcaaaagatcaattggagcacggggtagaaggccataaacaatctcaaaagggcacttcttagtagtagaatgttgtgaacgattataagcaaactcaacatgaggcaaacattcttcccacattttaatattctttttcaaaacagccctctccacgtctctcctcatcttaggccaaaagaaatgatcagcaaggatatcctccgtcttcttcacaccaaagtgtcccatcaaccctccaccatgcgcttcctgcaataatagcatacgcacggagctagctggaatgcataacttattagctctaaacacaaacccattggtgagaacgaatttgttccaagtccttccctccttgcaattcaacaacacatctttaaaatcatcatcgtgcgcatattgctcttttattgtttctaagccaaaaattttgaagtcaagttgggatagcattgcgtaacgtctagacaaagcatcagcaatgacattttcttttcccttcttatgtttgatgacatatggaaaagattcaataaattcaacccatttagcatgcctacggttaagttttgcttgacttcgaatgtgtttcaaagattcatgatcagagtgtataacaaattctttgggccataaataatgctgccatgtttccaatgttcgcactagagcaaacaattccttatcataagtagaataattcaaactaggcccactcaatttctcgctgaaatattctataggtttgccttcttgtaacaacacaccacccaatccaatcccactagcatcacattcaagctcaaaagttttgttgaaatcaggaagttggagtaaaggagcgtgtgttaacttatctttcaaagtgtcgaatgcattcctttgtgctgcagcccaagtgaatgtgacatttctcttggtaagctcatgtaatggggctgcaatggtgctaaaatccttcacaaagcggcggtagaacccagcaagtcctagaaagcttctcacttgggtgatcgttgttggaaccggccagctatgtatggcttcaaccttggcttgatctacttcaattccctgcggagtcacaacatagccaagaaaagagactcgatctgtgcaaaatgtgcacttctcaaggttaccaaataaacgttcatctcgtagagcatcaaaaacagcacgcaaatgaccatgatgatcctctattgatctgctatatatgagaatgtcatcaaaatataccaccacaaatctgccaatgaaagcacgtaaaacttcattcattaatcttatgaaagtactgggtgcattagtgagaccaaagggcatgactaaccactcatataggccgaatttagttttaaaagctgttttccattcatctcctaacttcatgcgaatctggtggtaaccactacgcaaatcaattttagagaacacaagtgaaccactcaattcatcaagcatatcatctagcctagggataggatgacgatatctgattgtgatgttgttaattgctctacaatccacacacatgcgccatgagccatctttcttaggaactaaaagcacggggatagaacaaggactaagagactcacgtacataccccttgtcgagtaactcttgcacttgacgctgaatctcctttgtttcctctgggttggtcctatatggcgcacggtttggcagagaggccccaggaatgaggtcaatttggtgctcaatccctcgaattggtggcagccccggtggaacctcctttgggaaaatatcagcatactccaaagcatagcaaacaacagtgtcagtgtcaacttcatccaaatctgattttgttgcaatgaaacaagatcccttcagcttaatctcatttttattattttgaacagagttggtgggtttcttcttatgcttctcaagttcattagccgcaataagatgctcactcctagtatgctccttgccgctgctattaagccattgaatatagtagggctgcggatgtggctgtgtgctcaatgcaagtttctccaccatttcagcactagccaaattattgcagcttcctctatctatgatcacgcggcaagagcgttccttgatcacacacttggtttgaaacaaggtgtggcgctgattctgttcagccctttccatttgtgcgcttagcactcgctgcaccacgaggctctcatagtgctctgcagcttcagccccaatgtgttcctcatcttggtggggcgcgtcacctttccctgcattgttagttgcaagcaaagcataggtttcttcatctaaatcactagcggaggagtacccaccatcagctctcacgatcattacacgagtgcttgggcagtccttgcgcacgtgaccatagcccttgcagcgtaggcactgaatatctcttgtccttcctgatgaagctactgatgatgagctcttggaaggtgtagcagcaacccctcttgttggttcactcgggcatggtgtagagtttgttgtagaggggcgcagcttgttgtttgaggacgatggtgctgctgctcgagttgacggtgcagcaacgttggaagatgtccaagagctagcacgacctgcagaaatgttagtcctaaagctagctcttcgtccctgtacttccctttcagctttacaagcaagatgaaataaacgattaattgaattatattctttgtaggctagaatgtcctgaatttctcggttcagcccacccatgaatctagccataccagcatcatcattttctaccaatccacaacgaagcattcctgtttgcaaagcttgataatactcctctacagatttgtttccctgtctaagttgttgcaatttgtgcagcaaatcacgtgcatgatatgaaggaacaaatctagctcgcatgactcttttcattgcatcccaggtttggggagtgttatttggattggaacgaacaaattcactccaccaaatggatgcaaaatcagtgaactcactagtagcagccctaacacgtttattctcaggaaaatcatggcaagcaaatttctgatcaatggctaactcccaagtaagatatgcatcagggtcatatttttcatcaaagcaaggaatggtaaacttgatcttgcctaaagaatcatcattatcacgtacctcctgccgtggtggagcgcccatgccatggcgctgccggcgctgttgtctttgtggacgaccaagtacctcctcatcatgctcagtgtcagcagcgtactccagttcttcccttgctgcgatgctgctattagcatcatggccattgtggttgcgcctagccgatccatcatgaccatcttggcccattctctccaacgtattcaagatacctgcaagagaagtattcacagccacaagggacctctccaatgaggaaagcttggagttggtgtcaatttgagcagcctccaattgaccaaggcgatcattggcgaccctaacatcctcatcaaggccttcagcatgctccctcacttggcgctcaaaatgttgtatgatgccccttgtacgtggtgaatgttgagggtgctcccccgatcctcctgtcat

SEQ ID NO: 7172 - DNA, 2192 bp, Oryza sativa
  Clone ID: PAT_MRT4530_13792C.1
atgacctcgccgggcgcctcctctttcgccgccgcgctcgtcgtcgaggacttcccgtgggtgaagagggaggaggagatggggatggacccggacaagtaccgcgaggtgttcgacctcgcgcagcgcggtgctcgcgccttccgcgacggccacttcgacgaggcagtttccttttactctaaagcacaaactttgagaccaggagatcccattatccttagcaaccgaagttctgctttctgtatgataagtcaagtgttgagggagagatcagcagctgactcagagtaccaaccattgaatggtcttgatcccacaacgcatgcggaggtagcgctcaaagatgcagagaaggtattagctatcggcagtaattctccaagaccatatcttctcaaggcatatgcgcttatcctgttaatgcttactgttggctgcttgttattgcctcctctaggtgctatgcatgacctgtacatgatattttctcccctcataagaaaactcatccttaagcagcacttcagaaaaccagaaaattgccccatctcgagtgccatcctcttctcaataagagtaaccattgaagttctaacagaagccatcacgcagcgccgccgtcgttgcatcgagctatctatggactggatgcggcggctggggatggggacgaatgatgaggacgaagtgatgggtgctagcctgctaggtttcactttcacctccctcaatgggctgcttagtattggtgacttgacttctcatgtctctctggctagtagttgtacttatgccaatgtccttcaggtgttggagcagtaccatgaggcacgggaggctattctttctgggcttcaagttgatcccctcagccatgtcctgcaaagctggctcagtgatctgcacagaaatacaagtattgcagctcgagcaagacgtccaacattagatagaccagatgattttgagtgcacattatgtttcaagctattgtttgaaccagtcaccactccatgtgggcactcattctgtcgctcttgtttacatcaatcaatggatcatggcaataaatgtcccatgtgtcggacagttctttttattggtccaaaaacatatcctataagtgtaacgctgagcaacataattcagaaaaattttccggaagaatatgctgagaggaagtcagaacatgagactatgacatatgcaggcgttgatttgatgcctctctttgttatggatgttgtactgccttgtcaaaagatggcactgaacatatttgaacctcgctacaggctcatggtaaggaggataatggaagggaatcatcgcatgggaatggttggtattgattctgctacgggtactgtagctgactgtggttgtgaggtggaaattctggagtgtgagccacttccggatggtcgtttttatctagaggtggaaggttcacggcggtttcgtatcttgcgatcatgggaccaagatgggtatagggttgctgaaattgagtggctccaagatatttcattaccagacggatcgcaggagagaaaagatctgatggaaagggctaatgcagcttcagaattggccaggacatatataaggcgagctagagaaatctcaaggcctgcgaggcgagcaagacagacagatcttgagagcatgcctggaccacaggatcctgaaaaatttagtttttggcttgtcaacttaataaatttgaggccgtcagacaggttggatctattgcgccttagtgatactcgagagagaatttctcgtagtcttagattgctgggtgatgcagaacaaatttgtcgtgtacagtaaaagatatatttgttgcacaagcataactattgtaacaagtgatttattcatcaagaggtacatactcctatgtacactgaatgatactgtagagtagagttgtcgtcatttttgatttattcaaaacaatgatttgtgcaaactcatttttgtaacttgaattgaatctgttgtattattcttgcaattgctgtgttcatgtggagcctggggacaggttgttagggatcattattgtatatatttttacattatttcatatatattcggtgcttgtacatatggcatcagttgcctagcgtatgtaattaactgatggctcttttgttttgtaaaaaaaaaaaaaaaaaaaa

SEQ ID NO: 7173 - DNA, 253 bp, Oryza sativa
  Clone ID: PAT_MRT4530_13793C.1
ggtcggctcgcccccgtgccaattcggcacgacttgggaattaagtgtcgtctgcatgagttggcaaataaaaggagaatttcagtaacaggggcatccaagttactggcacatatttcatactcttatcgtggaatggggttatctgttggtaccatgattgctggatgggacgaaacgggccctggtttatattatgttgatagtgaaggaggaagacttaaaggcactagattctctgtgggctcgtcac

SEQ ID NO: 7174 - DNA, 276 bp, Oryza sativa
  Clone ID: PAT_MRT4530_13794C.1
atggggaaccctaacgacgcacccctctcagctcgtcctttcggcgccgctcatgactcccttctttttttcttgaggggaggaagaaagacaaagaacaaccggtgtcgaaacaagctgagagcaagcagccgaaagaccatagcaaaaggtgcagcgtctgtcacaaaattcaaggacacaatgctagaacatgtcctagtagaagcaaaagacaaaaaaacaatcaaccgccaagcaatagatgattatgacgaagaaaaagaggaagaagaa

SEQ ID NO: 7175 - DNA, 564 bp, Oryza sativa
  Clone ID: PAT_MRT4530_13795C.1
gttgacaacatgatcggcttggttgagtgcgtcttccttgaggagggtatcgaggagagtgattgctgcaaccgcgttctgctggggggtgaacctaacccgagtcttcatagagatattccatctatatttggtactgtatatccgactaaattacaaccgtcatgtagatatggggtatccataatctccacacttatcaagaagataataataataataataataataataataataataataataataataataataataataataataataataataataataataataataataataataataataataataataataataataataataataataataataataataataataataataataataataataataataataataataataataataataataataataataataataataataataataataataataataatagaagtactattgatatcacctcggctagttatgtcatcaaattttccaacaataaagtcactttgaacttgttaaaaaaaaacttgaaataactatgagcccaacactagcttc

SEQ ID NO: 7176 - DNA, 108 bp, Oryza sativa
  Clone ID: PAT_MRT4530_13796C.1
atgcccatcaaaggcggtgtgaccaacccatcgtataggcgaaaacacctgtcgccggcggagacacctgtcggcggtggcgaagacaagccggcagtgaagacgtag

SEQ ID NO: 7177 - DNA, 417 bp, Oryza sativa
  Clone ID: PAT_MRT4530_13797C.1
atgccctgcaaagggcacgggtgccccggcacgaccaagggcactcgcattcggggcatgactcacaagccgccatggccaaggtcatgcccccacaactcccgagcagcaatagtcccacaaattttgagcggtgacgtgatgaacaggattggggaagagaacgagaacagtgcaagaggagagaagaggggtctaccgccacgaactcatcacctaatccatggtcggatatttcaaggtcttcgctcgatccgccatcaagtagtttccccatccgcgcgtattgctccttcgatttgcactggagatagagacaaagtcgctagtatttggtggttgggggaggagatggaggagaggagttggcggaaagggagggagagtcagccacagagaaggaactacaggaagaag

SEQ ID NO: 7178 - DNA, 1785 bp, Oryza sativa
  Clone ID: PAT_MRT4530_13798C.1
atggcgccggcagctcagatcgagcggaaggaaggcgaaaagggggagaagacagtaatggtggataatccggccttcgaggagtggtttgcagctgatcagcaggtgcttggcttcctcctctcctccctgtcacgtgatatactcaaccaagtggcaggagcaaggtctgcggcgctggcatggaaggcgatcggtgatatgttcggatcgcagacccgtgctcgcacattgaatgtgcggctggcgctccaaactacaagtaaaggtacaatgacaatctctgaatattttgggaagatgaaggcttatagtgatgagattgcatctaccgggaaacctctagatgaggaagatatgattgcatatattgtaaatggcctagatggcgattatgattcctttgtttctgctcttgggatgagggttgaacccatctccatgacagaattatatgcacaactacttaattttgagaacatgctgcacttgaggcaacaaggatcggcaaatgcagcacttcgtggcagtggaggccgcagcaactttgctccccgtggtggcagtaccagcgctgctggcgggagcaactcaggacgtggtcgcggtgatggtggtagccgtggccgcggcaacatgcgagcaaatcgagggcgaggtggcaaccagcagcagtgtgttgatacccgtcccgtgtgtcaggtatgctacaaaagaggccatgttgctgctgaatgctggcacaggtttgatgcaaattatgtgccggatgagaggcatgtggcggctgctgcgtatgcctacggtgttgataccaattggtatatacacactggggcaactgaccatctcacaagtgagttggacaagctgacgactaaggagaaatacaagggaacttccacactgcaaatggtgcagccaacattgacaatggttggggttgtggtggtgttcgcggtgatgaacaccctcatcaagatggccctgaacgaggggatgcacgccaccgtcctcatcacgcttcgtcagctcatcgccaccctcttcctcgccccgatcgcctacttccgggagagagcgtcccttacccagtggctcttcttcctggggctgcagtacaccaccgcaacattcgcctgcgccttcatcaacatgactcccatcttcaccttccttgtagctctgccttatgggctggagaaagttaacctgaacatagctggcatagctaaagtgggaggcacggtgttaggattcagcggagcaatggtccttgctctctaccagggcccatcgctcaccaagctatcatcttcatcttcttcatcatcatcttcttcctctccgatggcatcggcggcggtgatcgccgccggtcatgtcggcggcgcgcacagatgggcgatcgggtcggtggcgttgctgggtgggtcggcctgctggtcgctgtggttcatcctgcagtcgaggatcgccaggaagtacccggctctctactcggggacggccctgatgttcttcctcagcttcctccagatggccgtggtcgccttggccatcgacagggttagcttgcccccatggatcttaaggaccaagcttcagatcatcaccgtgctctttgtggggatagttgggtcaggaatagggttcttggcaatgtcatggtgtgtggagcagagagggccggtgttcacgactgcattcacgcctctaatccagatcattgcagctgctatcaacgtcatcgttctccgtgagcaacttcaccttggaacgtaa

SEQ ID NO: 7179 - DNA, 488 bp, Oryza sativa
  Clone ID: PAT_MRT4530_13799C.1
aacacagagtgcattacaacacaccacaacttgcagatatttctttcaacctgacaaagttcattacaaaacaccacaacacccatcttgctgcaaatacttcaccctacatttctccttaccaacaccagtgcaaacatgacaaaatacacaccccataccaccacctaacagataccatctttccttttttagcctactatttttatccttcaccacagcaattctttcagcatagtcacatgacagctttcttgctgcctccaactctctttgagcagcatcaacctctattatcttctcctcaaccttcatcctctcttcttggatagccaaacaagtctttccttctccctcctcgctgaccaaactgcatctcgcaaatcattcaacacttctctaataaaggtggtcgtcggcccatcataccaagcataaaaaccacatccaccttcctgggcattgcgacatttgaagtaccggcggct

SEQ ID NO: 7180 - DNA, 456 bp, Oryza sativa
  Clone ID: PAT_MRT4530_1379C.1
cgcgagattcggggtagcgcaaatgggcggcggcggcggcgggaggccgacggcgagcggggcgaacagcagcagcagcagcgatgatgacggggacgccgcctggaaggcggccttcgaatccatcgccgccgtgggtttcggcctgccgctgtccaacggcgcggcgaaggccacctctggcggcggcggcgaggccagccacggcgtggagcagcagccgccgcaggaggggaaggcgcaagcacctgggcttaagctttaccagatcaaggtaaggaacatgttggacaacatgttagagaaaaaccttgaaatagtcaaaactacctgttcgaacttggccgatcctatggaaacagatggagggataaaattatttaaaaaggctccacctggcatcagaatggatgcctgggattacttccatgtgcaactgaagagaccaagaattct

SEQ ID NO: 7181 - DNA, 174 bp, Oryza sativa
  Clone ID: PAT_MRT4530_137C.1
atgcggagagacaccgttgtttacgggctcttcatgccgctggaaatctggtccgaactgaaggcggaggtgatggcacgttcactagtagaggtggggacgacttcacaggtgtttgggtcgatgtcagtggaggcggtgaaggcgtcactagagaaggacaacgtgcaatga

SEQ ID NO: 7182 - DNA, 160 bp, Oryza sativa
  Clone ID: PAT_MRT4530_13800C.1
ggaacccatggtagctaccacctggatactcagaaataaaggatatcatgatatccatccagggccatcgatctctctgatttcggtcacgttgtatcccataagctatgaaatcacgatccccatcatatatatcttttctgaggaaaaaaaaaaaaaa

SEQ ID NO: 7183 - DNA, 445 bp, Oryza sativa
  Clone ID: PAT_MRT4530_13801C.1
gtcattgacaccaaagctgatgacgtcgacgctggtcttgtgtgaaaggttgtgcccggactacccgctgaagatgcacgtgagcgcgatcgtgctggtgctttggaaggccacaatgggggcgatggcgccgcacgaggggttgtgctttctgagagactagctggtgaaactataagcccaatgatgcttgtgggaacacaggaacaacaactgtataagtgatagaccttaaagctttatactagctcatcttgttgtcattaattggagctggagatcccatcagacggcatactctcaatatgacgaacacacaactttggggaaatatccactattgaagatccaatgggcttcatgcagaaaggatgttttatgactatgctgctcggtgatgataccttaggagcgtatacccggaggctgctgtgcactggaacaa

SEQ ID NO: 7184 - DNA, 958 bp, Oryza sativa
  Clone ID: PAT_MRT4530_13802C.1
gaagaatcaactcacatgtcacattctacatgcaaaatctgctgcttcagaataaggcaccccaaaattgggatgcccattctagttgtacagtacaatccaagaaccattgtttattgtttacaacatttctacatgagttttaacacataatcactattcctgcaaaataatgctaaacggatatgttacatgacctgtggccctctcaaggatacgtatacaatgaaattccagggcacaatgccatagctaattaagttggaaacaagttctagcatctagtaacattagaagcaaatcctattccactgctcttctatactaaacctgttgctattgcaaagaacattttctacatcacaactgtcaattccaaggtcaattaaatgagatatccacatccccatccgctgcccgtgaaatctgcatcctacgaagaataatcaaccgagaaagcaaagcctatgttgctttagctgtgcgttttttccagacactaagagtctcgttgtcagattcctccttgctgtttaaattatggtcatcaggttcctcctcttttggctcatcacctttgccagacactttctcagcttttgctttcttggctactactacttctttctcaatgcgtccatcagattttttatcattatcagaatctgagtgtgcgagagaacttgatgaatccgaatcaatattcgcatcaccggcagcatcaacagaacttttaccccctatctttctgcgtttgtttttcggcagtccttttggtttgcctttcctctttgggggtgagggcctcttttttgacttctcttgttcaggcggcggagtttgcttgctgctggtaatgcttttatcctgagctcgtccttggtttctccctgaatgatccttttttcgggcctttacaggcgggtcatcacttgcaacaatttcccggacgcgtggg

SEQ ID NO: 7185 - DNA, 231 bp, Oryza sativa
  unsure (1)..(231): unsure at all n locations
  Clone ID: PAT_MRT4530_13803C.1
ggacntgncagtnacgcttgggcgcacgttggacacnattcgaaaaggcaatgcatcgcactaaaatggcggtaatngcnatcctggcggccctnctnctnatggcagctttggagccgnctttnnccacnccgcccagcttcctgccggnaagaaacctgcagatncntcgcctcatggntgtcgtctccccagantcaaagctggcttccntcccagnaggcggttttt

SEQ ID NO: 7186 - DNA, 456 bp, Oryza sativa
  Clone ID: PAT_MRT4530_13804C.1
atggagggatatggcagtgttattttgcagatctggaccccgtttggttggactactccagctccactcaagctgaatctaggagctagagcaccgccaaacaagccctcgacctccgattccaacataatcaacccttgcttcttccaactcctacacaaccaccaccgccatcttagacacgtacggaatcaccgtggtaaagaggaattgaagacgaatctggcaagaatgggtatcccatctatatatcatacagccattttagagtttatttttaaaataattaaagaaaacttgggagaaaaaagagtcctctatgccatatgtatcaacatcaccaatgtaagattgtccataatgaacatcatcgatgcaaatgctttctgtcaatctgccaacgacaatagcggcaagggattaagaaaatggaaggcagcagaggacattcaatag

SEQ ID NO: 7187 - DNA, 279 bp, Oryza sativa
  Clone ID: PAT_MRT4530_13805C.1
atggccggcgccaaggatggtgtgcagcaccacgcgggggacgggcgcggcggcggcggcggcggtggcggcggcggcagaggcggaggcgaggggggacagtcgcggcagcggcgggggacgacgacggcagcgagtgagcaggaatcgcgttgtggaggaggagctatcccgttcggggacgggataccgtcccctagcattcccgatgatttaagcttacaagagtactactccgtggattctacagaaaaggggatacacatcgctcattgctga

SEQ ID NO: 7188 - DNA, 417 bp, Oryza sativa
  Clone ID: PAT_MRT4530_13806C.1
tttctcctgttttttgggtttttggttttcgttttattgttattaattttttttttttttccttggaaaaacccgctcccattcgggaaatcttaccaaagacccaaaacccagctttggaaatatccagccgggtggttgaaaagaacccccaacaagtttttcaacccccccaaaaaaaatttgccaaccgcttccaaccacttgtttaccttaaaagcaagcaccgcagcgtccaatgattactttcgggcacaaggttgtgcatgagagagtcccccccggggggctatacacacgctttccgagacctggttggggcacccttaattttttttccttgggtgcctcccccggctcggggttttttttcggggggttcgggacggcgaccttggatttgacggggttttcggg

SEQ ID NO: 7189 - DNA, 1250 bp, Oryza sativa
  Clone ID: PAT_MRT4530_13807C.1
tgatatccccggggggtgcaaagtcatttgagctagtagcaaggttttgctatggagtgaaaatagaactttcatctgaaaatgttgtttacctgcgctgtgcctctgagcatctccagatgactgaagaaatagctgaggacaacttgatttcacagtcagagattttccttaaccaagttatcattcgtaactggaaagattctctgaaagcactggaaacatgtgaagatctcctccctcatgctgaaaaccttcaaattgtgaagagatgcattgagtcattagcatcgaaggctactaccgatccaaacctctttggttggccaataagggaacatggcattatgcaaagccccggtggcagtgtactgtggaacgggatcagcacaggtgccaggcccagaaacttcagttcaaactggtggtatgaggatgcttcaccattgagtttccacatgtacaagaggttaatttctaccatggagtctcgtgggatccgacctgagatcattgctggatccttgacatactatgctaaaaagtatctcccgggactaaataggcgtcatagcatgggagcagtgcctctgactgctactctgtctgaggtggaacagaagaacttacttgaggagattgatagactattgcctgttcagaagggtttagcatctacaagagttttgcttgggctccttcgctccgccatgattctaaaagccagccccacttgcatttccaacttagagaagcgaattggcatgcaactggaccatgccactctggaggatctactgctgccaaatttctcatacacaatggaaactctgtataacgtcgagtgtgtgcagaggattcttgatcatttcttggcaatggaccaggctaatggtgccgcctccccatgtttggatgacgtcatggcatccccttctttggcaccaatcactactgtagccaagttaattgatggctatcttgcagagattgcaccagatatcaatttgaaacttccaaaattccaagctctggcatctgctgtgcctgagtatgcccgcccgttggatgatgggctctatcgtgccattgatatatatttgaaggcacattcctggctatcagaagctgaacgggagcagctctgccggctaatggactgccagaagctctccctggaagcatgcacccatgctgcacagaacgagaggctgccactgcgcgttgttgtacaagtcctcttctttgag

SEQ ID NO: 7190 - DNA, 275 bp, Oryza sativa
  Clone ID: PAT_MRT4530_13808C.1
gcaacggcgccctacatctgcccagattccacggaaggagaacccagacctgcccacgagcggatgcgtcggcgcgctctcccttccactccatccagcgggaaggaaggctcgtgcctcctcctctccatcgggcgaccgcgacgtcagcggcttcctgcggcaacagcggcggtggtggtgcagaaggcagcggcgccgtcctcctcctctccatccgacgatgatggtggagctggagaaggccagcactggtgggcgaggtgacggccagc

SEQ ID NO: 7191 - DNA, 221 bp, Oryza sativa
  Clone ID: PAT_MRT4530_13809C.1
atgccacagttcttgattggctccagcttccaggcgagcaatgctccttttcttatcaaggtagccaaccaggaggttgtactgatcgctagtgcaatagcactactgtatctctgggtggatccacagtctaacgtccggggtgatctgacaccgatgacatccagcgaaatgcgcggtgatgctcaaaattctaccagctgtgaccccggcataagatg

SEQ ID NO: 7192 - DNA, 2211 bp, Oryza sativa
  Clone ID: PAT_MRT4530_1380C.1
atggggatggtcaagttctcggctagcgcagctcatttgcaaatagccccttcgcgctacagtagagcactgggcaccacaaaaatccccaaatctctcggccgcctccgtcgtcaccttgcccgccgccgcctcatgtcatcctcgtcgccgcacatcgtcctcgtcgcgcaccacggctgtgtcgcctcgctcgtcaagttctccggcctcgccgtgtccctagacgtgcactccgccgcagcgatcgcgtccctcccggcgtcctccgtcgccgccgtcgcgctcccggaggtcaagctcgacgacaaccccaccggacgccgcccgatggcgagatcctccacctgctccacctctactacctggttcttgccaccgaaggacaggacaagcgacagcggcggcggcggcgtgggcagcaaggaggaggaggacgaggcgtgggacgagtggctggcgaagccgatccacgagcggatgccatggcagatgccgccggcgacggagctgcaggacgccgggctggaggccgtgaccaactgctacggcgagctgtacggcgacatgatggagtattgcggccggagctggaagcctggaaccggcaccgcgccatgctggtgcatgactgccatcccaccgttcaaccctactacctccctaagtggtgcgcgactggagggccatgtcctcggaacatccgttccgccagaagccgagcttgagcagaaggaaggagaaaaaggagagaagaccatcagagtcccaaacccggcgtatggcgaatggtttgccactgaccaacaggtcattggttttctgttcacctctctgaccagggagattctgtcgcaagtcgcagacgcaccgacggcagccgcggcatggaagacgatcgagaacgtgttctcgacacgatctcgcgcaggcgcgatcaacgtcagattggctctcaccaccactcagaagggccaatcgactgtcactgagtacgtcagcaagatgcgtgctctcggtgacgaaattgctgcaacagggaagccaatagatgatgaagaacttgttgcttacattattaatggtcttgattcagagtttgatccagtggtggaagccctcgtcgccaagaatgcatctgtcacagttgcagaggtctactcacagcttcttggctttgaaaacagggtgaagatccgaacggcgtgcgctgctatgagtggaaaccgtggcggtggaaatcagggacgtggtggcggcaacccccgtggccgcggcgctggacgcggcggcagtggccgaggtggcgggcgcggccgtggcaatggacgcggcggcgctgacaacagacccacctgccaagtctgtcacaagaaagggcatgtggcggcggactgctggcactgctacgacgagaactacgtccccgatgagaagctaggaggcgctgcgacgcatgcttacggtgttgacaccaattggtatgttgacaccggggcaaccgaccacatcaccgggcagctggacaagctgaccacacgggagaagtacaagggcaccgaccaaatccacacagctagtggtgaagatgacactgaggcagatgctagcgacagcaatgcagagattaacgcagaacaacctgatggaactcatcctggtgcatcaaccggggtacacacagcagaaacagaagtggcggaagaatcgtcgtctcgtactgatcagtggcgcgccgtgcaggcccccgagcaacctgcgaccgccaccgaaccagcagccgccacgtcgtcggctgtacagagctcccgcgcgagttctcgctccatcgcaagccaccaccagcccggaggtgacacgtcgccagggcctcgtcatgatgcggcaggatcgtctgcggctccggaggttattgctgaaatagagcaagtctctaaaggttggagtcttcgtcagttagatgttcaaaatgccttcttgcatggagttctagaagaagaggatttgaatcaggagtttgcactgaaggatttggaagatcttcacttcttcctaggaattgaggttaaaaaggacctaaccttgtatcttggagtgcacgaaaacaagctacagtctctagatcaagtattgaagctgaatacaaggcattggcaaatgcaacagcagaaattatgtggatacaaacattacttcaggaacttggtgtaa

SEQ ID NO: 7193 - DNA, 671 bp, Oryza sativa
  unsure (1)..(671): unsure at all n locations
  Clone ID: PAT_MRT4530_13810C.1
ccggccgggaaaaaaaagaaacagagagattctcatgtagccctagccgccgcacctcctgcgctctgccgccgccgctgctgttcctgtcttcgccggcgccgccgctggtgcagccgtcgccggtggccacagccgtcgtcgtccgcagccggtcgttggaaggagggagagaaggcagagaagaacaggaaggaaggaaagaaggggaaatttgatagaagaagggaaatttggggaatttggtgtggagggttccaacgttggaggagttgagtcggagtatcgaaggagttaaggtacctaatgacatcgatcggcatggggcgggagtagcacccttggactacacattattattgcacacaattgaaattagttttagactataatttttgctcagcataagttttgcatagaacttgtaaaggtcattaaggttctgatccttatttttcacgtgggatttgtggagctaggatggtttggattgtgtggtttatatcggtattgacctttcttataactgcctgtcgtgatgtccgtatttttaggggagactctgccgaaatttctaatattttaggacttagtttttgagtgtattttggtgtggcattctangtacgtggtatccgaggtgttacnatttatatagtttcacatatctt

SEQ ID NO: 7194 - DNA, 604 bp, Oryza sativa
  Clone ID: PAT_MRT4530_13811C.1
gcacgaggcacagccgtcgttgtccacagccggtcgtggaaggagggagagaaggcagagaagagcgtgaaggaaggaaagaaggggaaatttgatagaagaagggaaatttggggaatttggtgaatatttccaaattcttcgtttttcttatacattagtactgctgggtgtggagggttccaacgttggaggagttgagtcggagtatcgagggagttaaggtacctaatgacatcgatcggcatgggacgggagtagcacccttggactacacattattattgcacacaactgaaatttagttttagactgttttttgctcagcataagttttgcatagaacttgtaaaggttatttaaggttctgatccttatttttcacgtggggtttgtggagctaggatggtttggattgtgtggattatatcggtattgacctttcttataactgcctgtcgtaatgtccgtatttttaggggagatttagttttttagtgtatttaggtgtggcattctaggtacgtgattacctggggtgttacattaatagatttgtctcgcagtttacaggtggaatctgtaaattgttttgatattagtc

SEQ ID NO: 7195 - DNA, 1391 bp, Oryza sativa
  unsure (1)..(1391): unsure at all n locations
  Clone ID: PAT_MRT4530_13812C.1
tttttttttttttttttttccaggcagaacacctttcanaactacggaaataagacacatttccagaatttctgaaagaagcacgtatcaatccagggaattacggtctaccaaaaccgccagaattcagggtattcccttacagtaaattcatactccgccatgcttgacatttgcttgggcgacgcgagtttatctatatatcttgatcgctacctctgttcctctctgtcggaaagaaacggcacaaaccaacccaagtacagagacatggtcttaagcacccacagccacaggtcacacaaaatggcaccaggcctgggagcagcctggctgctagaggcgatgatccatgaaggcggcgaatcagtcaatctgaaccccatgcgtcgtcccgcaaagcttgtcgagcagcgattcgactcctcctcgcctcctcttgtttcttcagctcgtctgacccgaagtttgtaaactgccttagccccattccatgagcaatcagcctttgtgctgttcttgcagatgtcttcggccttggagttggtggttcaaggtctatgccatcattttttgtcaagagatcgtcatcctcttttagtggccgcactttatatcttggaggtatacaagcttgtgcctcattagcagctgatggagtccgaaaaactgcaagtgcaacagtatcattaacccagcgaatggcaactccatggtccccaaacttgtcgaaaatcttttccaaatctgctgcgagtgtgctaggtgggaagtcataaagaacaaggacatgccttgtcccatattgtttcgcagctgcattactcttgtgtttctgctcatccacacggccctttgatccactctgatcattagactcttgttcatccatatcattttctagaccacactgatcactgtatagaacactcttgtcgtaaagaaacgaaccccttcccctcctcttgggccctgaagatggagtgctaattttctcagaagaactactaggagaaacctttgcttgctgctcgagagaacgcgctagcgttagcgtctcatcgttttcaccacgatctgcaatcgcctcccaatcatcctcttcatcttctttgttcccatcttgtaaagtagcttcgacttgagaatcctttgaacccatggcaccacctaatcaacttcaggagccaaccggagcggaggcggaagcggcaggacggcggcacccacctcgcgggagggatggatggaaatcggcgcggcggggctagcgaggagacctccggagagtgaaggtcgagaagacgaccgagccgagtatgcggcggaggcagccggacgccggcgacgctgctcgccgtcgcaggtgatggggatcggcgaggccggat

SEQ ID NO: 7196 - DNA, 873 bp, Oryza sativa
  Clone ID: PAT_MRT4530_13813C.1
atgacgaagaacaaggcttcgactgttgcggagaaggtcccgaagaagccgcgccgagaggacacggcaaccgcggacggcggcccaaccgtcgaggacgaacccaccgtcgtcgctccaggttgtcccgagttcatcgggggccttgttgtctccttctgcaaaaggaacggctccgtcgtcctggcggctcatcatgccccttccaccgagcagcgggaagggtcccgcaaagccccttgccccgctggtccctctttcaaagctgatccccatcacacagtcgagaagaaactggaggtgtctgaggcggacctcgccaagatgaaggagctctacgccggctccaatgaccggtacaagggcctggaggcacgattggacgagctccacggccatatggacgagctgaagaaatccctccgggttagctacacagccctccaccaaactgccactagtctgggagaagtggaggctcctgctttcggggacgagacgtccatgacggcggccttggcggaactcgtgacagtgctggaaagcgttgtcccgaagtataccagccaaatgagggagactgcgaccaccggagtccgtattggcgcggcgcatatcctcgcctgcttcagggccaattacccggagctggacctcgagaacatccttcgccatggcgaggcgaactcgggccatctccaatttgcggaagaggtcgccccgatcgccgacagcatcctccccttctatcaggggtaatttttataacccagtggtcttaaaaggccttgtaatatttaaactctaagtactcgattcggtactctgtgagaatgtcttgtctttccgaaaaaaaaaaaaaaaaaagcggcc

SEQ ID NO: 7197 - DNA, 432 bp, Oryza sativa
  Clone ID: PAT_MRT4530_13814C.1
aaccgatgagtgatctgatttttttgggtggcaagtattgttgccagtaaaatatatggaagggccgaaagatttggaaatgcgctcagcgatcagtttcaataaatcatcaacataggaattactggtcacatctgggaaagaaaaaaaggaatctattaacggacggccaagattcctggcccactcaaaacagcgaaatgcacaagcctcgctcggcgtctgacaggctgtcacggacgtgtgctcacatcgggttttcagctgaatgtatggcccagccagataggaaagacagcgttataaaccaagccacgctgcagccatagctgagcacatgtaggtgccccattttgtcacactaaatgttacttactttgtttcatatattataatttgttttgatttttttaaaaaaaaaaaaaaaaaaaa

SEQ ID NO: 7198 - DNA, 652 bp, Oryza sativa
  unsure (1)..(652): unsure at all n locations
  Clone ID: PAT_MRT4530_13815C.1
gcaagcaaccgaaacaacttgaagctatcgctagcttagctgcagctcatgcaataagctaattagaagctagcacaaagtatacgtagtaacagcaattctctgatctcgatggagaacaacaagaacagccagctgcagcctcctccaggttacccgaggttggattcggagcagcaggcagggaagaagaagggacgctgctgtggatcatcttgccgccgttcaactaaacgtggggagacgagctttattgaaggatgcattgctgcgctctgttgctgctggctctgcgagctgtgctgcgactgaagaagggatatatatatatatatatatatatatatatatatatgttttcacatatttgctccagatcattgtgaaaatcgagggttgttaattatatacgcatggacgtctgtccttatacttgtttagatgagtttgttcccaatataatgttaatttggcgtaatatattatatatattgtacttctctcatgcagtacgtatatagagtatatagtacgtcttgaggcatctatatatactttcttcccttgttattattgataatatatatttatgtatcgactgtcgtacacaaaataagcattttntacattcatgtgaaaaaaaaaaaaaaaa

SEQ ID NO: 7199 - DNA, 996 bp, Oryza sativa
  Clone ID: PAT_MRT4530_13816C.1
tcacttcttaagagtgtcgatgaacctttccccttggccaagtacttctgctgtatggcccttgaaatactccgacttgccgatggcatgatatcgtggtgtctcgccgagttctggtagtggcttaaccaatccattgatgcaagcgtcctgaaacaccacgactgtaacccggcctctctcggcgtcaacggccaccctgtggaacacgcttttatagcggccattggtgagaacctcgagtatctcgccgacgttgactatgaaggcacccggcagcggccgcacagggtgccatcggccatccttgctgacttgcaggcccagcgtgtcattgacttggagcagcagagttagcccgaagccgtcggagtgcggcgagatgccgatcaccttctccgggtggcggcagggagggtagcggtgcaggccaaaggtctgccgcttcccacggaaggcggcaagcagcgtttcttgctcgactcctaggtcgctggccatgaaccttagcagtcgcgtcgtcagattccacatctccattgcgtacttgtcaattgaatccctaaatgtgggtggtttactaggccaaaattcgagatttctctgctggaatggctgcgtttcaacgatcaagttctccgcccagtccaatttgccagctgatgatctgaagtgatggccgaatccttctatgccgccaggacggacagccaccgtgttcttgtcctccaggggtaactcgaagaattgaaccgtgttatctttcattttctgtatcactgcttcatcaactccatggtttatgagctggaagaagccccagctccgacacgcagagccaagcaaagcgacctcggcctcccggtgctcggggtcgagcagcctcgccatgtccaccaccggcaagctcgaggctctcgccgtcgccgacgccggcggcggcggcgcggagatgtacctgtccgggatctgcaggtggggatccgcgaacgccat

SEQ ID NO: 7200 - DNA, 3262 bp, Oryza sativa
  Clone ID: PAT_MRT4530_13817C.1
tagcactatctctaatctcgccaagtccatattcgaggaggaagactaccctgtccggagaaggcgatgccaagaccaaaaagatcccccttgatccatctaatccatctaaaattgctgctaataaagatatttttgcgtggaaaccatctgatatgcctagtattcctagagaggtgattgagcactctttaaatgtcaaagacgatgctaaacctattaagcaacgactccgccgattcgctcaggataggaaggatgcaatcaaggaagaattaaccaagctgttagcggcaggcttcatcaaagaagtcttacatcccgaatggctggcaaacccagtcttagttcggaagaaaatagaacaatagtgcatgtgtgttgactatacagatctcaacaaatcatatcctacagattcttttgggttacctcgcattgaccaggtagttgactcaacaaccggctgcgagttactcagatttttggattgctactcgggataccgccagatcaggttgaaggaatccaactgctcgaagacctcattcatcacaccatttggagcttactgctacattaccatgccgttttgattgaagaatgctagagcaacttatcaacacataatccagagatgtttttcaactcagatgatgtagttgatgatgtagtcatcaagaccaagcagaaggatgacttaattgctgatttggaggaaacctttgctagcatccgtgctttcaggatgaagttgaaccctgaaaagtgtaccttcggagtaccgtcagggaagctgcttggctttatgatgtcccataggggcatacaagccaacccggagaaaatcaatgccatcctcaacatgaaaccgcctagttcctagaaagacgttcagaagctaactggatgcatggcggcgctcagtcggtttatttcaagacttgacgagcgagggatgcccttcttcaaactgctcaagaagactgacaatttacaatggggacccgaagctcagcaagccttcaatgatttcaaaagatttctctcaactccaccaatcctagcgtcaccacacccgcaagagccattgttgttttatgtgtcagcaacatcgcaagtggtaagcacggttttggttgtcaagcgagaagaggacggccatgttcaaaaagttcaacgaccaatttacttcgttagcgaggtcttggccgactccaaaataagatatccccaggtacataaattattatatggtgtcttaattaccgtcaggaaattatcccattattttcagagtcactcgatcacggtgctcacatcttttccacttggtgacatacttcataatcgagaggcaactggacgtattgcgaagtgggccttggagttgatgtctttggatttatctttcaagctgcgaacttcaatcaaatctcaagcactagcagattttgttgccgagtggaccgagtgtcaagaagacacacctgtggagaaattggagtattggactatgcattttgacgggtcaaagagactatcgggcaccggagcaggggtcgttttgatttttccgactggagaaaggttaagctacgtgctgtggatacacttttctgcatcccacaatgtggcagagtatgagacgttactccatgtgctgaagattgttgtatccctagggatctgacatctagtggttcgtggtgattcatagttggttgtcaatcaagtcatgaaagattggtcctgtctcgacgacaatatggttgcatatcgacaagaagtccgcaaattggaagataaatttgatggtcgagagttaactcatgtgcttagacacaacaatgaagcagccgatagattagctaattttgggtcaaaacgagaagcagctccttctgatatttttgtcgagcatctctatgagctgacagtatcaagaaaggataaagtcggagatggagaggctaatgaagtaggagtaattgatgccgactggagagagccaatcatcaaatttctaactcagcaagagttgcctcaagacaagaatgaagccgagcggatttctcgacacaacaagctttatgtcatgattgaggccgatttatacaaaaagagtccatctggaatcctacattgctatatttctctagaagaaggtaggcaattgttgtaagatattcattctgtcatttgtggaaatcatgcggcagcacgaacgatagtcggcaaagcatatcgacagggttttttctggcctacagcggtgtctgatgccgagaaggttgtgcgaacgtgtgaaagttgtcaattttttgctaggcaaattcatttgccggaccaagagttgcaaaccatccctctttcctggccatttgcggtttgggggcttgacatggttggtcctttcaaaagggctaccggaggatttaatcaactttttgtggctgttgataagttctccaaatggattgaagccaaaccagttgtaactattacagccaacaaagctcgagacttctttatcaacattgtgcatcggtttggggtgccgaatcgaatcattacagataatggtacccaattcactggtggagtttttaaagatttttgtgaagactttagtatcaagatatgttatgcttctgtagcgcatcctatgagcaatggtcaagttgaacacgccaatggtgtggtacttcaaggcatcaaggcacggttttttaaccgactgcgtccctatgctggcaaatgggttgagcagctgccgtcagtactttggtctttgcgcactacgcccagtcgggctacgggctagtcgccgtttttcttagtttacggagtagaagcaatgttgccaagcgaagtggagtttgagtccatgagatttcgcaatgttaaagaggaacgctacgaggaagaccgagtggatgatctcaaccaattggaagaagctcgtgaggcaacattaattcagtcggctcgatacttacaagggttgcggcgttatcataatcgcaatgttcgatcccgtgcctttttagtcggcgacctggttttgcggaaaattcaaactacacgagatcggcacaagttatctcctttatgggaggggccgtttatcatctctgaagttacccggccaggttcctatcgactcaagcgcgaagacggtactctcgtcgacaactcttggaatattgaacatcttcgccgtttctatgcttaagcttatcattgtatttccctattt

SEQ ID NO: 7201 - DNA, 1167 bp, Oryza sativa
  Clone ID: PAT_MRT4530_13818C.1
ctagccacctccccgccgtcgtcccctctctcccgtgccaccggccgtcttcagccgcccctgccgccgcgttagcacgccggccggccgtgccgtcgcctcctccagcgtcgcagccgcctcctcttcgccggcctgccctctgtttcccgcgaagacctccggaagtgcatccccgccggcaacagtggcgttgccgccactgttccgcctccagccgcctctgccgcgtcccctgtgcgccggccgacgtcgccaccacctctcccggcaccggaacgccatcctcttccccggccaagccacggcgtcgcccgtatttcgtcggatcgccgtcgcgcgcaccgcctctccctcggtctcgtcggcacccactccggcagccccttttgccgtgccagtgcgccggccgacgtcgccgtctccacctccggcatcgcagcggcaagcgtgttccgcaccgtcctcgtctctgtgcagctgctgccggctgccctcatcgcctcctcgccggttcctgtcgtcgtcctctcgtcgttcccggtcgtcgtggtccccgtcgtcgtcttcgtcctcgcctccgcgtcaccaagcgttgcgccggccgcgtctcgccttcgtccaaggatcgccgccgaagtcgtcccctcgcctttcatctccgtcattcctggccgtctccgccgcgcccgttcgtcgttgtcgttccctcgcctcgtcgcgtggtgtggcgttgccaccactgttccgcctccggccgcctctgccgcgtcccctgtgcgccggccgacgtcgccaccacctctcccggcaccggaacgccatcctcttccccggccaagccacggcgtcgcccgtatttcgtcggaacgccgttgcgcgcgccgcctctccctcggtctcgtcggcacccactccggcagcccctttcgccgtgccagtgcaccggccgacgtcgccgtctccacctccggcatcgcagcggcaagccccgtcgtcgtcttcgtccttgcctccgcgtcgccaagcgttgcgccggccgcgtctcgccttcgtccaaggatcgccgccgaagtcgtcccctcgcctttcgtctccgtcattcctggccgtctctgccgcgcccgttcgtcgttgtcgttccctcgcctcgtcgcgtggtggtaa

SEQ ID NO: 7202 - DNA, 1011 bp, Oryza sativa
  Clone ID: PAT_MRT4530_13819C.1
atgggcgaggtggcgtcgtggagggcgaggaggctcccgaaccctaaccctaaccccctccttctccttcaggttcgtggagggaagcgtgtgcagcatctagccgcgcccccgtcgcaccagctgcgctgctccggggtcctcgtcccctccccgccaccgatgcatcagagaaaaaactgcactgatgcaggcctgccgccttcagccacgccgccgccgtcgtcgtccataggctccagcattgccattgtcgtccttgtcgtcattaccacgaccatcatgatcgtctccattgttgtcattcgatgcagctaccgccgcgggttgatccacgggtcgtcgtcgacaccggtggtcgccgggcacacgacgctccacatcttcaccacattctccgccatcgccgggtcccagtcctcggggtggtcggtgagccaggccgttgactttgccgccgtgggggagcctctcggagccggcgcgcatggccatgttggaaataagagaggtaatgagaaccggacatccggcgtcccccaacttacaaaactggtcacaaaaggtccctcggcggttttgaccccgattttgtcccacgtggtggctgactcagcgtgggacccacgtgagccccacatgtcagtaagccatgtcatcacctctccgctcgccggcctccccgcgcttccgctgccccgcgtgtggctccagctcggctgccgcggttgcccgccgctcctcctcgtcggcgagcacggagaggaagctgacaccgccgccttgctcctctcaccgccgccaccgccgccttgctcccctgagccaacgccgacgcattcgtcccgtctcgactccgacgctggcctccccgtgcctccccgctgtcgtcaccatctgacggagctcaacatcggtgcggccttctccgttcggtctccaccatccggccactgcgtcttccccatcaagaacctcaaggacctcgtcatcttctactaccttgtctag

SEQ ID NO: 7203 - DNA, 768 bp, Oryza sativa
  unsure (1)..(768): unsure at all n locations
  Clone ID: PAT_MRT4530_1381C.1
ccggccgggctagcgccgcacactctaccgacgccgccgccaccaccgccaccgccgcagcagaagcagcgcagccgcaggagggaagatgccggcggggcacgggctgcgggcgcggacgcgcgacctcttcgcgcggccgttccgcaagaagggttacatcccgctcaccacctacctgaggacgtacaagatcggcgattacgtcgacgtcaaggtgaacggcgccgtgcacaagggcatgccgcacaagttctaccacggccgcaccggccgcgtctggaacgtcaccaagcgcgccatcggcgtcgagatcaacaagcaggtcggtaaccgcatcatcaggaagaggatccatgtccgtgtggagcatgtccagccatccaggtgcaccgaggagctccgcctgaggaaaatcaagaacgatcagctcaaggctgatgccaaggcccgtggtgaggttatcagcaccaagagacagcccgagggacccaaacctggtttcatggttgagggtgctacgctggagactgttacccccattccgtatgatgtggtcaatgatctcaagggtggttactagaatgcttgtttcttgaactggagaatccaattagcgtctatgcttatcggaatgttttggtactgattagccctttttgttgtctggaatctgaacctctatgtggttaacattaaagatttgctatggttgaattcatcctcgttatggtattgcctaattcgcgnnnnnnnnnnnnnnnnnnn

SEQ ID NO: 7204 - DNA, 1005 bp, Oryza sativa
  Clone ID: PAT_MRT4530_13820C.1
atggcggaccaggaggatcaggatgatggcggaaaaggggcaccagccagcattgaggaacaacaatatatggattttcctccctcttctctacattcttatgttccagaacaacctgaaataagtctggatgctgaatccatgaaaatgctgacctctcttccactctatggagaaccactatgcactaatgagagtatcattgcccacgttaagtctgttaagggaatacttgaatcactccttcggagaaatgactggctcaaggttgatgagtacctgacaaagattgtttctgaaaattatttgaactcatactctgccatttctggtgtaccaatgagtgaaattaatcaagcacaccccgagcttgctttactggcaaggcggcaacatgtttatgatctgcttgtggaagggaagtatgatgaggccagtgactattacaatgcgaatgtcgctattctggagaagtgtaggagcaaaagagtgcgcactgcatcatcagatctcaaagttcttatcagcaatcgaactgcagcagtgaataatgatgttgatactggcatggctatcaaggactacatctacctttactatcccattttcaggcctgatattcggaagagaaactttgggagaaaaccccacgaactgtgggagtttgcttggcgcaagagtacagtttcaggcttcagatgttttgcatgccataaggtctttaagcataagaaactcaccatgattgagtcacacttgaagggggatagaacagatgatatcactgcttgtccagctgtaacggagaatgtcctctcccgcctccagctcgccctggatactggagcagcaggcaggctctcccgtaagatagaaagaggaaggatgagccgcgacactcaaagtactggagatgagcatccctctccagatggagaagaagatggtagaggagacggatgcacagactctgctggcccttcaaatgctgtaccagcctgctag

SEQ ID NO: 7205 - DNA, 1441 bp, Oryza sativa
  Clone ID: PAT_MRT4530_13821C.1
cggacgcgtgggcggacgcgtgggcggacgcgtgggcgcgcgcgcgcaggttcagatagtttcaggcttgggaggaaggaaggagaggcagagagagaatttttgtctgagagaattcagatttcagagagataattttcgtctgaagaattgtgtatcgatcgatgtctggtggtgtgatcagcatggtggtcgcgccatggattctcgcttgcgggttcttgctctgctcatcctccttcctcggagctgaaggcgccattggtgtgaactacggcatgctggggaacaacctgccgtcgccggcgcaggtgatctccatgtacaaggccaagaacatcaactacgtccgcctcttccacccggacaccgccgtcctcgccgcgctccgcaactccggcatcggcgtcgtcctcggcacgtacaacgaggacctcgcccgcctcgcctccgacccctcgtttgccgcctcctgggtcagctcctacgtccagcccttcgccggcgccgtcagcttccgctacatcaacgccggcaacgaggtcatccccggcgaccccgccgccaacgtcctcccggccatgcgcaacctcgacgccgcgctcaaggccgccgggatcagcggcatcccggtcaccaccgccgtcgccacgtccgtgctcggcgtctcgtacccgccgtcgcagggcgcgttctcggaggcggcgtcgccgtacatggcgccgatcgtcgcctacctcgcgtccaggggcgcgccgctgctggtgaacgtgtacccctacttcgcgtacgccgcggacgcggagcgcgtgcagctcgggtacgcgctgctgtcggcgtcgcagtcggcgtcggtgaccgacggcggcgtgacatacaccaacatgttcgacgcgatcgtggacgcggcgcacgcggcggtggagaaggcgacgggcgggcaggcggtggagctggtggtgtcggagaccggctggccgtccggtggcggcggcgtgggcgccaccgtggagaacgcggcggcgtacaacaacaacctgatccgccacgtctccggcggcgccgggacgccgcggcggccggggaagccggtggagacgtacctgttcgccatgttcaacgagaaccagaagcccgagggcgtggagcagcatttcggcctcttccagcccgacatgaccgaagtctaccatgtcgacttcgcggcctccagctagattaggcccggcccatttcacatttctttctttcagctgctgctactattttattatttgtcggatacagtattttcgtagtttcggttcgatctcatgtcaccggtgctctgatttggattcattgttcatttgttgtcgatgcacattggagtatgatttattcaaacgcacgaattttacgaaaagataaaaaaaaaaaaaaaaaaaaaaaaaaaaaaaaa

SEQ ID NO: 7206 - DNA, 137 bp, Oryza sativa
  Clone ID: PAT_MRT4530_13822C.1
ttgtctgaagtggaggctgatccaaaacctgaggagccgataaagaagtcacaatccactcttcttaaggctttgctggaatctccaagggttgatgtcgctggagcattgaaaaaatggcttaatgatggcaatac

SEQ ID NO: 7207 - DNA, 1574 bp, Oryza sativa
  Clone ID: PAT_MRT4530_13823C.1
ttttttttttttttttcagacggcccaaatatatattttttcctgtcattgccacaaatggtaacattacaaagtcgttttcactattcatccgtatataatactctatcgcatgcgtgtacatcgaagtcagaagtaacaaaagaaaaggaaaaaacatgaaaatgatggtctattccaagtgttccacggcattgccgacaccgaattggggatcactcaatcctctgatggtacacattaaggacatagctgttcagaaggtcaccaaatgtcttggttgagaacttctgcacaacatggccccttgcttgtttacccatcttaactgctagatcgtgatcgttcacgagcttcagcatggcttttgaaaattcaggggcagagggctcacagagaaaccctgtctcgtcatttatgactgtttccactggaccaccactgttgcatgcaattacaggtttatatgcggccatggcttccagaggaacaataccgaaatgttcatcctttggagtgtataacacacaaaggcagttggagagaagttcgttcctttcagaagttgaacaagatgtcacaaatttgacatgttcagaaaccccttcactcgctgccaatcttttgagctcctcaaggtattcaacattttctctgagacgcttatcatatccacctgctactgttaaggttacttcctgtcgagcatcaccaggtagcatagaagcaacagagcgaagcagagaaaatgctgaaatggcaagaccaagattcttttttctctcaaaccggttaattgagaggaaattcaacttataagcatgaggttcctgaaactgttcaacagagacagctggatatagaacagcaggctcgactcctctagcatgaaggctgcaaaaggtcctggcaaatgttgttgcagtgaacttgctgtttactagaatcaaatctgccataccagtagttgtttcttcaatcatgtcaattggcttgcgatacaacctccgaagcatggtagtatgttgagcaagcaacatatcaggaaagtgacaataaaatactatcttggattttgccttcagtttaagcagtggaatcacaaccgaaacctggtctactaatatgatgtcaaatgagggccaccaaagtagcacacacattgcaacaaaaatgcagcgaagatatgcacagatagcgtggaagcggtaaaaaatatggcgaggcaagaaatctccatatactttaacttcaaatggaccagaaacagtctcttcaaagcatcggtttttgtcatgatgtgatgtgaaaacatgaacatcatgaccatggaccgcaagctgacaagccgcatcgactatcaatctctcagcaccaccttgagcaaaattgaggaacccaacaaatatcccagctacaagctcaggcagcaacggttcctcaaatctactgatgcttccaccgcgtggactcggaattgctatcccgagatcggggtggatcacggcgaccttaagctgcttcgtcctcgtccccgacggctcgccggcgactcctcccgccgccgctgccat

SEQ ID NO: 7208 - DNA, 706 bp, Oryza sativa
  Clone ID: PAT_MRT4530_13824C.1
attcatgtgctaggagttagaaacatgccatcctttctttggatacaagtgcatccaactaatgtgaccatggttactgaaagatatcgagatcaagccgtaaaaggtacggaatctagttcagtcacctacaacaatattgatttcgaacagccaccaaatatacatagaagcttcgtttttaacttgtgagtacatgatgcaaagctctcagagttctctttccaatgaatctagcatcatctccaaattccatcttagtcagttgaaatcacaaaaacaatatgctacatcacctatgatgagcctatagatcgccggtttgctcgttacggaaacccaacttattatttgtattaaatttctatttgtaatccagattgcttttatcttgttttgcttgtttctttgatttgcttgcagaaataaggttgatctgcaccggcaagattaaaaactcgcggagaggtatattgatcactaaagcgcaacacaataatgtctcgtacggttgtagtcatgtcgttaacgtttcttccaaattatagttatcatcaactcgcctaaatatcatgccaatcaaagccatgagcttatcgaaaggagctcagggttcatctcttggatgcagacattcataaatgttctcttatccatccgttgtgctaggaatctataataaaaatatgtttatagattttataaa

SEQ ID NO: 7209 - DNA, 275 bp, Oryza sativa
  Clone ID: PAT_MRT4530_13825C.1
aaagccacgcgcgcgcgccgagccgagctggccggccgggccgaggttggttactttccaaacactggttcttcctcctcctcgcgccgctgcctgtgctgctactgcttcaccggttctgatcgcttgcgcgcacaagagatcggaacgagcagggcctccggaactacaccttcgcctgagatctgtaccgggtaggcgggttttggggagtgcttctgcacgactgctcctcgtcctctgttcgttttcgattgttcgtctgcatcacccat

SEQ ID NO: 7210 - DNA, 4275 bp, Oryza sativa
  Clone ID: PAT_MRT4530_13826C.1
atggcggcggcggaaactgagttgggagatctgagtcagaaggtggtgaatctcacaagcaacctcaacaacatcctgggatcactcaccaagctggagacatggattccggcggttgatgtgggaattcaaggtttgaacaatgtggtggaggagatctcagcaagggtgacgaagctggagagcatgctagcgacggcgacgttcgcggcggctcaaacgcccgtaggacccgacaatgttgagtcatccattagtgcatgtgtttttgctcaagaaggtgattcattctggcatacaagtccaggcggatcttcctgaaaactgtgtttctgaagaagctgaggtggttccagaagaaatacttcgtcgtcaactcattcagagaggtaattctgcagttccttacgggttaattcgctggactggtttacctgcatcgctggctacatgggagaatctgcgtcaacttcggcttcgttttccaggagctccggcttggggacaagccgtttcttaagtaggggggattgttatgtaattagcttactgtagccagaggctttgcatagtgttgagacttggcctgaactttgtgtagtagtgcataataagtttgggaaagataaatatcaggagcacttagaggagttagagagtcttaggcaaaccagtggggttgatgcatattatagcaaatttgaggagttgatgcacagagtcttagtgtataatcaggcttttgatgagacatattttgttaccaaatttgtgggtggccttaaaactgaaatcaaagcagcaatcaagctgcataaacctagaactgttgatgcggctttgtctcttgctaaaacgcaggaagatttggcgttggagataaagaaaggaggtcagaagtccacttataaggaaggatttaaatcaacagctttcagggtaaactaccaaggcaaaggtatactgggacaagctcctgatgacaccaccaagacagaagaaaagccaaagtgggaggattgctttgagtctctcaaggctgccagaaaagcaaagggagaatgttttaagtgtggtgagaaatggggaccaggtcacaaatgtccaaaatatgtccaacttcatgtccttgaggaattattggaagtgtttcaacttcgtgaggatgacgaggtgtgtcagaatgaagaggctgagagtagtgaagaggaacttgttgtctcagaatgtgttgtgtctggaactatgggaaagaagaccatcaggttgcaaggattgatacagaatcatgaagttctgattctcattgattcaggaagctccaacagtttcatttctcaacagttggtggaaaagttggggttggctgttacagatattcctttatctcaggtgataattgcggatggtggggttatgcagtgtgataagttggctataggggtggagtggtggtgtcaaggacacagtttcacaaatgaccttaaggttctgaaactgggtggttatgatatcattttgggaatggactggttggagcatcatagtccaatgtggatacattggcagaggaaaaagcttaggtttacataccagggaaagagaattaatctagttggggtgaaggaaaatttgtctgattgtaaatctgtcacttccaagcagttgaaaggaatgcttaagactggagcagtttcccaagtggttcagttatgctcaattgctgaagaaagtttggagactgaactacccccaactattagtgcagtcttgaaggaatttcaagaacagttcaaggcaccttcaggactaccacctcacaggagttttgaccatagcatacctttactgtcaggatctaaaccagtcaatgttaaaccctacagatatgctcccaagcaaaaggatgagatagagaggcaggttaaggaaatgttgctccagggcatcattaaacccagctcaagcccatttgcttctcctgtgttgctggtgaaaaagaaggatgggacttggagattttgtgtggattacagaggtttgaacgatattacagtgaagaataaatatccaatgctagtggtagatgagttgcttgatgaattatcaggggctcaatggttcacaaagttagacctcagatcgggttaccaccaaattcggttggtccagcaggatgaacataaaaccacctttaagactcatcaagaattgtatgaattcagagtaatgcctttcggattgactaatgcaccagcttctttccaaggactcatgaacacaatctttgacaaaatgatcagaaggaatgtgctggtatttgtggatgacatactagtttacagtaaaactctcgaggaacatgtgcaacatttgagggaagtctttgcagttctgcagcaacacaaattgtttgtcaaggcaagcaaatgttcatttgctaaacaacagttggaatacttgggacacataattggagctcaaggtgtggccacagatccttccgaggtacatgctgttcaagattggctagttccaaggaatctcaaacagctaaggggttttttgggactgacaagctattacaggaagttcataaaaaattatggaattatgaccagacccttaactgcattgctcaagaaaggggtgcctttcaagtgggctgaattgcaacaacaggcatttagtcaagttaagtgggctatggttcaagcacctgtgttggctttaccagatttttcccaggaatttattgtggaaactgatgcttgtgataaaggaattggggctgtgctacttcagaatgggcacccaattgcttatttgagtaaagctttaggggttaaagctcaagcattgttcacttatgagaaagagtgtcttgcaatattgatggcagttaacaaatggagagcttatttacagaacaatgaatttgttatacagactaaccacaagagtcttacacatttgggggaacagaaattgactactagcatgcaacacaaagcattcatcaagttgatgggtttgcaatataagatcagatataaacaaggggcagaaaacagggtggctgatgccttatctaggagggatgcagatgaggagttgtcggcaatctctgttggaagacctaaatggttggaatctgtggttgattggtatgatcaagatgaggaggcaaaacagttgctggctcaactgataatcaatctagtaggggtagaacatttcaccttgactaatggagtaatcagtgggctaggaggacattctagaataacagccacctataatagaattaaaaatctattctattggccgggaatgaaaaaagatgtttaccagtatgtgtcatcctgtgacatctgtcagcaagccaaacctgaacattgtaagagtcctggtaaactacagcctttaccaattccagagcaagcttggtcaaccattagcatggattttattgaaggtttacccaagtcagaaggctttgatacaattcttgtagtggttgacaagttctcaaaatttgctaagtttatacctctcatcctttcacagcactacaagttgccacagcttttatcaagaatgtttatgatacatttgggatgccacagtgctctgaagaaatctccctatgaagtgctctttgcaaggaagccaactccttttggtcttattgatgttggaaaaagtacagtccctgatgtgcaaatttggttgcaaaacagagctcatatgaatgaggttctacatcaacaactgactagagcacaacagaggatgaaacatcaggctgacaagcatcgttctgagagggtttttgcagttggtgacatggtttatttgaaacttcaaccatatgtgcaaatgatagtagcacgaaggagttgtcaaaaactgtgtttcatgtactttggcccctacaagattctggaacgtatcggtgaagtagcttatcggctggatcttctccagagtagccaaattcatccattagtgcatgtgtttttgctcaagaaggtgattcattctggcatacaagtccaggcggatcttcctgaaaactgtgtttctgaagaagctgaggtggttccagaagaaatacttagtcgtcaactcattaagagaggtaattctgcagttccttacgggttaattcgctggactggtttacctgcatcgctggctacatgggagaatctgcgtcaacttcagcttcgttttccaggagctccggcttggggacaagccgtttcttaa

SEQ ID NO: 7211 - DNA, 518 bp, Oryza sativa
  Clone ID: PAT_MRT4530_13827C.1
gaggagttgtcggcaatctctgttggaagacctaaatggttggaatctgtggttgattggtatgatcaagatgaggaggcaaaacagttgctggctcaactgataatcaatctagtaggggtagaacatttcaccttgactaatggagtaatcaggttctagggaaaaatctggctgggtaagtttgttgaagcacaacatgcagtacttcttgctatgcatgccagtgggctaggaggacattctagaataacagccacctataatagaattaaaaatctattctattggccgggaatgaaaaaagatgtttaccagtatgtgtcatcctgtgacatctgtcagcaagccaaacctgaacattgtaagagtcctggtaaactacagcctttaccaattccagagcaagcttggtcaaccattagcatggattttattgaaggtttacccaagtcagaaggctttgatacaattcttgtagtggttgacaagttctcaaaatttgctaagtttatacc

SEQ ID NO: 7212 - DNA, 1063 bp, Oryza sativa
  Clone ID: PAT_MRT4530_13828C.1
ggtccgccaaatcctcctgctcacctcaccttatcctcagctctcagcacctcttcctccctcccccaagcttccctctaatggcgtccgccaacgccatctccaccgcctccctcctccgctctttctcctcccaggggagggtgaggagggccaagaatgggcgggcgcagcggctagtggtgcgggcggacgccaaggacatcgccttcgaccagaaatcccgggcggcgctccaggccggcgtcgagaagctcgccaacgccgttggcgtcaccctcggcccacgagggagaaacgtagtgcttgatgagtacggcagtcccaaagtggtaaatgatggagtcaccattgcccgggctattgagctatatgatccgatggaaaatgctggtgcagcattgatccgtgaggttgctagcaagaccaatgattctgctggtgatgggactacaaccgcctctgtccttgctcgtgaaatcatcaagctgggccttttgagtgtaacttctggtgcaaaccctgtatcacttaagaaaggaatagacaaaacagtgcatggtcttattgaagagctggagaagaagcctagaccagtcaagggcagaggcgatatcaaagctggtggatctatctctgctggagacgatgaacttattgaatctatgatgtcagatgctattgacaagccgggtgctgcgaagaggatgacgacgatgccgagagactcttccagtgccacaagatgggagcagcaagacgctaagggcggcgggcgtcctaaggagcctatccatcatcatcatcatcgtctactagaattattcagtttcacttcacatcgtgatgttttactttttctctcgtcctataacggatagcgctccttgttggcgccactggtgggtgttgtggtgcagccaatgtcttgtctccaccgtcaatgatccgcttgtacctagattactctttccattgtcatcggctaacattgtgataatatcagtttgcgtatgttagattaaattgtttctaatacaaaaaaaaaaaaaaaaaagcggcc

SEQ ID NO: 7213 - DNA, 492 bp, Oryza sativa
  Clone ID: PAT_MRT4530_13829C.1
actcgttcttcctctagttggtaggtacctggttgttcgaccatgtgtatggagaggtcgctcatcagcatggtgcggatcgggcacgtcggactgcgtaagtgtgccacgacgggacatgcgccctacaagcttggaggtctagacaagcgatggattgacagggtccagatggcaccccttgagatgaacaagcggcgcttcaagctcgcgcggcggctggagaagccaaaggacgcgcgcgagagaggtctcaccatggatattgccctgtggaagttcgagaccaccaaggggcagtgcgcggagataggtggccctggtcacggtgtgtgtacaaagcacatgagcacgggtgcctcacaagttgactgagcagtgcacactgatgggtaagggactggcgggctacaggttgatgtacagaagggacacgccgatctgcaaggaggagtgcatgaggtagcatatcgagatggacaggaacaggca

SEQ ID NO: 7214 - DNA, 1304 bp, Oryza sativa
  unsure (1)..(1304): unsure at all n locations
  Clone ID: PAT_MRT4530_1382C.1
cgggctagtggatccccgggctgcaggttttttttttttttttttttttttttttaaacttctgcataacttctttttcttttttccgaaaggaacttctgcttaatttctgtatgctacatatgggatttagcagtgcaagactaaagtacatgtactccgtgatggttcttgcgtggttacaaacttacagggcttttacaagcaaaaactctgctggctgtttttgaattttgtacataatctacatgatgcctccaatccacaacttaatacatgcaatttcagtgtgtttcttcttgttagtcagcttcatcgacggcaaaatctggttctggaggctttggcaatctcacaattgtcgggctggccctgcttctgagcctgtgaactcctcggagtgcattagctgcaaagcgagatgcgtagatggttgctgcgaggctagggtggtggctgctgctgctttgccggtttgcagcctcttcttccttgcgatgctgctcggccatcttcctcttgtaatagcggcgccatgccgcttgaatgaaacaggccgcccatgtcctccagtgctgggaatagaaccggaacgtgtgctgaacttgcctactgtggagcctcctgaactgactggccacaaatttcagctcctcagcacacaacgcaaatgcctcaacctcagtaagagctttcactgtcctagttgaagctgggaagttagcagcagatttaggatccaatgcccatgtgagcagctcatcaccgcagaaagcgccctcctttaactggaccttgttaaagaatccacttcggcccccatcggtggtctcactctccaagcagccatggaggatgaaatgcatctcatccacaggatcgccttctctcaaaatgtattcattttcagtgtatagtgtaggccttaacctctcacatattgcatccagcaatctttcgtccatattctcaaacaaaggtacccttttcactaaacccgaacagagatggcgcttaatgtccctccgaaggtcttttggaagggtttgaaccaaattttcttcatctactcctctggtctccaaccacctatagcgttcatatctccttactcgctctcttatttgaggaggcagtgaacgatgatgcatccactgctcagcatcacgtttcttaactctcatctcttcaagccgtatagcaactgattgaaggtaggtctgcatgttgccgatgaggagagcaaaaagaattagcccaataacacatatgcgatagagaataacaccctnccaggatatatg

SEQ ID NO: 7215 - DNA, 269 bp, Oryza sativa
  unsure (1)..(269): unsure at all n locations
  Clone ID: PAT_MRT4530_13830C.1
tctcacgncganagnaactggcgctanagttgccgcctcgttgtcgtggtggcggcgcgcntntgcctccttcccctccctctctatccctcgncgcacctccttctcctccctcaccgcgacgncgacgggaagccgcggcgaggaggcgtccccggcggcggcggctggcgcggtggcggaggctcgaccgggggacgtctccaccgcggcgacctcgcgagggagacctcgagcagccgncgttgccgcgaggaggagcgagtggg

SEQ ID NO: 7216 - DNA, 773 bp, Oryza sativa
  Clone ID: PAT_MRT4530_13831C.1
tcagcgcgatggtggcagtggaggaggacgcgcgcacgggctgccgttccgggcgctggcgggcgcggcgaggagggtgcgcagcgcgcacttgccggcggtcatccgcgcgctcgtcagctgcgggtggttctgcatcgagtcctggatcggtggccgcgcaacatggtggcgccggcaaacgcgctcgtcagcatgagcccgcggaagttcacgttcgccaagggggcgctggtcactgcgttgcttggcatcgccttccagccatggcggctgctcagctcctgcgagagcttcgtctacacatggccgttcgagctctcctccgccgcccgtggccgctgcgctccccggcgacctacaactccgacgaccgcgagggcgaggtcgtgcacctgcatcgtcgaggacggcggcggcggcagctcccgagaccgagctcgcccggcgcatcgtcgagcacggcggtgtcgccataaagtcgccgtcctcatcatcatcgcggatctccaggggaaggaactctcgtcaccgtcgtcatcgtcgtcgtctccggcgaattcgaaggtggcttacggccagcgttggccgtcggcccgcgacttccactccccgacgctctcctgccgcggtggagcatgaggaaggctgccgaagctcccggtggatgccgatgccgcctcgcggtcccgcacctctgcgacctcctccgctccctcctccactcccccacgggcgtcgccgtcttcctctccgacctcctcagcccgtga

SEQ ID NO: 7217 - DNA, 488 bp, Oryza sativa
  Clone ID: PAT_MRT4530_13832C.1
aaacacaaaacatcaatcaatcaaagggaacaaattagggaacccagaacaaaaggaaaaacgaaaaaggccctttttttccacgttaaaaaacccacccaacaaacgcgggggggggcgggaaaataaacaaatttaaaccctggcaaaaaaataaaccccaaaattagtaaaggaatttctgaaaaaaaaggaaaaaccaaccccaggccccccccaaatccggggacatcctgaacgaaggacgggacatctcaaattctcatcgattcagcccttcaggagcccaaaaacaggcgggccaggggcatgcagttttgggccatcggggtgagccctacgtcaatcttctccaagggggttgttgaccccggactgtttgaagggcccaacccccaactaaaagccctgcacagggagctgaaaaatgatcttccccgaacccttgtttttgaaggcttaccccccgctccggggggccaaagggg

SEQ ID NO: 7218 - DNA, 2110 bp, Oryza sativa
  Clone ID: PAT_MRT4530_13833C.1
cacttgtggacccccgggctgcgggatgcgggacgacgcccctcgcgtctccttctcatccaacctcaatctcaccaacccgacctacagtagcagaatccattataattccgcagtaatccgcacggctccaactctcgatcgcgagctgttgttgttttggtggaagaatcggtccgtgcgtgatttgatccatggcggtgtcgtcgtcgtcgctgctgctccgccgcggagccaccggcggcgccgggagacggtggggtccgggggaggcgttgcggaggctggtgtcgtcgtcggaggcggcgccggcggagaaggttccggcgcggtcgccgccggtgatgccgccgttcgagcaccggcccaggccgtacgccgggtggagcggcgatgagatcctcgcgaagaggaagcagtttcttggatcgtctgtgttctactactaccagaagccgctgaacattgtggaagggaagatgcagtatctgtacgatgagaatgggaagagatacctcgattgcttcggaggcatcgtgacagtttcatgcggccattgccatccggatatcgtgaacgctgtggtggagcagaccaagctgctccagcacacgaccaccatatatttgaatcaacccatcgtcgagtttgcagaagcgctcgcgtccaagatgccaggaaatctcaaggtggtgtattttgtgaattctgggactgaagcgaatgaactggcgatgctgatggctcggctgtacagtgggaatctcaatatgattgcattgagaaatgcttatcatggtggtagtgctggaacaataggattgacgggtttgcagacgtggaagtacccaatccctcagggcgaaatacatcatgtcatgaaccctgatccttaccgtggaactttcggttctgatgctgtagcttatgccaaggaagtcgaagaacaaataaattatggtacctccggaagggttgcgggtttcattgctgaaactttccaaggcgtgggaggtgcagttgaactagctcctggatatttaaagttagcttatgacactgtccggaaggctggtggtgtttgtatagctgatgaagtccagagtggatttggtcgaactggaagtcactattggggatttcagacgcaagatgttattcctgacattgtaacaatggcaaagggaattggaaatggtctaccattgggggcagttgtaacaacacccgagattgcaaatgtgctggcgcaaaaaatccaatttaacacatttggtggaaaccctgtttgctccgttggtggacttgctgtgctcaaggttcttgacaaggagaaacgccaggcacattgtgctgatgttggatctcatttggtgaatcgtctaaaagagctccagcaaaagcatgaaatcattggagatgttagagggaggggattgatgcttggggtggagcttgttaccgataggaaggagaagacacctgccaaggccgagaccaatttattgtttgagaaactcaaggatctcaacattttagttggaaaaggtggtctgcatggtaatgtcttcaggataaaaccaccaatgtgctttacaagggatgatgcagattacctggtggatgccatggactatgcaatgtcagggctctgagagctgcaccctgaataccaaagccgtctgccatcctcaacgcaagaagattcatgtcatgatgctaccggtagcccagccaactctttccatgtacatgcttccagttccagttgatgtgttgtgtaacggtggcagaaccatgtaggtgtggaaatcccaagaataagatggaaggaaaggaccatgtaggtgtggctttcccattgtaaaagtggcagttctgcaacagtgagaaggccatgggtgattgtaagcagtgttggccttaggggcaacatgtgtatccaaaagaaaaactaataaatgtatgcttgttgtgcaccaagatatatgcttgctgtgcaccaagatatggttttgcagactgcagaagaatgtgtcttaaacatttctgaaaacgatgaacatttcataatattcttacctcgctggagttctcccaacccgagtcc

SEQ ID NO: 7219 - DNA, 451 bp, Oryza sativa
  unsure (1)..(451): unsure at all n locations
  Clone ID: PAT_MRT4530_13834C.1
ccttgggttgcagggattccgcnngaggtngccntgaatncgtcctcngatntaaganggatttaanacgactgctgggtatacagcccagaaggatgtttgcaaaagcgttttgatggactatggaattcccatgccacctactaaggtcatgggcctgtgcccaggccacacttgatgaattgaaacccactgnaaagtgaaaagcaaggccgaaactaaaacaggttcctgtgaatgctctantctcaatccgggaaanaaaattgcanaaaatcnaaaagttggcaaagcaaatgtnaaacaacaatgtccnccaaaagttgctcctcacccgcccgggggttctgataaaccaactcctgggactannccgttctccngggnattacgctgcgtcccctgcancgtgggcttcggggcgccaatttctgggccaacaaacnttttc

SEQ ID NO: 7220 - DNA, 715 bp, Oryza sativa
  Clone ID: PAT_MRT4530_13835C.1
tatcacttttcgatgtagaataggccctaccatggtgtgacggtgacggagaattaggttcattccggagaggagctgagaaacgctaccacatccaaggaagcacaggcgccaaattacccaatcctgacacggggaggtagtgacaataaataacataccgggcgctttagtgtctggtaattggaatgagtacaatctaaatcccttaacgaggatccattggagggcaatctggtgccacaccccggtaatttccagctccaaataggcgttaatattttaaagttttttccaagtttaaaaagccttccgttaagtttgggaaccttgggcccggcccgcccggtccccccttccaccgggccgagccacccgaccctggcttcggaaccccttctgcccgccgaatggccggcttcccttggccctttaaccttggcccggttcgtgcccttcccggcgcccggttaccttggaagaaattagaaggtggctccaaaccaacccattccttcttggaataccattaccattgggaataacaatccataagaattccgtccctatttgcccttcggattcggagtaatggataataggaccatcggggccattcgtatttcatatccagagtgaaattctgggatttatgaaagccgaccaactgcgaaaccatttcccaagaattttccattaatcaaaaaaaaaaaaa

SEQ ID NO: 7221 - DNA, 347 bp, Oryza sativa
  unsure (1)..(347): unsure at all n locations
  Clone ID: PAT_MRT4530_13836C.1
ccggccgggaccaccacctcttctccattccactcgattttctctctctctctgggatggaggcaccggaatctgccgcaggggacatgtctcagagggataagcaagatgaggggctctggaagaggcgccgcctagcagtcaccgcaaggtgctgcctgcgagatctagcccaggcgatcaccacaccagcagatgccgactggctggaagangatgccagcacaatgatcgcagtctctcacacctgatctacgtaggtagacccccagatgtcctcaagatcttcctccataactgactactgcgacgccttgccctacatcgtgtactgcctgctttagacc

SEQ ID NO: 7222 - DNA, 160 bp, Oryza sativa
  Clone ID: PAT_MRT4530_13837C.1
ctaaagttgcaacttgtctgggttctatgctcagagctagtgtctggtgctctctgcacctgctctgtctcagacctggcatttattctgcttcttttattcttctgctaagcgctggagatctccttcagcttatcgtcgcctagtgagacgctctctc

SEQ ID NO: 7223 - DNA, 936 bp, Oryza sativa
  Clone ID: PAT_MRT4530_13838C.1
atgaaggttgcaccatttcttaagaagaatgatacttttgtagcagcactaaagaaggaactgtctgaacacattgctgatgtgcatgttcaaaacgattttctcgatggcatgttcactttctgtggtgctacaatggcacctgcacctctaaatttaggtctgaccctattccgtgaaaacagtataacagtgttaacttttagcaaaaatgccatttatgccctttatggagtgtacggtggaatcaaaataccctctgcactggcctcgacgaggtatcagccgcgcctccaagatgagatggagagctcccataaatgtgtaaatgatgggatacacgattgtgccacaggcaaaggaaagagattgagaggttttgagaaggggcccagttcatcgagattgtggcaatggtggtactccaagccaaaaaaagaaaaaaaatattggaggcctcagcatcttggaactcctcagctaagaaagaacttaattgaaatcacatccatccagatccagcgagggctgactggacctggaagaagagtacggagatccggaaggacacagacctacgacaagatgaccaactcctgggctggaattctggatgtgatctcaagcactttgcctcttctcttcggactgcctgctgctgaagcgtgcgtgtttgagagcaatacgtcgaccatatctgaggttaaaaatggtgtcttgcgagagtttttcacttgtcctataaacgctgggacgctgggaagggacccgatgtcaaatttattaagaaagagggtgagtgtgtccggccgaaatcgaacgctggtcgcggagatagggacctacgcggagagcacaaccggctgcaccatgcatctttctttccttgaagggtatccgctatgtgactacgaccgtgatgttcctatgctctag

SEQ ID NO: 7224 - DNA, 1137 bp, Oryza sativa
  Clone ID: PAT_MRT4530_13839C.1
atggcggagcggtcttcttcttcgtcggagtcgactggtaatgatgagaaaaaaagttcaaaaccacaaggatcatccaatgatcatcaagggtttctgccaggaggctctcctgcaaatacttttgattttgcttctttgcacagcttgctcaatttattttacatgatcctgccagctgcatacttgcgctttagattttatgaaccttcggatccatctgtaaaggagatagcagatcagattgcaaaggaccctgcgttcacccagatggcggagcaggcactggaaggcgaaggagaacagggcatgcctgcaatagacccttacattgaaacaatgcaaaagttcatggaaagcccccatttttttacaatggcagagcgtcttggggatgctcttgtgaaggatcctgcaatgtccagtctgctggaaaacttgactagtccaatgcataatgcaaagatagaagagcgtgtttctcgtatgaaggaagatccagccgtgaaatcaattatggatgagttagagactggtgatcctgctgcactgataaagtactggaatgacccagaaacatttcgaaagatcagccaggcaatggggcctttaggcggccctgattttgctgaaccttctggaactgaaggaactgaggaagaaggtgaatatgaagatgaatccattgtccatcacactgccagtgttggtgatgatgagggtctgaagaaggctttagatggtggagcagacaaagacgaagaagattcagagggcagaagggccttacactttgcatgtgggtatggggaggttagcaatgataaaaacatctcgttgcgaatcctgtgcaaaacggattgcatgtatgccttactagtcttcagaaaattgcatttgaagtgtgcccaagtacttcttgaggcgggtgctgcagtggatgctttggacaagaacaagaacactccgctgcattacgccgctggctatggtatgaaggggtgcgtggatcttctgctgaagaacggagccgctgtcaccctcgaaaacatggatggcaagacggccattgacgttgcgaagctcaacaaccaggacgaggttctcaggttgctggaaaaggatgccttcctgtag

SEQ ID NO: 7225 - DNA, 3645 bp, Oryza sativa
  Clone ID: PAT_MRT4530_1383C.1
atggcgagttcctcctcctccaccgcttttgcaaatcctttgttcggcgtccaagtttctgagaaactcaccaagcaaaatcactccctctggtcggcacaagttctcacagccctaaggggcgcgcgactggagggccatgtcctcggaacatccgttccaccagaagccgagcttgagcagaaggaaggagaaaaaggagagaagaccgtcagagtcccaaacccggcgtatggcgaatggtttgccacggaccaacaggtccttggttttctgttctcctctctgaccagggagattcggtcgcaagtcgcaggcgcaccgacggcagccgcggcatggaagacgatcgagaacacgttctcgacacgatctcacgcaggcgcgatcaacgttagattggctctcaccaccactcagaagggccaatcgactgtcaccgagtacgtcagcaagatgcgtgctctcggtgacgaaattgctgcaacaggaaagccaatagatgatgaagaacttgttgcttacattattaatggtcttgattcagagtttgatccagtggtggaagcactcatcgccaagaatgcatctgtcactgttgcagaggtctactcacagcttcttggctttgaaaacagggtgaagatccgaacagcgtgcgctgctacgagtggaaaccgtggcagcggaaatcagggacgtggtggcggcaaccctcgcggccgcggcactggacgcggcggcggcggcagcggtggccgaggtggcgggcacggccgtggcaatggacgcggcggcactgacaacagacctacctgccaagtctgtcacaagaaagggcatgtggtggcggactgctggcaccgctacgacgagaactacgtccccgatgagaagctaggaggcgctgcgacgcacgcttacggtgttgacaccaattggtatgttgacaccgaggcaaccgaccacatcaccgggcagctggacaagctgaccacacgggagaagtacaagggcaccgaccaaatccacacagctagtggtgaagttcatagacttgttgctgataattatgcattccttgagattcatcaaaagtattttttgattaaggacaagggaaagtctcatcagttgccatttcctaagttttttagtgtttctagtaatcctttggaacttattcattcagatgtatggggtcctgcctctgactccgttggagccaagcgctattatgtgagttttattgatgattatagtaaatttgtgtggatctactttcttaaatttaagtctgaagtttttgagaaatttaaagagttccaaagcatggttgagagacaatttaatcgtaagattctaggcatgcaaacagattggggaggagagtatcaaaaattgaattccttctttaagcaaattggcatagcacatcaagtgtcgtgccctcatacccatcaacaaaatggtgccgttgaacggaaacaccgtcatattgttgagattgggctatctctccttgctcatgcatctatgcctttgaaattttgggacgaagcttttcttgcagccacttatctcattaatcgcttgcctagaaaagtaattgactttgacacacctcttgcacgcctttttcaccaacaacctgattataaatctcttcgaacttttggttgtgcttgttggcctaatcttcgtccctacaatactcacaaattacaattccggtccaaacaatgtgtctttctcggttttagcaatttacataaggggtttaagtgcttagaagtggcaaccggtcaagtctatatttcccgtgatgtcacctttgatgaacaggagtttcctttctccaagcttcagccaaatgctggagcgcgtctacgtgctgaaatttcccttcttcctgctgatcttacatcgcatgcatctgatcaagggggagtagcacatagcaatgatcatatgcataatatcctacctgttgttactgattcctcttttgagaatgatgctgcagatgacacagatgctagcgacagcaatgcagaaattaatgcagagcaacctgatggaattcatcctggtgcatctaccggggtacacacagcagaaacagaagtggcggcagaatcgccgtctcgtactgatcagcggcgcgccgtgcaggcccctgagcaacctgcgaccgtcaccgaaccagcagccgccacgtcgtcggctgtacagagctcccgcgcgagttcccgctccatcgcaagccaccaccagctcggaggtgacacatcgccagggcctcatcatgatgcggcaggatcgtctgcggctccggaggttatcgctgcaacagagcaaggtgatattaatgctagaccaaaaactagactccaaagtgggattagaaaaaagaaaatttatactgatggcacagtcaaatatggttgttttacatcatctggggaaccacagaacctagctgaggctctaggagataggaactggaaagaggccatggacaaagaatattatgcattaatgaaaaatgaaacatggcatttagttcctcctaaaaagggaattaatattatagactgtaagtgggtctataaaattaaaagaaaggctgatgggagtttagatagatacaagggtagattggttgcaaagggtttcaagcagaggtatggcatagattatgaagatacctttagcccagttgttaaagctgcaaccataagaactgttctatccttagtagcttctaaagttctagaagaagaggtgtatattagacagccaccaggatatgtaaaatctaaggcacttaactatgtgtgcaaactagataaggcattgtatggattgaaacaggcacctagggcctggtactcgaggctaagtacaaagttgaatgagctggggtttgtgtcatcaaaatcagatacatctctgtttttctatgataagaatggagttactatgtttatgcttgtatatgttgatgacatcattgtgtctagctcttccgaaaaggccacctcagctcttctgcaggatttgaatcaggagtttgcactgaaggatttgggagatcttcacttcttcctaggaattgaggttaaaaaggtaaatgatgggctagtgctaacacaggaaaagtatgcctcagatgtcctgagaagggtaggtatgagtgactgtaaaccagttaatacacctctgtccatctctgaaaagttgtcaagtcaagggggagctctccttggtcccaatgatagcactcagtaccgcagcatagttggagcattgcagtatttgacattgacaagaccggatatatcattttcagtaaacaagattaacaagtctagttctttgcttgttagtgcatttactgatgcagattgggcaggctgtcttgatgacagaagatccactagaggatttgatgtttttgtaggacccaaccttgtatcttggagtgcacgaaaacaagctacagtttctagatcaagtactgaagctgaatacaaggcattggcaaatgcaacagcagaaattatgtggatacaaacattacttcaggaacttggtgtaaaagggcctagagccgctaaggtatggtgtgataatatttga

SEQ ID NO: 7226 - DNA, 248 bp, Oryza sativa
  Clone ID: PAT_MRT4530_13840C.1
gcacgaggactagctggtcatacaacactccaattccaaagaacacaccaaaggcaattgcggagattgttttgctgctgcattgttgatcttcagagatagttgggatggtgtgagctacctctactgaaccacaaggagccaacatagatccacatagctttggattcccggcaaaactggagcttgagaacgtgttcatctggcctcctgtcggaataggtccttccagatcattgtcagaaatg

SEQ ID NO: 7227 - DNA, 159 bp, Oryza sativa
  unsure (1)..(159): unsure at all n locations
  Clone ID: PAT_MRT4530_13841C.1
ctgaatgatataaaaatctggcttttattggtactcagaagttaccacctaccaaatgggaatcctaagatggcccaaacatgatgttntnaaaaatcgacctgaccacctaaaccaagagtacaccaagagggcccctggaaaatggaaccacttaga

SEQ ID NO: 7228 - DNA, 303 bp, Oryza sativa
  Clone ID: PAT_MRT4530_13842C.1
atggtgtacgccggcactatccagccaaagcgccgcagcatgtcgatctcgaactcgtcgtgcaggctcctgtccttgagcgagaacgccaccagcggtcgccgctccgcccccggccgcccgcacaccgcaccttcccccgccgccacgtggtcggtcgccggccgccgatccgtgaagttggatcccacagccagggacaggatcaaggagctcatctgcggggaggcgatgctgtttgacaacactcgggccacaagccagcggttcaggccgagctccggcgagccatcggggaggtag

SEQ ID NO: 7229 - DNA, 189 bp, Oryza sativa
  Clone ID: PAT_MRT4530_13843C.1
atgaaagcctcaaggtctccagacgtggccgctctgcacgggctgggtgattcggttgctgaagaagatgaagtggatcccgttgatgaggagttcttccaggagcaagtcggctacgatgattgtgagctcgggatctgtccgcagcccaacatgactgttaatttggagcgtcacgggctagttccg

SEQ ID NO: 7230 - DNA, 3418 bp, Oryza sativa
  Clone ID: PAT_MRT4530_13844C.1
atggatgtcgcagcagatctgcagagggtgatcgacattctgagctcggcgcgcatggagagccagagccggctgctggaattggacgccctgctcggcgcagtgcgtgactccatcgcgcgcttccccaacatcatcaacaatatcatcgacaggcgagataaatgccttgtgttggcaacatgtggagattatgatcgccgtctcgaggaagcgagaagattgttcgcccaccttcgcggcgagcttgaggcaatcctgagcaggcaggtggaaccagattcttggtatcaggtaaccgctctccacattagcaacctcttctttcgccgtgccaccgtccgtgagcttaggagtttgttgaagaagcttgcggggctagaggaatcacttgcctccgtgccagagtctggagagagtatggacgaagacttgtatccagtaggaacctcgacgaacgatgtgggtcccgacgactatgtcaaaagtccaatggtggggagatcagagctggcggagaagatgctggggaggatgttgctcgccgacggcgaggaggaggagggcgacgggccgctggttttaccgatagtgggagggcctgggatgggaaagacatatctagcccggttcctattcaacgacgatagggtcaagcaggcgttccaggtgcggcattgggtgcatctctcaccacattttgatctatctgagggtgtcagtacgattacaagcagctggttggtcgataggaaggatgggccatcctatctgcaacaagtaatttccagtgttctaagaggaggagcgaaatacttggtcgtcctggataacgtgtggaatgttggccagcacgactggcctgaatgggacaaccttatgctggcattccccccaaatggcaggatccttctcaccacacgaactccctctatcataccacggacggccgtcgtcatgcgaaccactgaggcttacttcttgcaaccactggaccaggaatcctccaaacacgtcatggacatgtaccttcccccttatcacgagtacggtatcaagttggtcgaaaaatgtgccggtgtgcctctgctgttagagtacacatcatttcttatacttcaaagggaccagctaactctgatccggtggaaaagagttctggaaggttcttggaggattcaacaagaggaagaactgactgatgtctttcagagagcttatgccagttaccagcatctctcgtccgaattgcggaattgttttcttttttgctcgctgttcccattggacttcaacttcactgctgaagaactggctgatctttttgctgccaaaggctttataccgtcgaccgtgcctgaagcccaacgaatacgattcctccaacagtttcttgatgagtgcttttatccggtggaagaatatgatcatggaggtaggcatatgtacaggatgcacaagatattgcacatcttcgtgcaatatgcagacagagtttccagctcaatcatcagagttggtcagttcaatgctgttcaagacattatcttgtctactcggagtgcatcactgctcgttcatccttccacggaatcgctgccaatttgcatgtcccaattgaagatgttaaagacatttattttgctacaggaagggaaaacgtgctcatctgatcggcagtgtgagatcaaacagattccccaagaattgtgtcaaacacttcgacatcttgaagtcctcagtttagaagccactaagatcaggaagctccctaataaattcgacctactcttccacttgacatttctcaacctatcagggacagatatcagagtcatccccagctcaatatccaaactacaacttctgcatactctgaaattatcctactgtggaaagctccaaaaactgcatcgaaatatatgcaggctttctcggctacacaagttagaccttgaaggatgccgctatctttctgaattacctcagaacatcagtaaaattaatagccttgagtatcttagtgttcttggatgtgcatcacttactcgaatgcctcacagattcggaaatcttaaaaaccttcagacattgctagggtatgttgtttcaaacagcaatgtagttatgctgtcagagctgcaacctttggcaaacctgcacaggctaagcttagaaagacttgaaaatgttttggatctgaaagatgcaagagatgccatgctgcaagataagctagaactcgaatcattggcactgaggtggaacatggatactgaacatgccaatacagcagcctatgaactaattgagattcttcgaccgccacaacagctgaaagagctggagcttgttgcgtatgaaggtgataagcttccatcttggatgacacacaccgaaccatatcttaaatctctggttgagataagactgattaatctcacagaatgtaaatccttacctcctctggggatactaccacgtatgaggatagccgagataagtggagctgaaagtatcacctgcattgacaacaatttctatggtcacaatggcacattcccctctctggagaagttaactttctcttatatgcataaccttgaactctgggaacaggcagacaggacgggtgcgtttccttgtcttgcagaagtggaaattattcactgccccaaattgagtgctttgcatatggagcttccatctgttgaaaagttgaccttgtggatgaacaacaagatgttatatggttcaaaaggaggccttagaagtgtggcaagaaatctggaacaaatatcaatctgttttggggaagagctggaatcttcttctaactttgagggtttgcaagatctcgccaggctcaagaagttaaacatatgcgggtgtcatgagctgacatgcctcccgcaaggtctgcaacatatttcttctattagaagcttggcaattgacaattgcaacaaactggagactttaccagaatggttagagcaccaaccttctctccaagttatacgtttgtcgggctgtcctgcgctacattctatttccgaaggcttgctacgtggcaacagtatcgaaatacatatgaatgactgccccaatttgacagaacaatcatcaggaggatattctactactcaagtcaagaagcacaaagaaatcattcggcttgttgaagaaaccatcagtgaagatgactataccatccttggaaacaccttacttgaagatgatacttatctagaggaggctttttttggtgctcgagtagatactaggaggcaccacgtttcctaatgttaatagaacatgggcatgtttggatgtacttaatgttaatcttattaaaactagctgggtggctcgcgcaattgtgcggctagcacccatataaaattatctattttct

SEQ ID NO: 7231 - DNA, 780 bp, Oryza sativa
  Clone ID: PAT_MRT4530_13845C.1
atggcgacgattgccatctatgaatcaatgataatttacccttgctatggatataatgtccttcacttgaatcaggacctagcatacatattcagacaggaggtctacggcgaggcagtggtgcggtcacaagttccaccactgatcggcaatggttgtaagcatcggcagattcgattcaccgagaagttcttcctcggtgacactgttgtccacaaggctaccttagagttggaaaaaaaatctgggattgcaagagcattgcaagggagaacttctgaaaaggaattgttatcgttatctttagtgcccatattatttggcttgggcaactataagaaactaatcaggaaaggtaagcagcttattctgcacggtcttaacgaggttatcccgagaaaatttatggatctctcttatattcaggaaagtgaagccgttaggttaattaaacgaagattgttgtaccttggccctgaaacaattgaagagggctctctacttgtgttgaaagtttcaccgcattcaattcgtgagcgtgtcagttgttttgatcctgcaatcaacaagaataaaagacaagaaaatcgagcttccgttttaaccgctctagccaaaactttccccaatctcttcctcgagctctccggcgacatttttgagctttctggccatctcgcaagcgattccttgctgcaccaacctccgtcaccgacaatgtcgacctccaccgacccctcgagcgcaccaaccgccaactacgttgagttcccagcataa

SEQ ID NO: 7232 - DNA, 129 bp, Oryza sativa
  Clone ID: PAT_MRT4530_13846C.1
ggggaaggaatacaaaattccatttatccaaggtgcccaaaagggacccgtttggccccagccttagctggaggtggccccttattttttctggcaaatctacccaaaattcccggggaaaaagggggg

SEQ ID NO: 7233 - DNA, 753 bp, Oryza sativa
  unsure (1)..(753): unsure at all n locations
  Clone ID: PAT_MRT4530_13847C.1
gcgcgtttgggtgacgcaacacgactcactatagggcgaattcgagctcggtacccccccgcgccaccacccgccttgagctcccttgaaccaccccaaacagtcgctctgcccgattcgctgccgccacgcatgaccgcgcgccgccgtcggccatcccctcgccgtatcctctcgtctccaccctcctggagccccctcgactctccccttaccgtacgccgaaccagctcgctgtcgccctcccggaactcctcgcgccccctctctgtttccccggccatgccactctcgatgctatgaccaccccgccgtgctctccttgagctcccttgaaccaccccaaacagtcgctctgcccgattcgctgccgccacgcatgaccgcgcgccgccgtcggccatcccctcgccgtatcctctcgtctccaccctcctggagccccctcgactcttcccgaaccgccgccctagccgccggccttctttctttttcccacgtcgtgccgcccgattcaccaccgcggcacacgggcgcgctctgccgtcggttccccccttctcttcgaacccgctcgccaccaccttcctcgggcccctcttgacctcccccttgctgccccgtggccaccgggctcccttcagntttcgcgccgcgccgcccttttcgttgccgngccgcgccgncgaacgagcaacacccgggaccatcaggctncgcgcccaacgcgtgtgcgtcgcaancaccacaccc

SEQ ID NO: 7234 - DNA, 352 bp, Oryza sativa
  Clone ID: PAT_MRT4530_13848C.1
gggataaaatgggccagccggtcaaactaaaaaaatttgaaagggggtttgggccccggcggggtttggaaatcggttttggccccccccttgggccaaaggggttccgcttccttggtgggaccatttgggggaaaaggggctccagttaaattcatgcctttcaggccaaattaagggcggggaaaaaaaaagctttcctggggggccctcacccctgggattcattaggaccccgatcacttaactgggtgcaaaatatcccccgggtccttttcccagtttcctgaacataataaaggggattcccgaattaaaagaaaattccaagggggagcaaaaaagggggggc

SEQ ID NO: 7235 - DNA, 1540 bp, Oryza sativa
  Clone ID: PAT_MRT4530_13849C.1
aacctctgtagagggggtacactatacccacacgacgttactagccttggtcacccagcccgtatttcgaaagccgacacagggttaccatatgccaatgagaggagtcccagaccaacaacaggttaggtcccagaccatactgtgccaggaagcccgggggttctccccgacaccaccccgttgaatccacatgtctcttggcatcaaggctcccttgattagctatttactcagccaggggcgtcccattccacccgtgtggtcgcactattcggctgaggtggcgtccaggtggacgccacgtcggacagggaagggagaggaggccgggcggctcatcggatggccaacggcgctcggtgcgctccagcgaacggcggcgaatcggagtgggcggcaggcactggaagcgagaggaggaagcggggaatcggttccacggatcggaccggagagaaggggcgcgacggcggccggcgacggtggcgaagctcgccggattgccgacgtggatacgcgatgggagggaaaagggggcgcgggctatggttcgatcgaatcggtgtggtgttgcgacgcacacgcgttgggcgcggaggctgatggtcgccggtgttgctcgtgcggcggcgcggcgcggcaacgaaaaggcggctcggcgcgagagctgaaggggaggccggtggccacggggcagcaagggggaggtcaagaggggcccgaggaaggtggtggcgagcgggttcgaagagaaggggggaaccgacggcagagcgcggccgtgtgccgcggtggtgaatcgggcggcacgacgtgggaacaagaaagaaggccggcggctagggcggcggttcggggagagtcgagggggctccaggagggtggagacgagaggatacggcgaggggatggccgacggcggcgcgcggtcatgcgtggcggcagcgaatcgggcagagcgactgtttggggtggttcaagggagctcaaggcgggtggtggcgcggggagtccccgagagggtggccaacggtggcgctcagccgagcgcggcgtcggcgggaacagagcacggcggggtggtcatagcatcgagagtggcatggccggggaaacagagagggggcgcgaggagttccgggagggcgacagcgagctggttcggcgtacggtaaggggaaggggacggggagctcaccaatcggtgaggaatggtgtcggcggcgatttgaggatgggaatgggaggaaggccgttggcgttgggcggcgaggccgacggcggcgcgcggtcatgcgcggcggcggcgaatcgggcagagcgactgtttggggtggttcaagggagctcaaggcgggtggtggcgcggggagtcgccgagagggaggccaacggcggcgctcagccgagcgcggcggcggcgggaacagagcacggcggggcggtcattgcaccgagaggggcacggccggggaaacagagagggggcgcgaggagttccgggagggcgacagcgagctggttcggcgtcctttaa

SEQ ID NO: 7236 - DNA, 541 bp, Oryza sativa
  Clone ID: PAT_MRT4530_1384C.1
attttcgatcatcctacacatttccgtttaattgtttgatacatttgtatctcaataccttatctcttctttcagttctatttcatcctcaaaaaccacattcacaatggctgctcctattacctcaaggacggagactctccagaagtatctcaagcttgatcagaagggtatgatcatggctgagtacgtctgggttgatgctgagggtggcactcgatccaagtcccgaactctccccgagaaggactacaagcccgaggaccttcctgtctggaacttcgacggttcatccacaaaacaggcccctggcgagaactctgatgtctacctccgaccctgcgccgtctaccccgatcccttccgtggatctcccaacatcattgtcctggctgagtgttacgactcagatggcactcccaacaagtacaacttccgtcatgactgtgtgaaggtcatgaagacatacgccgacgaggagcccttggttcggtctcgagcaggagtacactcttctcggatctgatgacagaccttatgg

SEQ ID NO: 7237 - DNA, 1096 bp, Oryza sativa
  Clone ID: PAT_MRT4530_13850C.1
ccgctgaacttttatataggttatcaggttgtgacattaaaggagtccgactacttgaagacctcatttatcactccgttcggtgcgtactgctacatcatgatgccttttggcctgaagaacgctgaagctatgttaccaacgcataattaagagatgtttgcagtcacagctcgagcgcaatgtggagccatatatcgatgatgttgtcatcatcaagacctagcaaaaggtcaacttgattgctgacctggaagaaaccttccaaaacatacgtgcctttaggatgaagttgaacccgtagaagtaccgtcagggaagctgcttggtttcatggtgtcgtatcgcggcatcgaggccaacctggagaagatcaacgctatacgcgatataaaaccaccgaccactcggaaggatgtcaaaaactcaccgagtgcttggcggttctcagttgatttatttccaaggtggagaacgaggcatgcccttcttcaagttgctaaagaagacaaacgatttctaatggacgcccgaaacccaacgagcttttgaagattttagatttcaatagtttcctcacaatatatttctcgtgctggcttcacctcatccataggagcctttgctactttatgcattggcgagaataggagcgagacattcaaaaagctcaaaggcctatttatttcatcggtgaagttttggccgaccgcaaaatgtggtatccacaagtctagaagttattgtatggagtgctgatcacggtcaggaagcaagcacattattttcaaagtcacttggtcactatggtcacgtcttttccactcggtgacgttcttcacaatcgtgaagctttcggcaaattacaaagtgggctctagagataatggcattcgatatagccttcaaagcccgaacatcaattaagtcacaggtcttagcagattttgttgccgagtgaatggaaattcaagaagggacaccaatggagaagctggagtactggactatgtattttgatgagtctccatctctggcgtgctccaaatcctcaattatgctgtccaggatatggaggactcgactcatgtgtatg

SEQ ID NO: 7238 - DNA, 738 bp, Oryza sativa
  Clone ID: PAT_MRT4530_13851C.1
atgggggaggcagccgctgctcgttggaagatgagaccatcaccactgccactgcttccccgcagatccggccgcgcctggcttcaaggtggctggatccggtggcccccggcttctaggcggccggatccggcggcctacacactggagagaaacggcacgcgatggcggtggtggcgcgggggcgggagtgcgctcatagcggcgtcgctagcagggagagatggggagcgaaggcgaaggacggacggagagcgagagggcggatggataggaaggatcggcttcgattcgtggcacaaggcaccggagatgcggagcttgcaagggcaacggcgacctcggcgagtcggtggacaacgcgaacaccgacgagggctagtacaccacgaaagcacgaaccacttcagcctcaacgacatcttccacggtaggatcaagcaatatgagtccctcacccaacttgtcgttcacctgttctacgctgggactcaagtcaacgctggtagcagcattcctcgacgtgcgaagctcgcggagtccgccttagccccaaggcccccgatccactcaagtcagcggcgactgatggtggggaacgaggagagggatgcgcgagggatggaaacagaggaggtcatacggcggcagaagtcggggagtagcacgagggaggcgcgagggacaaggaagaaggagttggccgtcagcgagggaggagattggagccaacaatga

SEQ ID NO: 7239 - DNA, 885 bp, Oryza sativa
  Clone ID: PAT_MRT4530_13852C.1
actctagcataagcgaagtggaggcctgtcgccggtatggaaattactagagaccgaaattctggtttgttttttcttagtcagcaaagttacattaagaaggttcttcatcatttcaacatgcatgatgcaaagtctgttagtacttagattgcacctcattttaaattatcagctttacaatgtgctagtactgatgaggaggttgaattcatgtcaagggttccatattcctgtgctgttggttctttgatgtatgccatggtttgctctcatccggatttatctcatgctatgagtttggtcagtagatacatggctaatcctgtcaaagaacattggaaggctgttcagtggattttctgatacctttgaggcacaacatatgcttgtttgaaatttggcagggctgctaagggacttattggctatgtggattcagattttattgctgatttagataagcgaaggtcactcataggttatgtgtttactattggtagttgtgctgtaagttggaaggcaacattgcagcctgttgttgcccagtctaccactgaagcaggatacatggctattgctgaagcatgtaaggaatcagtttggctgaaaggattgtttgctgagatttgtggagttgattcttgcattaacctattttgtgacaatcaaagtgccatatacctcactaaagatcagatgttccatcagaggacaaaacacactgatatcaagtaccattatggtcgtgatgtagtcgcacaaggtaagctaaaggtatgcaagataaacactcatgataatcctgctgatatgatgacaaagccagttcccgttgctaaggttgagctttgcccaagcttagttggtataatggtttagccc

SEQ ID NO: 7240 - DNA, 704 bp, Oryza sativa
  Clone ID: PAT_MRT4530_13853C.1
actctcaaaaatcgtatatccactaacgaaagtactatgccttacaacctttgtgtatttgtgtactatgtactctcctactactagtgttatgttatgtatatgcgcctatcatcctcgtgtacgtacgtacattgtacgcgtatatctatacacctatacgccatgtacgtactatagaagaatactgtcgtgggtgagttgttaggatggatcgatcagcaggaggcgggcatgaagccgtacggtgactgccgtcgaagcgcacctcgaacgagcgctgctgcacgttcccgaggtatggacgcctggctgtcgccgccggtgggcgcgaaacgccaggcacccgctggggaggggcccccccgtgccgaccgccggggccccgccgccgccgtccccggtccggatcggcggctgcgtcacgctgccgtcccgcgtgtaggcgtagcgggtgcccgggatccccggcgcccgcgccgtcggggacccgcccggggccctggcggcccggagcgcggaccgcagcgccgagtacgccgtgcgcggcagccgcgtgaccaccgcccccgtgtcgcccaccgcgcccgacgcgttcacggacgcgtcgaccctctgcggccgcccgccgacgctcctccccggcgagcatcacgatgtagtatgtcgggtcgttcgacgccgtcagcagcggcgcctcgtgc

SEQ ID NO: 7241 - DNA, 885 bp, Oryza sativa
  Clone ID: PAT_MRT4530_13854C.1
atggaccttgaggcgaaggccctcgaacttgacttggctgggcgaactgtccaaccagaagccccgccaatgcaccttgtcttgggctcccctcggtctgaaccggaggtgaagctctttgcttcgggtactgggcttgaggcgccgccgggcgaaccggtgcttggatcacttgatgtgttgggtgaacggcagcggctagggctggcctggcgaagtacaccactcttgcatctggcgaagcgtgtcttgaagttttgccatgttttgacgcatggcccccatgtcagcttcggcttgtacttcgagagcggtgttggcttggccttcgccgctgccaccgccttcgccgcttccgcatcagtcgaagttttgggcgccgaagaagggagaggtggcagccctgtcgaaggcagtgctgctccggcttcacccacggaggccgaaggatctgctccctattcaactaccatctctacttcacttccgccttccttccgcttggcaactttctccttagtgaccttcttcggtggcatcagtggttttgctcagtctcagtggtttcgctcggaggtccccacggtcggcgccagctgttgtcgaatagacaaccgcgtcacactgaaagacgtggttctctcaacagttgttggaaaagggaatttacatggttacccttatgatagggacatgattaggggtcgcaacggcccgctgggcttcctcacggtggggtttggtaccttggcgaaacccatgccttcaggccgaggctttttgcctcgccatcttcgcctgcgtggcctcctgacggggtccctgtccgacgaagcacgcgcccgaccgaaggcccttcgcggtatacctccaacaatgtcttag

SEQ ID NO: 7242 - DNA, 1806 bp, Oryza sativa
  Clone ID: PAT_MRT4530_13855C.1
aatggttggcctgggttggcttgggacgaggcaaacatgacatcggccgaacttcctccatcgatgaggatgcgccgaacttcaaaactagccatttctaccgaaacgatcaacgggtcttggtgcgggaaaagaactcctttggcatcttctggtccgaaggatattggctgtgaaaagtatcttggaatgctgtcagctgtagagacaatgctgagacaatgcctttgtgcttgaacattgccttgctgccgaatgtttcgactgaactcgattcggatcaaatcctcaacgattctctttgattcatgggtgcttggttcggcctggggtgcagtacttggttcgccagagatgctgggtgaacttgaactggtgctgaacttacagcttgagcttggacctgagcttgggtgttggtttggacggcggctgctgcagctgttgctgccttgtcatactcggcttgaatttcttccctccgcttggtatcttcttcacctcgagcatatccatcaattatgcaaaagaggtgttcaagtgttctgggttctttacgcgcgagtttccttgtgagttctccctcgagcaagctggccaaagcggcatggataacatacgcttcggttatatcttgcacttggcaacgcgcttgcgaaaacaggcaaatgcactcccttgttgattccccttgcctttggcgaatgcccataaggtcttgttgtgttttcggctcctcgcataggtacctcgaaagttaagaacaaaaacatcgcgcaattactcccatgagtaaatgttgaactggggtgggatgggatgattattgattccccagctgaggggcaggcccttttcggtcctcggcttgatcatagccccttgctgagcaggccaattcaaatgtgggtacggcagcgcgaacggtgaagccatggaatccacaggctgttgtgtgccgcggttgggttgaacgtggtttgattccatgtttgattcggtggtggggctgatccgtatcctggaggtatagcttgtgcaaaagttgtcagtgcttgggccattgtgcttgggtcaaattgtgaagatggaccttgaggcgaaggccctcgaacttgacttggctgggcgaactgtccaaccagaagccccgccaatgcaccttgtcttgggctcccctcggtctgaaccggaggtgaagctctttgtacgttgttgctgcagaaaaacttggaattgagcttgcaaggtcgaagctgcttccatcattgcttgcggtgtataagtaggcttcgggtactgggcttgaggcgccgccgggcgaaccggtgcttggatcacttgatgtgttgggtgaacggcagcggctagggctggcgcttattgcagctcttgcatctggcgaagcgtgtcttgaagttttgccatgttttgacgcatggcccccatgtcagcttcggcttgtacttcgagagcggtgttggcttgtgaggtggtgatcgctgctgacgtcgaaatcggttgggcgaaggccgtggctgagggcgtccctagtacttgggaggacaagaccacgtctctaacctgaagggccttcgccgctgccaccgccttcgccgcttccgcatcagtcgaagttttgggcgccgaagaagggagaggtggcagccctgtcgaaggcagtgctgctccggcttcacccacggaggccgaaggatctgctccctattcaactaccatctctacttcacttccgccttccttccgcttggcaactttctccttagtgaccttcttcggtggcat

SEQ ID NO: 7243 - DNA, 684 bp, Oryza sativa
  Clone ID: PAT_MRT4530_13856C.1
atggggaatcggtgcggtaggcgcgtggagaagtttcgtggatttctgagaacggattggggcggattgatgaaccctagcttcgtcggcgcagctttgtactgtagcaaggagtggggaaatggcgagagtttcggcggggaagacgaagtgtcgcttggacttctgtgttttgttaggtgtatgagtcaagcccccgcgtcgtcctccccacgggcgacacgggaggcggaaaccaccggcatcgcccgctcctcccccctcctccctccgccgcctcgccatcgcccgagcggctgccggcaaagccgcgcggccgcaaggacggcggtgccggggcttcaccctcgtctttgtctccctctcccgtcgcggtggggggccgcgtgcgggacggcgaccgcgtgcgggacggcgaagaccgcccagatccgggccgccgcggccggatctggaggagaggccgccggcggcgggtcattggtggcggctggcgccggggaaggcgacgacggtggcgggggagacggcgacggcgacggggatggcatgcgtgctggcggcatgctgcttctcttgttgggggcgtcggcggcggggttggagatagcggcgaggctggcgacggaggccggatctggcggcgagactggcatcggcggccagatccacagcctcgcctag

SEQ ID NO: 7244 - DNA, 4764 bp, Oryza sativa
  Clone ID: PAT_MRT4530_13857C.1
atggcgcccgatgagaagttggacctactgttgaggaaaatggaagagaatgaaaagaagagagtagcagcagaggagagatcacgagcggatctggcacaattgaagtcggcgatggaggcaaggttacctcaagtggagaagagggtggatgacatagcttcggtggtgagtacattgagccaaaaggtcgaacagcttgagggcgcgctgcagaaatttggggatgatgaccagaagccggaggaggtgaaggaagagcatctagcaactcctaaagggaaatcatcgtttcagattcaaggtatgagagatccagcccttaactctgcaactactttccaatttgattctgttcaagccactgctgctggtagtttgggaagcagtttacccccaatgacatgtcctcagtttagtggagacaacccgcagatgtggagagcaaattgtgaggtttattttgatgtatatggggtcctgccgagcaattgggtgaaggtggcaactctgaattttgttggcaacgcagcattttggttgcaatctgtgaggaatcagctcattgggataacttggcatgacttgtgtgaaagagtttgtgctaggtttactagagatcggcaacagtccttaattagacagtggtttcatgtgaagcagttgaccacagttgcagattatgtggagaggtttgatagtataatgcatcagctcaatgcttatgaaagtgctgccccaccagattatttcgtcactaagttcatagatggattgaaagatgaagtgcgaacagttgtattagtacaacggcctcaagacctggatactgcttgttctgttgctctgttgcaggaagaagctatggaaggtcagaaatctggatcatatcgaaaaagtgagcatgtcagtaactacatcaaaccatcttacagaaatcaaactcaaattggggtgacaactcctattctacaaaaggtgaccagcaacagtgggggagatgatagaagaacagcagagttggctagatcccgagatgataagttggcagccctcaaagcttatagaaagtccaagggactctgttttatatgtggagaaaggtggggtagagaccataaatgcgccaatgctgttcagttacatgtggtacaggaactgatggaggctatgaattcagaaggtggagaagaacttgaagaagagcctcctgaagaagttgaggaagtacaattgctagccatttctaaacaggctatttcaggcacagaatctagcaagtctatcagactcaggggttggatacagggaacagaggtactcatgttgatagattcagggagcactcattccttcattgaagagcaagtgggaaatagactgtctggggtggagttacttaaacaaccacttaaggtgcagatagcagatggtggtcaacttacttgtaccaggttcatacctgactgtacttggtggatgcagggacacagcttcaagagtaattttacactaattcctttgggaagttatgatattattttgggaatggattggttggtacagcatagtccaatgcacattaattggtgccaaaagtggatagaatttcagtataacaacagtctggtcagattgctaggactttcttccaaaccaactcagttcatggaaatatctggggaacaattgttgggaatggctaagaatggtgctattatgtacatggttcagttgacaagagtaccaccagagcagcaacaagacattcctggatctgtacaatccttgctccaggaacatcaggatgtatttgctgaaccaaaagggctacctcctagaagaacttgtgatcacaagatacccctgattgaaggtgctcagccagttaacttgagaccatacagatacaaccctgagcttaaaaatgaaatagagaaacaagttgctgaaatgctacagtcaggagtgatccagcatagccaaagtgcttggtcatcaccagcactgcttgtgagaaagaaggatggcacttggaggatgtgtgtcgactataggcatctaaacaatctgaccatcaaaagtaaataccctgtaccaatcatagaggaattacttgatgaattgtctggctccaagtggtttactaagttggatttgagggctgggtatcatcagattagaatggtacctggagaagaacacaaaacagcttttcaaacacattctggtcactttgagtacaaggtgatgtcctttggattaacgggagctccagccacatttcaaggagctatgaatcagactctatcttctgttcttagaaaatgtgctttggtcttctttgatgacatattagtctatagcccagacctgccatctcatttatctcatcttaaacaagtgttgcaattattgaggcaagatcattggcaagttaaattcagtaaatgctcatttgcacagcagcaggtgtcctatttaggacatgtcattggagttaatggggttgctactgaaccaaagaaaatacaggatgtgttgaattgggctactcctgtttctgttaaaaagctcagagggttcttgggactggcagggtattatcgaaagtttgtcaaaaattttggaattatcagtaaacccttaactcagctgttaaggaagggagtaccttttaaatggagtgcagaggcaaaagatgcattccaacgtcttaaacatgccttgacatcggcaccagtgcttgggttacctgatttttccaagattttttatgtggagactgatgctagtgaagcaggcataggagcagtgttgtcacaagaaggccaccctattgcgtatctaagcaaggctttggggccaagatctcggggtctgtcaacatatgagaaagaatgcatggctatactgttggcagtggaccactggagggcatatttgcagcatcaagagtttgtcatcatcaccgatcaccacagtctggttcacctagctgatcagcgtcttcacactctttggcaacagagggcttttaccaagctattggggctgcaatataagattatttatagaaagggaagcagtaatgctgtggcagatgccttatccaggaaggattgccctaatgacgctcaagtgttagctatctctgtgtgtacaccaaagtggatgcaggaaataaccaagggatatgagctggatccccattcgtctcagctactcattgaattgttagtggactctgctgccagggaacatttcacattgcaaagtggtctcattcgttataaggggcgcatctgggtgggtaataatgaggatttgcaagcaaaactgatttcagaattacataacaaccctatagggggtcattcagggtttcctgttacatataggaggattaaaaggttatttgcatggatgggtatgaaaaaacaagttaagaaacagctgcagcaatgtcaggtgtgtatacaggctaagccagaaagggttaaataccctggtttactccaacccctaccagtgcctgcaggtgcctggcagacaatttctatggactttattgaaggtcttccaaaatctgaaaggtacaattgtatttttgtggtagtggacaagttttccaaatatgctcactttgttcctttgacacatcccttcactgctgaatcagttgctaccgctttcatgaaaaacatttacaaattacatggtatgccaaaagtgattgtttcagatagagataaaatttttacaagtcaattttgggagtacttattcactaaatctggtactgaattacatatgagttcttcttatcatccccaaactgatgggcaaacagagagagtcaatcagtgcctagaattgtttctgagatgttttgttcattccacaccacataagtgggcagcctggttgcacttagcagaattctggtacaacaatgcttttcactcagctgttcagaaaactccttttgaagtcatttatggttatcaacctgctcattttggaatttctatggaggattgtgctgttccagatctgcaggagtggctcagggatcgaaaatttatgcaccaattgattcaacagcatttgcacagagcccagcaacaaatgaagttttatgcagacaaaaacagaactttcagggagtttcagcctggtgattgggtgtacttgaaacttcaaccttatgttcagacttcggtggcccgtagagctaatcacaagctatcgtttaagtactatggtccatttgaagtgcttcacaaagttggccaagttgcttataagttgttgctgcccagtgattgttatatccatcctgttgtccatgtttcccaactgcgagctgccactgggttcaagcctccagtacaacacagtttaccatccagtgctggagctatgcaatttccacttcaaatcttggatcacagaattgccaagaaaggttcttcggtggaggatgcaacctgggaggacaaggaggagctgaggagccgcttcccacacgcaccggcttgggggcaagccggttcccaaggaagggaggatgtcagagcgcaccaagcatctcatcatcaagctgttgaggaggaggaggacccagaagatgatcaaggaggcgacaaggcgaaggacgaagtacaggaggaaggtgggaagcaagaaggcgttgtcaagagaggcaggcgtatccggatggagaatagaaaatacaaaggggccgaatgggccgtgtaa

SEQ ID NO: 7245 - DNA, 268 bp, Oryza sativa
  Clone ID: PAT_MRT4530_13858C.1
ggaacaaagcattgacaccataaaggttaaacaggtggatggtcatgggagggcggaagagagtgtgtgagagcaagcgtgtaagggcccgagaaatacacactggccgatgacttcctgccttgtcacaatattacatgcatcgatacagtctgcggggccatgttccttttgtgtgaggactcgcgacatacacatgattatgaagctatactgggctaaacacaggtggaagaacatgaccaaattggttggttgattcactcca

SEQ ID NO: 7246 - DNA, 664 bp, Oryza sativa
  Clone ID: PAT_MRT4530_13859C.1
gggctgcaggaatcggcacgaggcttgatgatgacatttttgccttaaaagctgtgttattcccttgtttgtttcggtgagtttggtttcagtgaaactgtgttccttttgggcatgcatccaattggcttccatgtagaatatggcgttggctaaaaaggaccttttcattgaagcatatgcatgtttttgtctgcttgtaggagagagaagaagaactcggagttgttactatacaagtgaaaagttccgagtttataggaaaccatcaagttgatactgatcttaaaacttatataaataaatatggctagattactgagatgtgtagtgggcgttgatggatgaccaagagcccaagactattcttacatagtgtgaagtagtacacttctttttatttcagtcatgatctgtgtcatgcatatgctcctaataccagcataggctttagacctttttaggtctgtttggtctgttcaaacacttgactgcctgtttttgtatgccatgggatacttatcaaatacaatgtattagcgtgtgcatgtttttccgtcttcatgatattagagtttattggctaattgctgttgttctatctaaccatttttcctccgtatgcaatcatgagcaggaaggcttacattcaagccaaaaatgt

SEQ ID NO: 7247 - DNA, 460 bp, Oryza sativa
  Clone ID: PAT_MRT4530_1385C.1
tttttgtgtaataatgccatctttcatatatatttttatttatagttcattcgttttaactgggacatcatcattttccattattgcacatgacagtacacattaattagtacatacaaaagacatgaattgtttatatatccatgctaccacatatataggagaatctatatatgcacatatataatcagaggcgcatgaacacactaattacttgggggctggaagccggtggagcaagaagaaggcgcgctgactgcatctgcatattaacgcaaaaactatggaggaaagaagggagaggggaaaaatgttcaaagatgataaacaagtaagcctgcaacgtgatcattgctgcacggaaagagcaccgctgcacctcgaacgaacggcaaacatgaatgagaacattcgagcttgctaaacagctttatgggtgcgggctgcaatgcaaccacca

SEQ ID NO: 7248 - DNA, 408 bp, Oryza sativa
  Clone ID: PAT_MRT4530_13860C.1
atggcgtacagcggcgctaccgcgaggcggcggcggcagacggcggcgacccacggagagcggtggcgacgcgacgagcggcggcggcgcgatgcgacgactaggcagtggtgctaccagaggaaaagagagggggaagatggagggggtgtcctcatcgaagaggtccgaccggcgtggagggagacgacggtgaacggtggtgagactctacggagggaagtcgacaagcgacggacggggaacgccggccaaaggcggcggccatggccgaacacaccggcgcacggtgcggagtgggtttcggcggcggaatccgacgggaggggagtggacggggtggcccgcacgacggcgaacgtgacggcgtcgacggcgcgactcggcgcagcggctagcgacggctag

SEQ ID NO: 7249 - DNA, 1182 bp, Oryza sativa
  Clone ID: PAT_MRT4530_13861C.1
ggatatgcaagacaattgaggataactgtgctcaacatcgacatcttcatcgagacatgaggagtgatcaacatgaccattatgaggaaagtgccattgttctagctaagatcaaatctgcactgccttattttgaaggaaattatgatcctcatgcttacattgattgggagttagcggttgatagagaatttcaaaagcatggcttgtctgggaaataaacggtatttttgtaggcataacaaaatatcacaatcttggaaagacctgaaacgacatttgagagatgtttatattcccatgtattatgctgacattctgttcaacaaactacaatgtttaaaacaagataccaaaagtgttatttcatactatcatgatatgcatgcttgtttactacgttatggcttacatgaatacgaagaagctacaaaattgaggttttacgtgggcttaacaaagaaattcaggtcatgtttgcttgtcaatgatataaatctctttctcatttgttacaacttgcttgtagtgctgaaagtaaaatagaggaggacatgaaaaaaaacatgctatgtttttacctactattactaaccaattgtaggaagtgcataatcatgaaaagaaggagagagacatgaaagagccgttattctgattgttaacactcaaaattgatgcacctccatcatcagaagagatcatcaaaggtaaactaaatgatgttgagattaatcaagcagggcaaccattagtggaaccaattgttgcgattcctttgtcacaagttgatttgtttattgttccttgtgataaagaagagttgtgtgataatgcttcacttatattaatgccgcaactagtgaatgaagatgctatatatagtgttagttctttatgtgctgattttaaacatgttgttcacattgctaatgaaatagaagaacgtgaattgacatcttctttaaatactttgggctatgtttagtttgatgatttttataaactcaataatttgaaggaggaattatttgctaagtctgattttccatgtccaactaatgctatttttgatatctttagtgaatataatggtagaagaatatatttcgtgcataaagtttacatctgtttgaatttagaacctcctatagatgtgcataaaacctgccacctgctata

SEQ ID NO: 7250 - DNA, 423 bp, Oryza sativa
  Clone ID: PAT_MRT4530_13862C.1
atggcattccatgccagcagatggactcctccaggccactccatcgaacaaactgagttcgtcttccagtggtcggacttggtcggtcccatcttttccgagcaaataggcatcgcctctaacgtgacgcacggcggaggcgcggtctggcatttcgtcgaacagcatgagcgcagctgtggctcccccatgcccataagcgcagccgcgcagggtcgatgcagggagtcgtccgagaccgagcgggtggggttcgcgggcgctttggaggaaggtagcggcggcgtggtcatggcgaagtatgcgcaccgcatgcgcaagtacacggaccggtggtggcggccgccgccgacggcagcggcagccggcggcgaggacccgaaagccgtttcccaagatgcaatttgcaagataaatatataa

SEQ ID NO: 7251 - DNA, 249 bp, Oryza sativa
  Clone ID: PAT_MRT4530_13863C.1
atgaccacagggagcggcgtgccggtgcggctagagagtggtggagcaaaaggagtggcgagcggtgggagcgatggatgcggtgattacgatgacagcgaccagtcgggctcggcagagcaggctgccagcggcaagggccgtgctcggcggcgaggagtgagagggacacttctgtcgacagcaaatggagaagaactgaacgcccaggtacacatggcgatgagccatgataggggtgacaagatg

SEQ ID NO: 7252 - DNA, 638 bp, Oryza sativa
  Clone ID: PAT_MRT4530_13864C.1
atgcgtcctcggcgaggagaggaggagaagaggaggaagaagaagagaagtagtagaaggaaaggtttgactacgcgagggagggaggagcatcttatcctctccatcacctattttcctcaccctcctctctctcatttccctccggctccctcccctggaggggcatcggcggcggcgcaggcggaggggtcgacggcgggggaagggcatcggcgtcggcgcggctgaacgggaggtgcggctcccctccctctcctgtccctcaactctaccctccatggccggtcgggacgacgataacgccgacgatgacgctgcctgcatcagaggaggggaggggaggtggtggcgcgaccagaggggagggcccctccctatcctctcccacagttctactcctccgcgcccggctgcgacgacgacgacgatgactacgccgccgccgcctggattcgaggaggggaggggaggccgccatcggccggagggagaggtcagcggcactgccggcggggtggtagcgatggcgcctacaaaaatgatttttgcagacggattgcatggccgcctgcgaaaatcatctattttcgtaggcctttgcgtgcaggcgtaaacaacaggcagcgcaaagtaca

SEQ ID NO: 7253 - DNA, 453 bp, Oryza sativa
  Clone ID: PAT_MRT4530_13865C.1
cccgtcgccggcgcccgccccggcggcgtcgcccatcgcgaaacctcctgccgccgtgacggcggccacgccaccgccgccgccgccgccgccgtcgccatcgccttccccgagcccggcgccccaagaagccgcaacggcgagcgccgcaacgtcgtcgtcggcggcgacagcggctcacgcattgctcctggccgcgatggccatgatgggcttgattcttggagagtggtagtaacaacagagtttgcatttgagctaggccatcagggtgttagttaattaggatggttaattacttcggtgcagtatggaacgtactggctggagcttaattaccgtcgctgaactgaataatttcgatgtgaattagacgattagttgttgatttgtcgctttagaatcgaagaagaaattaagatctctccattttcatgcaaaaaaaaaaaaaaa

SEQ ID NO: 7254 - DNA, 483 bp, Oryza sativa
  Clone ID: PAT_MRT4530_13866C.1
ggccgggaaaaaaaaggatttatccctgggcaaacccaatttaaaaaggaacaaacccccgccccaattaccggcaagggcctaaagcgggcggttttttgcccccgaaaaaaaaccccaaggacccaaaacccggccctctcggaaaggcccgaccccaacaaaaagggtacccccccccaaatttctcagggcaagacccccaaaacgaaaagaagggggaaaaaaccccccaaaaaggccttcataataatggggcctttaaagggggcctttttaaggaccagggccccccttttttggacaaaggcgaccctatggggcgaagttcccatggaaaggcttaacccccccaaaagtttttcctgcccaacaagttcatttgggggggggagaccaacccccccaattcgggggaccctacccctaagcccatccaattccccatccgggggttaaaaaaagaacatctgctgatctgat

SEQ ID NO: 7255 - DNA, 402 bp, Oryza sativa
  Clone ID: PAT_MRT4530_13867C.1
aaaaaccacacgaatccccgatggattaatttcactgaaaatagcccgggtccatcacatcacacaaattcatccgttgatccacgcatagtcgccgaagcgaccagttgtttaataaatcgataccccccgggtttaattcagcaataatcagcacacacacaaaccacacttatatggggggtttttatgggggactaataaaggaaggggactcgccggcggcaagggttcggttgcttcgggacttcacttgccgcacttgcagtcggtgcaggagcagttggtgccgaacttgcagccgccgttttcctcgcggggggggacctcctggaaggggtttttttgggtttaaactatgacgcccccaaagctggacccttttttcacgccctggctttt

SEQ ID NO: 7256 - DNA, 526 bp, Oryza sativa
  Clone ID: PAT_MRT4530_13868C.1
ccgacgcccacagatccgctgccgccgagctcttcgccgcttcccccgacggatccttcggcgatttggagacgacgtatgaggcggtcaggacgttccagatactcggggtggagaaggacaagggcttgattggtaaggcgtgcaagttcgccgccgagaagctggcctcctcgtcatcgtcgcccgcgaaggatctgttccacgcggcccggatcagcggcgtcctcaagtgcagtgttgattccggagtttacgatgatgtcgctacgaggcttaaggctgtgatcaaggacactaactcgctgctggaactctactattctgtgggagggttgctcagcatcaagataacacatttcacgcaattaaggcacttagccaaagtgacggaagatggcgttatgacactaacagcgctgaatcgagcacgtttgctgctggtatcgcactagaagcattgtctgcagttatttcactggcagattcggaagttgactcatccatgatagctgtggtgaaaaat

SEQ ID NO: 7257 - DNA, 2541 bp, Oryza sativa
  Clone ID: PAT_MRT4530_13869C.1
gcgcgctcccacgcacccagtctcctaaaccctacacaccctccccccctctcctctcgccggccgcgccacccgccgccgccgcggccatggccgccgccgggggtctcccagcctcggccaccctcctcctcctcgtcatcgccgccgtggccgtcgctcccctcgcctccgccgtccgcccggtttccgacgcccacagatccgctgccgccgagctcttcgccgcttcccccgacggatccttcggcgatttggagacgacgtatgaggcggtcaggacgttccagatactcggggtggagaaggacaagggcttgattggtaaggcgtgcaagttcgccgccgagaagctggcctcctcgtcatcgtcgcccgcgaaggatctgttccacgcggcccggatcagcggcgtcctcaagtgcagtgttgattccggagtttacgatgatgtcgctacgaggcttaaggctgtgatcaaggacactaactcgctgctggaactctactattctgtgggagggttgctcagcatcaaggaacaaggccacaatgttgttttacctgatgcagataacacatttcacgcaattaaggcacttagccaaagtgacggaagatggcgttatgacactaacagcgctgaatcgagcacgtttgctgctggtatcgcactagaagcattgtctgcagttatttcactggcagattcggaagttgactcatccatgatagctgtggtgaaaaatgacattgtgaagctatttgacacgatcaagagctatgatgatgggacattttactttgacgagaagcatgttgatgctgccgaatacaagggccctataacaacatctgcttcagtagtaaggggtgtcacctcttttgcagctgttgcttctgggaaattgaatatccctggtgagaaaatactgggtttggcgaagttttttcttggtatagggctaccaggtagcgcaaaggattgctttaaccagattgagtcattatcattcttggaaaacaatagggtatttgttcctctggtcctttcacttccttccaaagtattttcgctgacctccaaagaccagcttaaggttgaagtcaccacagtatttggatctgctgcacctcctctcagagtgaatcttgtacaagtgctgggctctgactctaaggtcatcactactgaaaccaaggaacttcagtttgaccttgataacaatgttcattacctggatattgctccattgaaaatagatgttgggaagtactcgcttgtttttgagatttctcttcaggaacaagaacatgaaactatttatgctactggagggacaaatactgaggcgatctttgtcacaggattgatcaaagttgataaggcagaaatcggaatttctgataatgatgctgggactgtggagtctgttcaaaagatagatctgcagaaagatactagtgtttctctttctgcaaaccatctgcagaagttgcggttatcttttcaactgagtacaccactcgggaagacgtttaaacctcaccaggtgttcctcaagttaaagcatgatgaaagcaaggttgagcatttatttgttgtaccaggctctgcaaggcagtttaaaattgttctagactttcttggtttggtggagaaattctactacctttctggaagatatgacctggagcttgcagttggtgatgctgcaatggagaattcatttctacgagcccttggccatattgaattggacctgcctgaggccccagaaaaagccccaaagcctccggcccaggctgttgatccattctcaaaatttggtccgaagaaggaaatatcgcacatattccgttcaccagagaagaggccacccaaggaactctcatttgcgtttacgggcctcacgcttctgcctattgttgggttcttgattgggcttatgcgtctcggggtaaacttgaagaacttcccgtccttgccagcacccgcagcatttgcctcacttttccatgctggaattggagcagtgctgctgctctacgttctcttctggattaagctggatcttttcacaaccctgaagtacctcagcttccttggtgtcttccttgtgtttgtgggccatagggctctatcttacctttcctccacgtcagcgaaacagaagactgcttgagaggacgatccaaagaggagtattccgaatcacaaaattttcaagcgtcacaagttgcttaggttccttattttagcaccttcgctttgatattctgaccatttttcttgagcaacttcgagttacgagggacgagtcgatttcagttttgtgggggttaagaatactggagctagaatgtaggacctcaccttcttgtatgatgatgccctgatgtgttctcaatagacgtatgtttgatgatagaattaataatatcttattctgcaaatgcatagtatgccttttgcaaaaaaaaaaaaccataaaaaaaaaaaaaaaaaaaaaacctaggctatgggtgcatgtgcatgtc

SEQ ID NO: 7258 - DNA, 474 bp, Oryza sativa
  Clone ID: PAT_MRT4530_1386C.1
atgcagcacacagtgcgtaggcgtagcagcgtcgccctccagcttgatcgatcggctacgtcacatgaactgacgcactgtgcattaggtggagcatcgtccaaccgggggagttacgtctttaccgcgcacggcgaatcacgtgtgcgcgggcgtacaaccgctacgcggccgcgcgcgaaacggcgatcgcgcgggcagctagcccgcacggcgttcatggcgaaaaacgtctcaaatcaagcccacgaatcgagtgcacggtgtgctcctcgccgtacgtcccgatactttagccgtgtttacccttttttcatcctgagaagggaattccacaggttcgcgtttcgagcaaatctttttcttgtcaaaggctgccatggagatgacaggtcctttatccaactagaacttgcggcgcgcttcgcggcgccctatcagctcatattcagtgatgtaaaaggagtaaattgc

SEQ ID NO: 7259 - DNA, 258 bp, Oryza sativa
  Clone ID: PAT_MRT4530_13870C.1
atggcccgcccaaggcccggtgattttggcccggccaggcacctctggtcgtgcctgtgctggcccggcccaacagccgtgccgtgcctaggtcactacctcaacacgctgggccggcacgacacgatgggccgtctgtgccttcgggctagcacggcacggcccgactattggtgggccgtgtctgggcttgaggtgcagcctgtgggcgggcacaccacggcccaatgtgttggtcaggccatgccggtccggtag

SEQ ID NO: 7260 - DNA, 150 bp, Oryza sativa
  Clone ID: PAT_MRT4530_13871C.1
atgggccacccgtgccttcgggctggcaccagtggcgatcctaggtacattttcccgggatcctcggaccccgggcccgatcgcctcgggctgtgcctgggtggggcgggccttattgccatctataccaccgagctttgctcccgctag

SEQ ID NO: 7261 - DNA, 411 bp, Oryza sativa
  Clone ID: PAT_MRT4530_13872C.1
ttttgttttttttttttttttttttttttttttttttttttttttttttttttttttttttttggaacaaaaaggccataggctgaatgctaaaaaccataccattttagcaacagggaaagacaatttggtttgggggtttttaaaaggggccttaaataagggaaacaggcgctttacagtttgcagcaaacatgagttcgggaattggtcaacataacatcaggcaaaagagcttaaaaaaggattgtttggggcaaatagttttattttcttgcaaacaacttgttttagcaaaactccaggcagacccagcagcaaattttaagcgttggcaaaaacctgggcggaagcatcccgcttcctttgctcctcgatgatgctgagcttgatgcccttgcccttgggcag

SEQ ID NO: 7262 - DNA, 564 bp, Oryza sativa
  Clone ID: PAT_MRT4530_13873C.1
atgaggcgtctgctcgtcccggtgctcctcctcatgctcggattgtctacctgcgagtcctccgtgttgcaggacacatgcaagtccgtcgccgccggccacaagtacgtcacctacaacgactgcatcaaggccttccaggccgacagcgccagcgccaccgcggccgacgcgcgcggcctcgccgccatcgcggccaggatcgcggagaaggccgccaacgccacgtccgcgcgcatcgccgcgctgagagccgcggagaaggacgcgaggaggaaggaccgcctcggcgtgtgcgcggaggtgtactcggacgccgtggaccagctcggggagaccgccgaggacatcgccaggggcggggacgaggccacccaggacgcggtgacgcagctcagcgcggcgctggacgcgccagggacgtgcgaggacgcgttcggcgaggccgacgacgcgtcgccgctggccccggaggacgccgagttcgcgaagctggcgaccatcgccctcgccgtcgctgcgtccctctcgccgccgccatcgacaccggcaaccatggattga

SEQ ID NO: 7263 - DNA, 150 bp, Oryza sativa
  Clone ID: PAT_MRT4530_13874C.1
atggctcggtcaaaccgccatcggctcgatctaaccgattgcggctcgggtttttcacctagaggccgaccaaccagcacagggtcggccggtcagaccgacaaggtctccatggtcattatccctcttgattgtaagacaaaggtataa

SEQ ID NO: 7264 - DNA, 304 bp, Oryza sativa
  Clone ID: PAT_MRT4530_13875C.1
gtgtgtggcgtatctgcatacgctcattgctacgtaaatgttcggtatacgtatcagtcgggcggatagtaaactttgcccattctcattacaacctcaagcagcatatgcggacaggattacactagcagaccatttgcagcgcacgagattaaccagggttgacgtcccaaccatgtagagttgctttgctagctcgatcatacttattcatcagcaagtgcagggtatatgctagcacacttaagcaacagtattataggagttgtttgctgtaagcgatcttgatgtagcttttttatgg

SEQ ID NO: 7265 - DNA, 480 bp, Oryza sativa
  unsure (1)..(480): unsure at all n locations
  Clone ID: PAT_MRT4530_13876C.1
cccacgcgtccgcttatccctatccgaagtacacgtggtcggcctgtcgacccgatgatcatgacactagagacacctcaccacagtttttagggaaaccctccctataattcatttgaaatatattctttgtcgcatatcagagtgatgagacaggctgctgttctttctgactatgaggttacagggaagatatgagaaagagtagttggggagagaatgggagaaagaagaaatgtcatatttgtttccacgcgccacttcacataagtgtctaaggccacatggatgccttgtcaaaccaacttttgatctatntgaaccaatatgtgttcatggactagttntcagtttatttgcatatttgaatcccacttgcaacttttcgaagtactgtatgatatcttctttcactcgttctttctcttatatcctctcacanatctgacttactggaactagttagatntgtgctatggc

SEQ ID NO: 7266 - DNA, 285 bp, Oryza sativa
  Clone ID: PAT_MRT4530_13877C.1
atggggaagcgcagggggaggcggaggaggtgctccgggaagcgccgcggcggcgatgcggatggaggcgggggcgggaagcggcggcgggagggggagagtgaggaggactactgcttcgcctgcaaggacggcggcctcctccgcttctgcgaccacaggcagatggatcgaactatcgcaatcttattgggatacatgtttgggttttcggaaaattttattggctatgcgtttacgtcttctatcatcttccaggaactgccacaaggcttaccatcctga

SEQ ID NO: 7267 - DNA, 553 bp, Oryza sativa
  Clone ID: PAT_MRT4530_13878C.1
acccggggatcagctatcaccatgaggcactccagcgttgcaccaccaaccgcactgagccgtcttcatttttttgttgttccgtcaccgcaaaaccttgtttggccgattcattaagtacggtttccagagcgtaaccctgggtgattttttgcagaaatccttccaccgaaaggggctgttgccagtactgtaaatctgtcaccaactcatattcctgaccattccagctaaaacctaggtcgtaatcattgctctgttcaatcaccactgcggctttggcggtcaaaccctggtagccccgcacggtggccggcccttctttccaatccagacccaagttggtgagggtgccttctaacacaataaggttaccaaacctggttttgatattgctaaagcgagacataggaaattacaaaaaaattataagaatggatgagacacggtcttaaaacttttaaacaaggattttcatacagagagaatttaactttccccaggccaagtagaaagagtctgggattgctgaactgattggttcaacggactg

SEQ ID NO: 7268 - DNA, 722 bp, Oryza sativa
  Clone ID: PAT_MRT4530_13879C.1
ccggccggggccgctgctcatctccttcctcccccaacgcgagtccaccgagacccacccctgcgacgccgccgcacaactcgagcggagcagtgcaggcgaaaccctactcgaagcccgcggcgagccaccgccacctccagatccgaccacaccgcgccgccgcagcgatggtgtacttcgattcgtgggacgagttcgtcagcaagtccgtcgagctcttccgcaaccaccccgacaccacccgctacgttgtcaagtaccggcactgcgaagggaagctcgtgctcaaggtcaccgacaaccacgagtgcttgaagtttaagacagatcaagctcaggatgcaaagaagatggaaaaactgaacaccattttttttactctcatgacccatgggacctgatgctgatataagtgatgtttcggggaaggaacaggcagaacaacagcaatcaaagaaaggccggggcaggaggcagtagtgtattgggtctgtcttgattttgttcaaagtaaatcataactgaagtggtggatggacattttggctctttgattgctctcgtaatgttctgaaggagatgtgagatattttgggattaattctcttgaaaagaactgagtaccttattacactgtggcctgatcagaaaaacaatcaaatcttcaacccctacttttgccgtaaaaaaaaaaaaaaaagcggccctcgagctccagc

SEQ ID NO: 7269 - DNA, 282 bp, Oryza sativa
  unsure (1)..(282): unsure at all n locations
  Clone ID: PAT_MRT4530_1387C.1
cggacgcgtgggtctagatcgcgagcgganactattnttgatatggttnatnttacaaatatggacgantgccaatgatgttctcataaaaatgacacagagcatatgctgcacgtgcaacctacatagaagaggtatcgggtaacttcagtttataacatatttatcaaggaagatatccggaggataaaatcatacaatcctggaataaggcacaaaaaaatcctttaatactggatgtaaaaattgggcgcatttcccaaacatccatttttgggttta

SEQ ID NO: 7270 - DNA, 294 bp, Oryza sativa
  Clone ID: PAT_MRT4530_13880C.1
atggcgcgccgtgacaaggcgttcggtgcgcacgggcgcgacgcgagctttggtagctggtggaaaaagtgcttcggcgcgaaggcaagggcggaggagagggcgcgtgtccgcgcgggggaaagtgttacctggcgaacacagcccgacgggctacggcttccggaagtagctgtagggtccagtgtttttgcttcccgaggtgtgctcttgattataataatactgcgtgtttggtggctcagccagcccaggccattcttggaaacttggagacgtggtgcaaacgggtaa

SEQ ID NO: 7271 - DNA, 2331 bp, Oryza sativa
  Clone ID: PAT_MRT4530_13881C.1
atggaatctggcagttcagaaggtatgaaagagaagcactgccgcaagaagaaaacggagaagcgttattgtggcgagaggattttgattttttttaaggatgcagagccaaccggtaatttacccgaggatgcacaatcaaccaacaatggtgaagcaaagaaaacagatgatttcatgagtcaagttgcttcatgtttaaatattatgcggggtcaacaacttatatgtgaagcagagtggatgtcgctcacgcagagtcgtgactgggcagcattccgtgtcccgacaccatttcaaaaattactagccaattgcaaggatgtccttgtaggtcatcaagatcaaccagggacacagccaagagggaggcctggcagcatgtgtctcttgaagccggttttatttaatgactccgggacttttgatgtgccacgtcatactgctacattggcacaacagttcattacctcaagaaccaagcgatggttggaagatcagccaatgcagttaaggctagaaatttctcccaatgacaagctaatgctatgggctcgtatgctaatggtgaatccgtacgaccgtacatatctcaagaaggccggcgtactccgaggcataatggcgtctatttacaaatgcaagatagatccttcattagtggccgcctttttaacttattggaatatggatggacacactttactcaccagccaaggagagatgggttatcctctccatacaatgtacgatgtcatgggcataccaatttcagggcgcctttatgaagaatttatccctttatcatccacagttcgtggacatgtgcagactctgcacaatatatatgttgaggagtgtcccctacaactgaatgagggtcctggaatagtaaccatcgcgacatgggtcaatcacttcttcggcgaccaccctgtgccttttcagtcatttttacccgatggttttgctgatccaaaagaacctttatatgagggcccaaattttcgtgttgagattcggaatggccgacccactggtatcatgtgcggtcttgaaatgacttacgtacacacctacccattggtggtgtaccgggcagcttttatcgccgcatggttatgcacatattgcgttccagtggaggaaggcaactttattcgccccgaggtttttactatggcagtggaaatcgctcaaggcagccgccaggccattggtgttacaagcatggcatttttatatcgtgccctggacaatgtctaccaccaagtagctgcacgtcaggcttctgcgagtgactgttcttcatttgtgccaggccattttattatgggctggtttgcatctttttggagaggggttcctacgtcagcaactttttcttgcccggtgatgaacccgccctttattatagacttcagagactatgagtctatggatattaagagcgcacatagcttattttgggattttaatgatgctggaacgactttacattcactggacttcttgggacagtctagcatccgttttcccacatccgaccaggaggtcgagttatttgatgactgttctcccaaggcacacagggcaatttccatggcagccgtggatttcttggaggagagcgctcaaaccaagatcaagacaacgtcgccattacccacctcgagtgcgaaccccacagagattgtgagggtagaacccgaccggtctggaaaagacatcgagaaaatcagagcatgcattgccaacccagacaatgtcacaactcatgtgtctgcccaagcctcacaacaggagttactattgttacctcctcgaaatgagactgcactcaactcgtcagtcatgacgcatatcgacccctacagtgaagggttggctattccacatgatgatataggcactctgcccacagatcttcttacaggcgatttttctgatctagccactcttttggaaggaggggcaaaccctgaaaccagtctctgtttagattcgcccatttttccaggtgctactcaaaaggacaacgttaattcgcatatctcagaggacgatgagacgcgtaccgaggcttgtgctgatacaggaaaagggggcacctctcatcacgcttcattgactggagttgaagagttgtccaatgaatccaagaagttatctatggatgttgagcaaatcgtcgcacaaattccaaaggcaccgaacgtagactctggtgcatgggaaaactcccagttcaaggaatttcatgggaacaacccggtgaccctgccgaaacttccagctgatgtttcagctcatggtcttaaacatatctag

SEQ ID NO: 7272 - DNA, 2892 bp, Oryza sativa
  Clone ID: PAT_MRT4530_13882C.1
atggaatctggcagttcagaaggttctcgtgacatgcgcacaggataccttaaaacaactgctcacaatgatgcagagccaaccggtaatttacccgaggatgcacaatcaaccaacaatggtgaagcaaagaaaacagatgatttcatgagtcaggttgcttcatgtttgaatattaagtggggtcaacaacttatacgtgaagcagagtggatgtcgctcacgcagagtcgtgactgggcagcattccgtgtcccgacaccatttcaaaaattacttgccaattgcaaggatgtccttgtaggtcatcaagatcaaccagggacacagccaagagggaggcctggcagcatgtgtctcttgaagccggttttatttaatgactccgggacttttgatgtgccacgtcatactgctacattggcacaaaagttcattacctcaagaaccaagcgatggttggaagatcagccaatgcagttaaggctagaaatttctcccaatgacaagctaatgctatgggctcgtatgctaatggtgaatccgtacgaccgtacatatctcaagaaggccggcgtactccgaggcataatggcgtctatttataaatgcaagatagatccttcattagtggccgcctttttaacttattggaatgtggatggacacactttagtcaccagccagggagagatgggttatcctctccatacaatgtacgatgccatgggcataccaatttcagggcgcctttatgaagaatttatccctttaccatccacagctcgtgggcatgtgcagactctgcacaatatatatgttgaggagtgtcccctacaactaaatgagggtcctggaatagtaaccatcgcgacatgggtcaatcacttcttcggcgaccaccctgtgccttttcagtcatttttacccaatggttttgctgatccaaaaaaacctttatatgagggcccaaattttcgtgttgagattcggaatggccgacccactgctatcatgtgtggtctcgaaatgacttacgtacacacctacccattggtggtgtaccgggcagcttttatcgccgcatggttatgcacatattgcgttccagtggaggaaggcaactttattcgccccgaggtttttactatggcaatggaaatcgctcaaggcagccgctgggccattggtgttacaagcatggcatttttatatcgtgccctggacaatgtctaccaccaaagggttcctacgtcggcaactttatcttgcccggtgatgaacccgccctttattatagacttcagagactatgagtctatggatattaagagcgcacatagcttattttgggattttaatgatgctggaacggctttacgttcactggacttcttgggacggtccagcatccgttttcccacatccgaccaggaggtcgagttatttgatgaccgttctcccaaggcacacagggcaatttccatggcagccgtggatttcttggtcagctgcactgttggcggcgtcacctataggagaggaggttcaggaggtagggtgggcacacctaagcaaagaacagccaagtctgtctcgatctctcctgagcaccaggaggagagcgctcaaaccgagatcaagacaacgttgccattacccgcctcgagtgcgaaccctacagagattgtgagggtaggacccgaccggtctggaaaagacatcaagaaaatcagaacatgcattgccaacccagacaatgtcacaactcatgtgtctgcccaagcctcacaacaggagttattagtgttacctcctcgaaatgagactgtactcaactcgtcagccatgacgcatatcgacccctacagtgaagggttggctattccacatgatgatataggcactctgcccacagatcttcttacaggcgatttttctgatctagccactcttttggatggaggggcaaaccctgaaaccagtctctgtttagattcgcccatttttccgggtgctactcagaaggacaacgttaattcgcatctcctagaggacgacgagacgcgtaccgaggcttgtgctgatacagtaaaagggggcacctctcatcacgcttcactgactggagttgaagagttgtccaatgaatccaagaagttatctatggatgttgagcaaatcgtcgcacaaattctaaaggcaccgaacgtagaccctgatgatgtttcagctcgtggtcttaaacatgtctggtctgagatcaaagcgtttcaagaattactcaaacaacgcccgatacagaaggatattgtgcttaaagagataagcatcaatctggatttgtggagtaacttcttctcaaaaccacctcctgaaataattaggctaatggaagggttacgtgtgcaaaagggagcgctatcagaggaagcgccactgccaaccactaagattgaccatcatattgatatgctccgcactgctcaagacaaggtggagtcatcgtgcgtcgctttggcagcactaacgagtcaatataacgtagaacgggctgtagaagaaggcaataagagggagtgctctcgacaagcccagaaaatcaaagcagagatagcaatgttgcaagcaaaacttcaacaggtggaagatgattattcccgtgctcaatgccaccaagatgttgtaatagagaacttgaactcccatcttgagcgacatcgacaagctaaggatcgaggatatgagattgcggcacagttagagcaggcgagcgtacaccaaaagtctctccaaaatattgaagactttactaagccagacgagtttggtctgtcccaatatgtctacaatatatttgattttttcataggctgctcattagatgagtag

SEQ ID NO: 7273 - DNA, 160 bp, Oryza sativa
  Clone ID: PAT_MRT4530_13883C.1
atggggagggaggagacacaagagtggtggtcgttggaggggaggctgacctgcttgctccgtgagcccgtgacgcgcccgtccatccgaaccaacggcgcggcgcgcctccgcctcctcagcgtgtcgctctcgcccatgcgcccggtggctcggtacg

SEQ ID NO: 7274 - DNA, 2211 bp, Oryza sativa
  Clone ID: PAT_MRT4530_13884C.1
atgccgacgtggtggaagcgctccaagtcggcgttccagcgctcctccgccgtctcctccgccccggcctcgccggcgagggcctccacctcgtcgtgcgcggcgcccggccgccgcagcgccgccggcaggtgcgccgatgacgccgggggcctcctcctcgcgcggcgcaggcagctcacgcggcagcggaagctgcgccacgtcgacgacatcggcgtcgggctcgagagcctcggcctcgtcgtcgcgaactcctcgcctccccccagaggccgcgcctccacgtccgcggccgtcggccaccccgtctcgatcccgatcgcgaggtccgcgagctccgccgagttcagagccgtgcaccagccgccgccgagggccgccacggcggcgtcgcccgtgctgctcccgctgccgctgccgtctcccaagccggtggaatcggacacgtcggagccggatgttggtggcgagagggcgacgagggtgacaagccagattgttcaaaattttcctgataataataataatcttcctgacaatagttcaaagcgtactaccacctctagtcaccacaggaaggtgttccgagagaagttccaagataagagttcaactgaaactgccaactttcggttgaacattcctgctaaaagtgctccaagcagtgggttttcaagccccgtgtgcagccctcgaagattcagcaatgccgaatatacgacaccaactgctcaaggtccccaagcgtggtccgctccatctgtccgctcggtagattctatggcaacttcatctccgcggatttcacctgaaatatatacaggggttacagagcaatcaactttttctaactcattgagaagtcctattctaatgtcgaagaattccagtgcccctccatcacctctgcacccaaaattattcccagaaaataatatgtcacgtattgaaggcaatgggaatgtcagtttccacccattaccacgccctcctggagctataaactcaatgcagacaagcattgttaaccagtctgctccaaaagttgaaatgccctcagtggctggtcagtggcaaaagggaagactcctcggtagcggcacatttggctgtgtatatgaagctaccaatcggcaaactggagctctttgtgcaatgaaagaagtcaacataattcctgatgatgcgaaatctgccgagtctttgaagcagttagagcaggaaataaagttcctaagccaattcaagcacgaaaacatagtgcagtattatggaagtgacacttttgaagatcgcttctacatttacctggaatatgttcacccaggttcaattaataagtatgtcaaacaacattatggagcaatgacggaatcagttgtccgcaacttcacccgccatattcttaggggtttagcgtttttgcatggccaaaagattatgcatagggatatcaaaggagcaaacctgctagttgatgttagtggtgtagtcaaattagctgactttggaatggccaagcatttaagtactgcagcccccaatctttcactgaagggaacaccatactggatggccccagagatggttcaggctacacttaataaagatgtgggttatgatcttgctgttgatatctggagtcttggttgtaccattatcgagatgtttaatggaaaacctccctggagtgatcttgaagggcctgctgcaatgtttagagttttgcataaagacccaccaattcctgacaatttatctcatgagggcaaagattttctgcaattctgtttcaagaggaatccagcagagagaccaactgcaagtgagctgttggagcatccatttatccggaattcaagtcattacaacaaacatggttccatacattcatttgcggggattaaatccaatgataataataatggaaatggttcaagagacaaagcagcctcgaagagtgattcctgcgtgaaaggaaaaattactgtaggtgagccaaccaatgctaggccttccgaatcgtcagcttttcgattgactccactatcaatccaggaagttgcacctaacttctcctctagacccttaggtctaacctccaatcctagtccatcagccaatttagtgaacactgtatattttccgattgcaaactctcagcgtagtcctttgccaagacctaatgaaaaggaggctctgttctaa

SEQ ID NO: 7275 - DNA, 437 bp, Oryza sativa
  Clone ID: PAT_MRT4530_13885C.1
ttggggtttttttttttttttgggctgttctttgtttttgttctttttttattatcttatttttattaaagcatgttgttttattcttaaaacaagcaagaccagacgagcaaaacccaacatacgggcccgcagccaaaaggacaaaaaatccataggggagaaaaacgaaataatgaacaaggcgcaggaacggacccatgaaagcaagaccaaaaaccaagctgggctccaacggcttggcaccccaggcgccggggataccattatcatgcgaaccaggtgccgaaggaatgccgacccaggagcatgcgaaagtgagcccgagaacagcgctccaagaacggcccccaccccgggacaccatgctgggtcacactgaggctgggcaacctgaagccaccatgccggaaatgtgcaagccagtaggccctcaa

SEQ ID NO: 7276 - DNA, 342 bp, Oryza sativa
  Clone ID: PAT_MRT4530_13886C.1
ccacgcgatagcggccgggaggcggctcgccgatgtgcggtggccggcgtcggtggcagcggagcatccgctacaaacgagggaggtcgggcggagcttgcagcggagggagggagggaggaggcgccatcgtcgcgcggtggaggggcagcgccagcggggcatggagagtcgctcgatttcggaggggattctgggagggggattgaggggaggagggggaagatcgcagaagctatcgtcggcgcctcgacgggagaggggaagacgaaggggattgaacggacgccgcggcgacgacagcgacgcttcacggcctcacgggtgacccaagcggcaaac

SEQ ID NO: 7277 - DNA, 372 bp, Oryza sativa
  Clone ID: PAT_MRT4530_13887C.1
atggcgaagacgtcgcgcgcgcgcctcgatccccgcccggtgctgcgcgaggtggcgccccaccgtggcttcccgcggcgcggtagtagagataggcgacgtcgtgtctgcggtgaggttgtcggcacatcctcctcatctgttgggctgccgcatcctcctactcctcatggcattgccgtccgcttggtgctcctactccggttcaacaagggtctctcagccccagcccacagggagcaggatgacaagacattcgcgtcatggttcattgcttcagcaaagctgcaaagctggttcctgagggaaattggtatccgctcacaaaatcacacaacatacgagccggaagcattaagtgtaaagcctggg

SEQ ID NO: 7278 - DNA, 550 bp, Oryza sativa
  Clone ID: PAT_MRT4530_13888C.1
gcacgaggcaaatctttaatttggaatatgcacgtatgcaaatgcaatgggatttattgtttcggtgtaaattgaagtgatttgaacaagttgcaggtaactgagacaaaagacgtctattcttataacaatctttagttaggatatcagtcagtacgaaggtgtggtttgttctaaagatgtgcttcagagtaaaagttaggatgcatgaatagagtcaacgaacaattatggataagctgcgtaaccaattcttgggagcagacacctctatgcctacttggcatccgaaatgccaggccctgtttcaacatctaggtagagtctttcttaaggttgattaattatcgtatttatttaactttttaattgttgtattttccaatagtgatggtaagtaacggttttctggtatgttctgtcatgcaatttgacttttttctatattgaccatgaggttcatatgatgttttatgggccttgcctcaatttaatgtgcgatgtttttctaaggcagcttatttggctcctctgagatggacatcacaag

SEQ ID NO: 7279 - DNA, 525 bp, Oryza sativa
  Clone ID: PAT_MRT4530_13889C.1
atgggagggcgtcgcgctggggggagggtgccgccaccgccgccgctcgttgggggggagggcgcaccgccgctgctgccgctgctcgatacgggggaggcgtcgccgccgccgctcgcggggggagggcgccgccaccgctcgccgtgggggaagggcagcgttgccgccgccgccgctcgccgtgggggaaggtggcgccaccgccacaccccgccgcaccctgccgtcgtcgcgccgtgccggcgagaagggagggacagcgccggtggtgggagagacgacgctagtggcgggagagtcggccggctggggggaggggaagaggcgccggtggggagagggagagggggagggggagaggcggcgtcgggggtaggggaggaagaggcggcgtcaggggcgggggaggaggaggcggctggctcggctggggggagggcggcggcgagaggggcgccggagtcggcgggaatctgggtgtgcgccgagagggagaagagagattgtgagcggagcggatga

SEQ ID NO: 7280 - DNA, 624 bp, Oryza sativa
  Clone ID: PAT_MRT4530_1388C.1
ccacgccgtccgaaagaggcagtgagagctttcagtttgttcagaaccttttcctctctggcatgggttcatttgcatcacctaaaaacttacttcatattcatcggtactctgcagaggatgtcacagcacaatgtagacttgagtcttttgcaagacagatgaggttgacgagaaagaaaattggttatgctgatgtgagatatggatggcttggatctaggaagcaagacatagttggagttttgattaatggttttattagcactggacaaacaagtcacagttctgatatgcgtactggtgtgtatctctcgcctgaaaaccgtgcatttaccagtgttggtctctgtgatgttgatgaaaaaggagttcagtacatgttgctgtgccgagcaatattgggcaacatgggaactataaaaccaggatcacaggatgagtttctaagcatatatgattctggtgttgacaattgctccaatccaagctattatgtgatttggccatcaaagctaggcactcatatttctctggaatatctcattagttttaggctcacaccagaaattcaagactacttgcttcacttgaagggtttatgggttgtgcccaccaccaaaa

SEQ ID NO: 7281 - DNA, 894 bp, Oryza sativa
  Clone ID: PAT_MRT4530_13890C.1
atggacgatggatgcaaccgggagtacgtacacctgggagacatggtgcccaggctccaaggcggggataggcggctgcgaggtaacgtgctacacaacaccgccccaaaacattttcccctgttggacggcgacttgggcgctccatcgactgctggatggcaccatgtggttgaggcccgtggcaccgtcggctgcccctctgtcgccgacatccatcccatcgccggatctaggagagcttcgcccgaatcctcttctgattcttgcgtgtcggtggtgggtggagagcagcggtaccaacgacatttgaagcacagagggtggcaggattcggagaggaggctgcggatctgggggtccgatgggtcgttctccctcctccctaaagcggtggcgaaggatgtcagtaaattgtcgttggcgtcatgcgcggcagcggttgtagtcaattgaaatctatttcaggagcacaatgtaccccggtggactcgaagatgatgaaatgcatcatgcggtgacctgggaaaaattgtcactagcgccggagcggccatgcttgatcctgggctgcccatcctgatcctaaagttaccgcgacacagacctgtgttctaaactctaagctggttggttggcgagccagccgcctccactacaacattcgtccatcaaagacgatggatcccgcggtgaagaggaggatctgctgatctgaatttctttgatgatttttgttggagtgtttatatcctttgtaacttttttacttttgagtttaagcatgtaatttgtttattgtatagtgtgtccagtggcgaacccagaacaaaaattactggggtccaatatatactaattatctaattattaactaataaaaaaaaaaaaaaa

SEQ ID NO: 7282 - DNA, 295 bp, Oryza sativa
  Clone ID: PAT_MRT4530_13891C.1
ttttttttttttttttttttttattatttttttttttttttttgggtttttttttttttttgtttttaaccacccaaaggaaaaactgcctggtttaattttttttgttaggaaaacacaaaccctaaccggacaccgggaaggcaacccaaattgtcttaaaaattccacgttgacggcaaaaaaaaaaatttaatgcggggaacaaagagataattgggggggctacaggctcttaaatttcattttaaaagggaggagccccctaagtaggaagaaacttaacgcgtactgg

SEQ ID NO: 7283 - DNA, 931 bp, Oryza sativa
  Clone ID: PAT_MRT4530_13892C.1
atggctagatccactggcaaggagggcggcgccagcgcaacgacaataggaggaggacaccaagaatcacggcacgagcaccctggggcgcactggaaacgccacgagcaacgcaaagaaacccccggcgccgccgaatcagcacaacatccagcaccaccaccgccgccttcttctggccctgaagcggcggccagcggagaccttgctcggatgatcgcgctgcacgggtacgacccgtcgctcgtcgaggacgactacttcagaagcttcttgcgccgcctcaaccccaatttcgaggtgccctcgcgccttgccattgaggagatgtgcgatgctatattcgacgaaacaaggaaggacatcttctccaggctatacgacttccctagtaaggatcaaaaagcacgggcaagtggagagaatgcaatttcttacaatgaatctaatggctttcctggcgccaaagatggcaactatgttgcagacgttcttggagaagcaatggtcgctatagagaaggctatacaagattcctacccggtctggtctataccacttgtacttgatcctcggtacaaactcgcacgcacaaaatttattttccaaacagccttcggcaccgaggctgcagccgattatatctctaaggtaacacaaaatatcactaagctatactctgactatgttgaagatcatggtagtgccatgaatgtggtggccgttagcagcactgatccactgcaacaagcatgggatgagcactgccgaggagaagcccaaacagacctcgaccgttatctgaaggatgagctagtccatgatccaacatcaggttttgatattctcaactggtggaaggttcacgggtcggttctctatccaacggtggctttaatggcgggggatgctttggctatgcccacatgca

SEQ ID NO: 7284 - DNA, 390 bp, Oryza sativa
  Clone ID: PAT_MRT4530_13893C.1
ccgacctttccagtttacaaactacacaaaacaagggggcgggccttttaaaagaacccaattttggctcccctcccctcgaaaaacctttttttattttggggcccccaaaattaaattcccggcccgctttttaaaaccgggggaatgggaaaaccccttggataacccaattaaacctcctggagcaaaatccccttttcccattttgtacaaatagaaaaaaggcccccaccggtcccctttccaaaaaatggccccccctaaagggaaaagggacccccccctttaggggcctataaagcccggggggtggggggtttccccccaagggacccgttatatttgccaggccccaaggccccggtcttttggttttttccctttctt

SEQ ID NO: 7285 - DNA, 1737 bp, Oryza sativa
  Clone ID: PAT_MRT4530_13894C.1
atggcagaggcgagcagtagcacccaccggcgtcgatcgcaagctcagatcagcaagatagccccgcgacaccaagaatcacggcacgagcaccctggggcgcactggaaacgccacgagcaacgcaaagaaacccccggcgccgccgaatcagcacaacatccagcaccaccaccgccgccttcttctggccctgaagcggcggccagcggagaccttgctcggatgatcgcgctgcacgggtacgacccgtcgctcgtcgaggacgactacttcagaagcttcttgcgccgcctcaaccccaatttcgaggtgccctcgcgccttgccattgaggagatgtgcgatgctatattcgacgaaacaaggaaggacatcttctccaggctatacgacttccctagtaaggtcagtatcgcggtgggtacggtcagaaccatccaagggaatgtgctgtatatggcgtgccacttcatcgatgatgaatggaatcttcacaaggtaatcatggatgcttacgtgattgttccttttcttgactaccatggcccgttgttgggagttgatgaagtttgtctcgatccggatatccgtgaatttgcaattaagaaagttatggttcgtttttcaaacgatgaggttttaaataatctgttcatgatggtatgggaaacaaaggacaacgatattaaccttgaacatgaactgaggaatgaaatagagaaaaaccaaaactataccaatccaaataggagagagctaatttgtaccacctacatggacagtgtgattcactcgattgctagactgcttattgtgcatcaaggattcaaagatgatattatctctaacttgctgcatttagatttgactagacaagagcgccatcagcttctttcacaacttggtctagattatcacctatgggcatacgatgaaaaatggtactcggaatactgttcgttggaatgtttgaagaactatcgtatatgctttggagagaaatataccgttccattcaaaggatttctgcccccgattgtcacacttcatcaaatctgtctcatagaattatttaagctgagggaagtttttaaggatcaaaaagcacgggcaagtggagagaatgcaatttcttacaatgaatctaatggctttcctggcgccaaagatggcaactatgttgcagacgttcttggagaagcaatggtcgctatagagaaggctatacaagattcctacccggtctggtctataccacttgtacttgatcctcggtacaaactcgcacgcacaaaatttattttccaaacagccttcggcaccgaggctgcagccgattatatctctaaggtaacacaaaatatcactaagctatactctgactatgttgaagatcatggtagtgccatgaatgtggtggccgttagcagcactgatccactgcaacaagcatgggatgagcactgccgaggagaagcccaaacagacctcgaccgttatctgaaggatgagctagtccatgatccaacatcaggttttgatattctcaactggtggaaggttcacgggtcggttctctatccaacggtggctttaatggcgggggatgctttggctatgcccacatgcacgccaaactctgtctctctcatgtttcttcagtttactgttcaagttcaacaatcttcagagaattctctgctgttctctaccgaaagtccaaaaaccgagtga

SEQ ID NO: 7286 - DNA, 243 bp, Oryza sativa
  Clone ID: PAT_MRT4530_13895C.1
atggccggttcatgggtgcgcaccatcacgtcgccgttccgcaaggtgttcggcgcgcagccgcacaaggacggcggcaagcggccgcagcagccaaactccgggatgatggtgcagcacgtcgtggtggacgccgagagatcgaagctgcacggcgaggtgatggcgtgcgcgtacgaggacgttcaggtgatgtgggatatgctggacaaggccaggatccgtgagttcaatagcagctag

SEQ ID NO: 7287 - DNA, 726 bp, Oryza sativa
  unsure (1)..(726): unsure at all n locations
  Clone ID: PAT_MRT4530_13896C.1
ttttttttttttttttgctgggttttttttttttttttgtttaatgatcatgaaaatcatcatgttagtttgcctagaagagctaaaatacattatacacacaaatttcaacatccttgtttctaaactctgatggacacgaatatatcgagtccccgaaatctgggtctaagatatggccgccagtaacaccaaaagatgtatcgcttgatgcgtacaaaatatgtttctcaagaaacaaactataaacgaagtatccaagatttccttgaacgcagcaagtaacggattggagtccacactggacgaggactcctatctagtagaccgaagcataagacttctaagtagcagtagcatcagcgtcctctgtagatttcttgtattcaggcttaagttcatgcgtcccttgatttggaccccttttgttgtagaaacacagatcattcaatatctccttcaagaattgctctggttgatcagtttcttgcatgagattcttaagagaccaattcggctgcctctcaaaaagcttgaataaagatattttccagttccctgcgatcccttctcgttcttttcatgtctgatggttttactggtagtggcttcttctccttttttggaccagaagacatcagacccaccaanccaggcaacgggctcatgctcattncatggcattcgcaagtccatcaatttctatttttaatcataggattttga

SEQ ID NO: 7288 - DNA, 265 bp, Oryza sativa
  Clone ID: PAT_MRT4530_13897C.1
gttggcttctcctccccctctttaccttttcctcctcggttcggttccgtggttcgtctagggtttagtgggttgagatggcggcgcccgatgtccagtaccgctgcttcctcatgcgaccctcaaggggcccagcgcgacacatggatacctgcattggccttacacttgggctggtcgctagtgttctgtgccagatgcattactggaaccagcagaggaagactatatccttctacgacatgctcatgaagggcacatatca

SEQ ID NO: 7289 - DNA, 457 bp, Oryza sativa
  Clone ID: PAT_MRT4530_13898C.1
cgctcgcgtacacgctcaggctcacggcgagcatctggcccgagcagccgctttcacagccgctgcctcacgagctgctggacagggacgtgtatggtcatgactatcgggctcagctgcaagctaagatgcaccctatgactcccgctctggctgtggctttactgcttaccttataacctgggcttatctagaggccatttaagataccgtatcaggtctggcataacgtcagacggtggattcagaggaggttaaggaagatgttatatataaagaggtacatgaaatggtgcccgatatgttgaccgatctgctgacctatctacttaccaagcctgcgttctagctaggggtgtatctaactcggagtatagccaatggtatggggaacttctttcacaactgtgatcatgagaggaatggatccagaaactgatacatgaactgacttctg

SEQ ID NO: 7290 - DNA, 273 bp, Oryza sativa
  Clone ID: PAT_MRT4530_13899C.1
atgtccttcaatgccaccgcggccgccaacgctcccaccgtcaccgccaacgctgggaccgcgggagccgggaatccgggaggccgccgggcgacggccggacgtgggacggagagggcgcggccagccggccaggggtggagtcgcggagagggcgaggccgtgctggtgccagcacggcgcgcgaaggtagcggcgctgccgccacggctgccggatgggcacgcgcgcctggcgggagccggccagccgggaggctaccagactgactga

SEQ ID NO: 7291 - DNA, 287 bp, Oryza sativa
  Clone ID: PAT_MRT4530_1389C.1
ggccgcccctttttttttttttttttctttctttttttttttttttttttttttttttttttttttttttttttttttttttttttttttttttttggggaaaaagggggggtttttcccctttagccgaaagacgggcccgtttttacccccaaaacaatggccggccatttatttatttgggtgtgctttatccccaagcccccccaagggggttccccccccttataaccgccttggtcgcccttggctggggctgggggggtcgccccgaacctctcccctct

SEQ ID NO: 7292 - DNA, 3150 bp, Oryza sativa
  Clone ID: PAT_MRT4530_138C.1
atggccgccgccaacgacggcgcggacgcagccgctgtcgccgccgaggacggtcttggaggcggtaagcgttattacatgccagtgtaccatattgatatatacatactggtgaaatcagaatttatggtggcattggacactgcagagaagcaagttcaggagtatcgagccacacttgatgatatggaggaacgattatccaagagtgaggatgagagggcaacatgccaggacaaactgaattatgtcgagcaagaattggcagcaacaaaaggtcgggaaagtgcaatgcaagagcgattattaaaggaggtgggtgactttcaggaacgctactgtgatcaaatcaagaagataggggaacttgagacgcagctgaaaaaagagattgattctcgaattgctgctgaatcatcgtcagcatccgcaaaggagtcagtcaaggagttggaggggaatttgcagcgtttatctgaaaattcagaaagggagaagaaagcccttaagaagaagctttcatacttgcaagacgacacaaaattatccatttctaaactaaatgcggagcttgaaagaatgagactcagggcgctaaactctgaggacgaagcaaagttgctgaatgaacagttggggggcttaaaaaagcaactagatgagagtgttcgtgaaaataatgagatggagcacaggctattgaattgcagttctttatcttatgaacgtactccatcagacgatcagaagttgataaagcttttgcaagaggagctccggaattatgaaaaagaagttgatgaagctagaaggttgaagtcttcccacacaaatgttgagttacttaaagaaaaaatattggaggaacaggggtgcagggagagagcagaaatggaattatctaagctgcaggaaattgaagctaaagcacagaagttggagcttgaattagcatcatgcacagcattgctcagcaacatacctgatgtatcttcttttggtgatatacctcaaaagatcgcagatttgcagaagcaagcattgacaaatttaaataaagttggtgaggtaacatcacagttgaaagaattaaaggttgcattggaatttgctgatcttagcaagcaacgggcagaaggtgaagcaacccttgccaaagagagggctgaaagtgctactagggagatcaagcggcttgaacttctgcttgctgccatcagtgaagaaagggatagattaagaaaggaccatgctgtgtcgaaatctagggatggagatgatgcatcatccaaggtgacaatccagaatatggaatcggatctatctcgaatggaaaaggtagtaacagaactggagagcactatacgtgaccagagagaactaattagtcaacagcacactgagctcaatttgatgaatgaaaaattgagcattgaatcaagaaaagcaaaatcattggagcgagatggagatcaactacgctcacaggtggctttacttgagtcaaagctgggccatggagattactctgcctctagcacaaaagtactgcgtatggtaaatactcttgcagtggacaatgaagcaaagcagactatagaggcattgcaagctgaattgaagaaaacgaaagagaggctacaagcagttgaagaactaaaaggacaagctgatgttggaactgtggttgatgtgaatattgctgaaaagctagcacagcttaaaaatcaaattgcaaccctagagaaacgtgaagaaagatataaggcagtatttgcagagaggatctcagttttccgaaaggcttgctgctcgctctttggttataagatagtgatgaatgatcagcaacagtcaaatgggatccctgtaacacgttttattctgcattctgtttacgcccaaagtgatgatgagaagcttgagtttgactacgaatctggaagcaccaatattgtggtcaatgactacacttctcaacatgaaattgctcagcagacactgtcgacgtcggagcggcagccgcagccggagaagaagccgccacggacgaggccgccgctgccaggcaaggccgtggccgcgctgtgcgtggcgagctttgtcgtgggcttgctgctcagcggccgggtggtggtgccgttgctacctccgggctcgtcgtcgccggcgagcaactacaagacgtccttctctactggctgcgagaacaaacgcgctaagctaggcgagagcaatccaacggacatcatgaacgaggtgtccaggactcaccacgcaatccagtccctggacaaggcggtgtcttctctggagatggagctcgccgtggagcgcgctcggagcagcgccgccgtcggcgccggcacggccgtctcatccctgggcccacagaaggccttcgtcgtgatcggcatcaacaccgccttcagcagcaagaagcgccgcgactccctccgcgacacctgggtccctagaggggataagctgaggaggctggagaaggagaaaggggatcgtgatccggacgccgagaacaaggacttcctgcggctggatcacgtggagggctaccacgagctgtcctccaagaccagggtctacttcaccaccgccgtcgccacctgggacgccgacttctacgtcaaggtcgacgacgacgtccacgtcaacctcgggatgctgacgagcaggctggccaagtacaggacacgaccgagggtgtacgtcggctgcatgaagtccggacctgttctgtcgcagaagggagtgaagtaccacgagccggagtactggaagttcggggacgaggggaacaagtacttccgccacgccaccggccaaatctacgccgtttccaaggatctcgccgcctacatctccatcaaccagccgatcctgcacaggttcgcaaacgaggacgtctccctcggcgcgtggctgatcgggctcgaggtcgagcacgtcgacgaccgcagcatgtgctgcgccacgccgccagattgcgagtggaagaagcgagctgggaacgtgtgcgtggcgtcgttcgattggtcgtgcagtggggtctgcaagtcagtggacaggatgaagcacatccacagggcctgcggcgaaggccagggagcagtctggagcgtcgctacgtga

SEQ ID NO: 7293 - DNA, 1012 bp, Oryza sativa
  Clone ID: PAT_MRT4530_13900C.1
ggattcaaatgcatcgacatacatattcattcgattaatcaatttgacaacaatatggtatcaaacaatagcaatacaaatatcataaacagctacaactgagatcgaattgaacactacttcctacaagtacaggcttagaaaccaaaagccgttcaaccagacataagtttagatgaacggcatcgcaagcagtccaaaaaaagggacttactaggcaaatttcaatgtatctcttttgcatcctgggaatactacttcactctaaaatggcatggtactattgctctaagccatgatgtcaaacccctgtctggaccttcagctatattgtgcttcctagttttccaagcaattagcgattgcttaactcaactagtgaagtagagatgactgcggcatcaggacataaatgatcttttgaaatgattgcataaacagtccaatatgcagattttcatagcaccagtttctcaggtatgagtgtgatgggtgagcactgagtaggccgcaacaccaaaatcatagttcactgcaaaagacaagcaatcaagcagcggctgccagaagggaggacgtcgagaggccgggccagcagtgcgcacgagcagtgactgggattctccagttccagagggtggcgctggtcagctggcgttcggatctgaagcgtgagagccggctattggtggcgattcctggtggagccccagacgcagccttcacgggcgtcggccgctcgcctggccgccacccgcctggttgcaggctcctccgcgcctttccgtccatcgctcatgggcacggcgcagccgctgtgcgcgcccgcgattcgcgacgccgcctacctcacaccctcagcccgccagccagcaagccgccaacgcgcctaacgccgtcggccgtcgcctgagccgaagtcggcgcatccagatctagcggcggtcgcagggggagagtgaagataggcgcgaggagcccgcggcccggggatccactagtttagagcgcc

SEQ ID NO: 7294 - DNA, 555 bp, Oryza sativa
  Clone ID: PAT_MRT4530_13901C.1
atggagataaaaccgaagcggaatccaagagataagtttgggcaaaagtctgccgcaaagacttatggtatcttagagtttgttagagataagagtcgtgtacgacaagaacatagtttgtatctcgggatcaaatcaactagcacgctcacgaacctaaaggatgccctcccggacatagactcgggccccacgtgcggggccatcctggaggccctcgtcggggtgggaggcgaccgtgggagcggcgccgacgaggtcatggtggtcggcggcggagtcggaggctgcggggacgaggaggatagggttctggtggtcggggaggagcgggacgagaagcttggttctcacaatggctacgtcgaggggatcagggaaggaatcgctggttcggatcgcgcaaaaggcaatggagaagaggggaagaagatggaggtggtggtggttgctgtggagaagacgatcttggtggaagatttctcgtgtgatctacccgacgacaaccacctcttgcattgcaaaacgttagtgcccgcaatatcagtttgttag

SEQ ID NO: 7295 - DNA, 1942 bp, Oryza sativa
  Clone ID: PAT_MRT4530_13902C.1
ctactgcagccgcgtccccctccccacgtgcggcacgagcgtcgcctcgcctcgtccctgcaaggtgcatcgtcctagcgtcgccccggccccgaccacggcaaagtcgaaggcaccgccgacacggccagccacccggctggctgggcctcctccccgccatgggcgccgcgcgtctgattgattaagcgaggacctcgcattgcacctggtgagtcggctcttcgcttcttgcgcggtagtgcccgcgtcgcccgccacctgttcgacggaatgtctcctaagcaaaagagcttgaggagcaagagaatggctgaggccagcgaagaggacgggatcgacgtcctcccggatgctctcctccagcacattctgtccttcctgccggccgaggatgccgtgaagacctgtgtcctgtcccggcgctggcgccatctctggaaattgacgcccatcctgtgcatcaccaatacagagagatggaggagccccaaggacttcatcaagcttgtcaaccatctagtgctcttccgtggcagctcgcctctacacaagtttgagatcaaaatcaattcatgtgcacactggatgataatgtccggcgacagtaatccattccattgtgccatcatgtgggtcatgtatgctctaatgtgccaagtccaggtgcttacaataaaaaatatgcatgcatacattgaaatggacgatggcttctcactcttctcgaggcacttgacagagctcaatctttctggtctggatttcagaaaatttgtcctcaacttctccagctgtcctgcattggaatatatatatttctctgcgagttgctgttttaattctgtcgagaagatcttgtcccagtcagtaaaatatcttacattcgacttccctgaattcagtgaacatcaccgcactcacatttatgcaccaaacctcattacgctccgtcttgatgattgttggggcagagttccatttctggaaagcatgccgtcattaattgcagcatttgtcagaccccaccgagatagtgatgacttgtgtagtaatacttactctggtaactgtgaagatgaatactgtcatggttgttatggtatggtagataatgctggcaatgacagtgccaaatgcgtgctccttggaggtttatcagaagctaagaagttggaattgatagctggacctgaaatgcgtattttcagaagtgatttaagatggtgccctttgtttagcaagttgaagtctttgttactcaatgagtggtgtgttgctaataatttctgggcactagcttgtattctcgaacactcaccggttctactgaaactcactcttcaaatttccaaggaaacaaaacctatgataggggcagtagaaaattacagtgcattggtgaaaccagctgcaatatccaaacatcttaaggtagtgaaagtccactgtaaagaagttgatgaaggggtctgtgaaactgtgaagttcttgagtacattggatgtagtggttcttatcagaaggatggatcggtcgacaaatcggttgcttgaaaacctgaggttcagtgaaggaaacctcaaggcctagtcatgatgaaggatcctctagatgaagtacctgttgaatattcaggaatgcaaggcttaaacttgcagtgacaagaactctgccttttgtcaatgagattcatattaagttccactagtaggaagaactgggatataatgagttgtttagaccgtctagctgttggagctggttatttttcttgaattatccttttataagactgtctcgactgcttaattagctttttggtggtagtatatgccacttattagttgtgatgtattgctattcatagttcaaacagtagtgtcttttgtttaaaaggtaactgcagttgagcatggtgatcaccagcgtgtttcttgac

SEQ ID NO: 7296 - DNA, 2249 bp, Oryza sativa
  Clone ID: PAT_MRT4530_13903C.1
atgggctcggtggcggacgatgcggagatcaccggcccgctcctcgccgccgccgccggcggcggcggtgacagcgccgcggcggcgggggtggagagggtgccggcgtggagggagcaggtgacggtgcgggggatcgtggtgagcgcggtgctgggcgtgctgttctgcctcatcacgcacaagctgaacctcacggtgggggtgatcccgtcgctcaacgtctctgcggggctgctcgggtacttcctggtgcggtcgtggacggcggtgctcgggaggctagggttcgtcatcgcgcccttcaccaagcaggagaacaccgtcatccagacctgcgtcgtcgcctgctacggcctcgccttcagcgggggttttgggtcatatatgcttgcaatggatcagaaaacatacgaacttattgggccagattatcctggtaacagggcgatcgatgttatgaatccttcattgggttggatgatcgggttcatgtttgttgttagcttccttggactatttagtcttgttgcactgcgcaaggtaatggtgattgattacaagttgacctatcccagtggaactgcgacagctatgttgataaatagcttccacactaccagtggagcagagcttgcagaaaagcaagttagctgtctcggaaagtatttgagcattagttttttctggaactgcttcaagtggttcttcagcggcgttggggattcttgtggttttgacaatttcccatctctgggacttgcagcatttaagaacacgttttattttgatttcagtccaacctatattggatgtggtcttatatgcccacatattgttaactgctctacacttcttggagcaatcatatcttggggtttcctctggccatatatatctacaaaagctggggactggtatccagctaacctaggaagcaatgatttcaaagggctatacggatacaaggtttttatatctgtatctgtgatacttggtgatggtctttataacctcatcaagatcatctatgctactatcaaggaagtaatgaatgcacggtcgaagcaaggaagacttccccttgtgcgggttcatgatgatgatgaaggctctaaattatcagctgaagaaaagcttcggaatgacacgtttctaaaagacagaattccatcatggttagcaggatcaggttatgttggccttgcagcaatctcaacagcaactgtgccaatgatcttcccgcaggtcaagtggtaccttgtcctgtgtgcctatgttgtagctcccctgctcgccttctgcaactcatacggctgtggcctcacagactggaaccttgcgtccacgtatggaaagattggcctttttatttttgcctccttggttggccgaagcggtggcgtgattgctggcctagcagcttgcggtgttatgatgtccatcgtatccaccgctgccgatctcatgcaggacttcaggactggttacctgaccctctcttcaccaaggtccatgtttgtgtcacagttgattgggaccacccttggctgcatcatcgcccctctgaccttttggctctactggactgctttcgatatcggcaatcctgatggcatgttcaaggctccatatgccgtcatctaccgtgagatgtcaatcctgggtgtcgaaggattctcagcgctgccccaacattgcctggcgatctgctcggtcttctttgtcgcagctattttgatcaacctcctgcgggacgtcactccgaagagcgtctccaagttcatcccgctcccgatggctatggctgtcccattctacattggggcgtactttgcgatcgacatgttcgttgggacggttatcctgtttgtctgggagagggtgaaccgcaaggaatctgaggactttgcaggcgcgattgcatctggtttgatctgcggtgatgggatctggagtgttccatctgcgatattgtccatcatgaggattgacccaccaatgtgcatgtacttcaagccatcccttaccagctgaaaatagcgcaaaatccgttgtttatttggatgccaaaatagaaaagaattttcacatgtatatatttctctctgttgtaaattagactgcgcaaaagtgcagtaactttgttctttctgttaatatatttctctgtttatgatatgttcattactgaaccaaaaccagaatatccatactgatttgttgattcgttaaaaaaaaaaaaaaaa

SEQ ID NO: 7297 - DNA, 231 bp, Oryza sativa
  Clone ID: PAT_MRT4530_13904C.1
atggagcagaggatcttaccatgtcgctcgcctgctgttgctgctccgctgcggcggcggcggagggggaggagcgaggagaagggagaagcctcgagcgacggcgagaagggtggataccgacttggagagggccaaccaacaaggtggactaacgggttggtcatcggcggctatcgtgctcgcaatgcagcccaccctgatcgcctccacctcgtgaccatggcctcc

SEQ ID NO: 7298 - DNA, 324 bp, Oryza sativa
  Clone ID: PAT_MRT4530_13905C.1
aaaacggggtttccaggctaacctaagggtttcaccagggctttggttaaaaaaggaattgggctacaaaagcaaaggggggcaaaaaaaagaggggatttacggggccctatttacatttaaaaaggaaactaagcgcacaaaaggccctagggggttattttggcagggaatttaccatgttagggtggctttttggctggctgggggattaaccttggtagccccgttcaccgttggggtggcccgggggggggctggggttacggggccaggggccaaattttggggcactaacaaggggccctttgggctaatgctttg

SEQ ID NO: 7299 - DNA, 423 bp, Oryza sativa
  Clone ID: PAT_MRT4530_13906C.1
atgaaccacccgctactgaaccaccacgcccgccacgaaccacccgctgccgacgccatcgccgccaccacctcacggacacgggcccaagcaccagacaccgccgccaacaccacctcaccaccgcagcccacggaccagccaccacctcctcgtcgcttcccatggaccacctactcgccgcctcccacgccgccgccgcctcccacgaatcagctgtcgccgctgccgcctacggatcagccgccaccacctcccaaggaccacctcgccgccacctgtcacgaatcagagctgaatcgagatgatccctacgcgaaaagacaacattacccttccacccctctaactattccgataccatctcatgggcaaatatgtacctggaggtaccgcataatttccaccgtccgatcgagctga

SEQ ID NO: 7300 - DNA, 276 bp, Oryza sativa
  Clone ID: PAT_MRT4530_13907C.1
atggaggctcatcggagaccaaacgacggcggcgcgacggagactggcaacggcgtgacgaaggccagcggtggcggatcgacggcctacggggcgacggcaattagggcccgtggggtcaggcgcgggtgcaagccagctaccgaggggagggcaccgccgcttgccgttgtggatgccgagtacctctgtcctcccctcaagcccgtggcagtcagatcatgctgcctccgttgtggacgtcgggggatagtgaagccaggggctgctcggtga

SEQ ID NO: 7301 - DNA, 523 bp, Oryza sativa
  Clone ID: PAT_MRT4530_13908C.1
ctatcgacgtttgatgtcgcgattccggtatttgcatggtatggggatcgttggtactagggtatacgcgagacagtataatacttggggtagcctatctaactgttgtcgtcatggcggtctgaaggtctgactcgtagtcgacgacagggtagtcttcctccttgaatccatgcccggcgagatcagagataacgctttcgtctctcctgacagtatccggagacaccgtaggggactagccgtgcttatccctgaagtcgatatccggcgtcttgtcttggcgtatgttggcttgtattggctttgtggcgtctatgttgattgtggtgggtgtcgattgtccgtatcccctctcctcctagggggccttgtatttatacccataggtgtccccttgtccaagtagaactagggaaaccaatatggatacaatccgagtagtccttgtcgtttccatgtagaactctggttgtcttttcttatctggaactccctcgagatcagttttcgtataagacat

SEQ ID NO: 7302 - DNA, 464 bp, Oryza sativa
  Clone ID: PAT_MRT4530_13909C.1
atgaaaacgacaaggactactcggattgtatccatattggttttcctagttctacttggacaaggagacacctataggtataaatacaagaccccctaggaggagaggggatacggacaacacggaacaatagaagccacaatatacaagatcaacatacaagccaacatacgccaaggcaagacgccagatatcaacttcaaagataggcacggctagtcccctacggtgtctctggatacagtcaggagagacgaaagcgctatctctgatctctccgggcacagattcgaggaggaagagtactctgttgtcgactacgagtcagacctttagaccgccatgtcgacaacagttagataggctaccccaaatattgtactgtctcgcacatatcctagtaccaacgatccccatactatgcaaataccggaatcacgacatcaaacgttgacacatattac

SEQ ID NO: 7303 - DNA, 374 bp, Oryza sativa
  Clone ID: PAT_MRT4530_1390C.1
cggcagagggacaaacagataaggctaaagaaatattcatgaattctagatggaaagactatagtcccgatgagattgtgtggaaagtgattattgatggcctgataaaaaaaggtcactcagatatatcccgtgaaatgattatcatgttagaacgtatgaactgcagaccaagtcatcaaacctatgcaatgctgactgaggaattacctgacagggaataatatgccacacaagtttcattcatcactcgaagcgaaatccccatcagctgtgcaaactggcatctcattaggtgctgttcaagcacaaggtgcaccaagtgatgtgaaatggatcatccaacatactctctcacacacaaaatgagttca

SEQ ID NO: 7304 - DNA, 453 bp, Oryza sativa
  Clone ID: PAT_MRT4530_13910C.1
ctatctaactgttgtcgacatggcggtctgaaggtctgactcgtagtcgacaacagggtaatcttcctcctcgaatccgtgcccggcaagatcagagatagcgccttcgtctctcctgacagtatcctgagacaccgtaagagaatagccgtgcttatccctgaagtcaatatccggcgtcttgtcttggcgtatgtaggcttgtatgttgtcccgtgtaacgtgttgggtgttgattgaggtcgttgattgtctgtgttgatcaccccatggtgggtgtcccgctgtcctcctagggggcttgtatttatacctataggtgtcgccttgtctaagtagaactagggaaactaatatggatacaatccgagtagtccttgtcgttttcatgtagaactctggttgtctttccttatccggaactccctcgaggtcagtttccgtataagacat

SEQ ID NO: 7305 - DNA, 935 bp, Oryza sativa
  Clone ID: PAT_MRT4530_13911C.1
gcacgaggcacgccacgccacgccaccgcaacccccctttcccccaccgcgcaagcctcctccccgccggaaaaagtcgccgcgaccgccgccgcgatggcggccgcgcgccaccgcggcgggggcacccacgccgcccgcgtccgcctcgtcgtcctcctcctgctttccatggggcggctgccgcgtgccgcggcggtggggcttgggggtggcctgggggagctgatgacgaaggtgccgttcagccccggcgacgtgctcccggtcctgccgaggcaggtgtcgtggcccgtgatgaacacgctccacagcgccgtcgacctgctgccttccttcgtcgccgccgtggcccccggggcggccccctccgacgcggcgtggagcggcgcctgcttcgcccggaacgaggccgcgctcgagctcacccccggagatcgcaacgggaccgagctgagcggcgccgtgctccgactcaagactgcttcagctaagagttggacatgcatggatctctatgtgtttgcaacaccatataggataacatgggattactattttgctgctcgagaacacactttggagattaaatcatgggaagaagaagcggaactggaatatgtgaagcaacacggcatctctgtttttctcatgccatctgggatgcttggaactttgttatctttgattgatgtcctacctttgttttccaatactggttggggtcaacattccaacttggcctttttggagaagcatatgggagcttcatttgagaaacgttctcagccttgggttactactattaggaaggaggatatacattctggtgattttttggctctatcgaagatacgaggacgctggggtgcatttgattcacttgagaacgttgtgactggtgcgtttgctgggcacaccgcagtttgcttgaa

SEQ ID NO: 7306 - DNA, 1042 bp, Oryza sativa
  Clone ID: PAT_MRT4530_13912C.1
tttttaaatagggggctgctatataacggaatcccgttttcgaacgggttgatctcgagtaggtatcaggtgtgatacctatcaggtatcagacgattctacacaacaagatgatctcgatatcatgtgaaacctgttaggtatcagatgatttcaaccacgtatcacgtgatactcacgaggtatacctgtcatttatcagacgatttctaccacgtatcgcgtgatactcgcgaggtatcagatgatttctaccatgtatcacatgatacttgcaaggtaacggatgatacctaccagacgaggatggcgacaacggcggcagaggacgggcgccgcgaccgcggcggtagcgggggacgggtgcggcggcgataggggatgggcacggcggcagcggcggcgtctatgggggacggacgccgcggcggtgggggatgggcgcggcggcggtggcggcgtctactggggacgggcacagcggcggtggcggtggcagcgaaaactgtcaaaatatgttcaatgttagatgtaatgagactaatttggtgttataagtgttgttatttttctacctggcgcgccactgtcgacgtttgatgtcgcgattccggtatttgcatagtatggggatcgttggtacaaggatatatgcgagacagtacaatatttggggtcgcctatctaaccgttgtcgacatggcggtctgaagctctgactcgtagtcgacaacagggtagtcttcctccttgagttcgtgcccggcgagatcagagacaacgcaatgtctctcctatcagtatccggagacaccgtaggggactagccgtgcctatctctaaactcgatatccgacgtcttgtcttggcgtatgttggcttgtatgttgatcttgtgtattgatctattgttccgtgtatgttgattgtctcccctctcctcctaggggatcttgtatttatacccataggttcccccttgtccaagtagaactagggaaaccaatatggatacaatcctagtagtccttgtcgtttccat

SEQ ID NO: 7307 - DNA, 477 bp, Oryza sativa
  Clone ID: PAT_MRT4530_13913C.1
atggaaacgacaaggactattcggattatatccatattggtttccttatccctagttctacttggacaaagggacacatatgggtataaatacaagaccccctaggaggagaggggacacaatcaacatacacggaacaacagaagccacaacatacaagccaacattcgccaagacaagacgccggatatcgacttcaaagataggcatggctagtcccctacggtgcctacggataccgtcaggagagatatagcgctgtctctgatctcgccggatgcggattcgaagaggaaggctaccctgttgtcgactacgagtcagaccttcagaccgccatgtcgaacacttagataagctaccccaaatattgtactgtctcgcatatatcctagtaccaacgatctccatactttgcaaataccggaatcgcgacatcaaatatccccacctgcatttccagaatttttgttgtta

SEQ ID NO: 7308 - DNA, 508 bp, Oryza sativa
  Clone ID: PAT_MRT4530_13915C.1
atggaaatgacaaggactactcggattgtatccatattggtttccctagttctacttggataaggggatacctatgggtataaatacaaggcccccctaagaggagaggggagacgaccacctcaatggacacctaccacaatcaacatacacggaaccacagaagctacaacatacaagccgacatacgccaagacaagccgccggatatcgacttcagagatatgcctggatcggccctatccggtacctacataggccggccgtagggatctagcgttgtttctgatctcgccgggcacgaactcgaggagaagactaccctgttgtcgactacgagttagacgttcagaccgccatgtcgacaacagttagataggctaccccaaatattgtactgtctcgtatatatcctagtaccaacgatccccatactatacaaataccggaatctcgacatcaaacgtcgacacatcggttctcccattcttctggatcatcaaactaa

SEQ ID NO: 7309 - DNA, 474 bp, Oryza sativa
  Clone ID: PAT_MRT4530_13917C.1
atggaaacgacaagaactactcagattgtatccatattggttttcctagttctacttggacaaggggacacctatgggtataaatacaaggctccataggaggagaggggacacgaaacaatagatcaagacataagatcaacatacaagccaacatacgccaaaacaagacgccggatatcgacttcagagataagtatggctagtcccctacagcgtctacgaatactgtcaggagagacatagcgatgtctttgatctcgctggatgcggattctaggaggaaggctaccctgttgtcgactatgagtcagcacttcagaccgccatgtcgacaatagttagataggctaccccaaatattgtactatctcgcatatatcataataccaacgatcctcatactatgcaaataccggaatcgcgacatcaaacgtcgacaaatttcatctaatacggtatacccgcgcgtat

SEQ ID NO: 7310 - DNA, 374 bp, Oryza sativa
  Clone ID: PAT_MRT4530_13918C.1
ctcaactattttataaaaccttctttagcgtgacttgaggtcaaccttggtcaatggtgaggaccataactatgcttagggaggaccagaggtttagtgcagtcaggataccatgtgagaaggtgactagagtcaagattcttgtatgtcaacttcggtcaacaatggggatcgggactacactcagggaggagttgaggtccagatagttaaggataccagatgacgaagttgaatactagatggcacatggtggatggaccccgtgtggaagagatcttcacaacgggcttcacgatgtgtgtgcagcgtcggtgtttacaaagaaaattggaagaagaattagagactatggttgctacagtagtatgcag

SEQ ID NO: 7311 - DNA, 444 bp, Oryza sativa
  Clone ID: PAT_MRT4530_13919C.1
atggaaacgacaaggactactcggattgtatccatattggtttccctagtcctacttggacaaggggacatatgggtataaatacaaggccccctaggaggagaggggacacgaaacaatagatcaagacacaagatccacatacaagccaacatgcgccaagacaagacgccggatatcgacttcagagataggcatggctaatcccctacggtgtctccggatactgtcaggagagacatagcgttgtctctgatctcatcgggcacggattcgaggaggaagagtactctgtcgtcgactacgagtcagaccttcagaccgccatgtcgacaacagttagataggctaccccaaatattgtactgtctcgcacatatcctagtaccaacgatccccatactatgcaaataccggaatcacgacatcaaacgttgacacata

SEQ ID NO: 7312 - DNA, 518 bp, Oryza sativa
  Clone ID: PAT_MRT4530_1391C.1
gcacgaggcgctgtttctcgtcgcttccagatcggcgcccacgcgagaagcggcggcgaccgcgcgggtgcccaggcgacgacgaggtcgagcgcgcgaggtagcagccgtcgccgacatcctccctcctccctccacgcttcccctccctcatcggcttcccgtccaagaagaagcgacggcggcggcaacgccgacgacggcagtggcggcaggaagcagcagcgaggtcgagcatgcaaggtagcaatcggcgtagtttcctcccttctctgattcccctccctcgtcggcttctcatccgggaggaagcggcgacaacggccgcgcgtgtggctccagctccgccaccgcggtcgccggagaaataggcgctcacgtcagggctcgccggcatgctctgcaggctccggctcaggatctccatgacggcaccgtccagttaaaacatgccggacggttaaatagcgtggagctagccatttgtctgctttgatgtggacggatcacaaggaatt

SEQ ID NO: 7313 - DNA, 473 bp, Oryza sativa
  Clone ID: PAT_MRT4530_13920C.1
atgaaaacgataaggactacttggattgtatccatattgatttccttaattctacttggataaggagacacctatgggtataaatacaaggccccctaggaggagaggggatacgaaacaatagatcaaggcacaagatcaacatacaagtcaacatgcgccaagacaagatgccggagatcgacttcagagataagcatggctagtcccctacggtgtctacggatactgtcaggagagacatagcgctgtctctgatctcgccgggcacagattcgaggaggaagactaccctgttgtcgactacgtgatgatacttcaggtcgccaagtcgacaacagttagataggctaccccagatattgtactgtctcgcatatatcctagtaccaacgatccccatactatgcaaataccagaatcgcgacatcaaacgtcaacactcttgtcacacaaccttaaatggttctgtt

SEQ ID NO: 7314 - DNA, 800 bp, Oryza sativa
  Clone ID: PAT_MRT4530_13921C.1
cacaaaaaggactgaacgattcaaatgcttttctcgagtagtccagccatggccggtgtatgagataggtcgtcggtcttcgttggttggttgggcgcgacgactctgcatttgtcaagaacgttcttgataatgcagtgtactcgaccacatcctactcaagtgctcaattgttcctgaaaaatactttctttgtagatacatgccggatgtatcttaccgcgtacttgtttgacatcatatgatctgacgtcttttggtacgccgcgtatcttgaggtttggtcgatctcgagagatcgagttgttgatgacgatggttccgatctcgtcgggagacatactagcgcgccattgtcgacgtttgatgtcgcgattccggtatttgcatggtacggggatcgttggtactaggatatacgcgagacagtacaatatttggggtagcctatctaactgttgtcgacttggcggactgaagtatcatcacgtagtcgacaacagggtagtcttcctcctcgaatccgtgcccgatgagatcagagatagcgctagattcctctctttggttcccgtaggtaccatatgggatttgcctaggcttatctctgatatcgatatctgccagcttgtcttggcgtatgtaggcttatattggcatgtggctttgtggcgtctatgttgttcgtgtcccctttcctcctagggggccttgtatttatacccataggtgtccccttgtccaagtagaactagggaaaccaatatggatacaatccgagtagtccttgtcattttcat

SEQ ID NO: 7315 - DNA, 219 bp, Oryza sativa
  Clone ID: PAT_MRT4530_13922C.1
atgccgccacaatctactccaaatttctcaaaggacctcatcgttatcattgactactacactgctattgactggatcaacgacaccgtcatcttcatcaaaccatgcctcttcggctatgcctactctgctgccgttgatgcgcaacttcgtcatcataaccggctatctctgttgccgccaattgtcattatcgccgattgcatccaccatcgctga

SEQ ID NO: 7316 - DNA, 175 bp, Oryza sativa
  Clone ID: PAT_MRT4530_13923C.1
gagggccgcaatagcacagtgctgcacgcacgggctcgtgacagcgatggtgtggtctggtgacacgggcctacaccacggctcgggttggcggctgtgtgggctaggccgagggtgcagaggggacagcgggagcagtggctcgggctctcccgggctgagcggctcaaagtag

SEQ ID NO: 7317 - DNA, 193 bp, Oryza sativa
  Clone ID: PAT_MRT4530_13924C.1
atgcttcaggcacctaacaatttggccaagttaagcaccgcgaagacttgggtgacccgagttggagacttggactattgccggagattatggagggaatcgcctgtattcctccgccccgcccacccattcttctccggcgacggcggcgggggtcgcactcgcagcggtttccccacccgtccagactatg

SEQ ID NO: 7318 - DNA, 450 bp, Oryza sativa
  Clone ID: PAT_MRT4530_13925C.1
atggcgacatgcctgggtggtgcgatccgcgacggcgaggcgaggcttggggatggtgacgctcgggggcagtgcaccccgcggtgctcccacctcctagatccggctggaggccctcccatcccggatccggaagcatcgtgggggacggcggcgacggcggctgcatgcagcggcgaaggccggaggtcgtcggtggcgctcccctccccttgtggatctagcgacgtcgtggggagggaggcagctgaggtggcatggaggcggaggccggagcggcgagctggcgcggtaagctcgtggaagcgcaactccccttccctccctctcccttccaaaacccttgtggtggcggtggccggacgggagagcggcgacggcgaacggcggcagcggcttggcccacgcaggagcagcggcggctggtgcagcagcgggtggcggcggtag

SEQ ID NO: 7319 - DNA, 651 bp, Oryza sativa
  unsure (1)..(651): unsure at all n locations
  Clone ID: PAT_MRT4530_13926C.1
ggaacacaggggcttccctgccaacttcccgatcactcggatggctcttttgcanacagtgcaggacaagacggccgtgtacaaaacaacaggtcaaggtaagcatttctgcagtctcatacaggacgtgtcgtgcggttcaagcgagcagcncttctacctgacagacatcggttgaagactgtgggaacaatgctcgncgcagctggaccggcgactgcaaggcgagctagatccagggnctcnagctggcgtgcccaacgcgtcgagactgcctgtaattgatacggacgtatgttanaagatcagaggatcgctgttcccgttgcctaggaatacaaaatgcgatgatcgtacctgtacngatcagtaataccgggccacaccacantattacccatattagtgtagtataaccacaaagatactagcataacgtgtgtataggttgataacttagtaacaccctaaagtattattgtgcagccagctcgcttataagcaatgacattcaacctgtaatggatgctgagcagccatggcattagcactcatagtatacctaatatataatgctcactcactagtcgaaggcatgcattngaggatcaatgaatcngttaccttcgacgcaaaaaaaaaaaaaaaaaa

SEQ ID NO: 7320 - DNA, 243 bp, Oryza sativa
  Clone ID: PAT_MRT4530_13927C.1
atggcgccgccgagccttgctcgccggggctgcgtgccgccatatccggcgcgcatccccgtcgagcgttgctcgacgcgaggcggcgacggtgacctcagcaaggagcacgcgaggaggaggagccgggccggcacggcgggtcgcgaggccgctcggggaccaagtcctcgggtgcgtgctcgcctcttattgcgtcggggcgacacgaaggtcgccgccggccatcatgcccttaggtaa

SEQ ID NO: 7321 - DNA, 240 bp, Oryza sativa
  Clone ID: PAT_MRT4530_13928C.1
atggctgcaggcgacgctgcgacgccattgctggtgctggagacggcgtaccaataccatgagggctgccccgcctgcgccgtggagcgcagcaaggcggtcaacccgggcatcccctacatgcgcttcttccacatctggatcatcatcctcgtctcatgccatgccgtgcttaggcccagcaaaatggccgtgtcttcggccaggccatcgggccccgggccatatggccatctataa

SEQ ID NO: 7322 - DNA, 477 bp, Oryza sativa
  Clone ID: PAT_MRT4530_13929C.1
atggagaagccgaagcaagacgacgccatagcaggtgaggagaggttgccggcgacgaagtggctgccgcccaagtggacgagcgcaccgacggatgacttgggcttgggctcgcagtgggactccacgcggcggagcacgcagtcgctgaagcctgtggagagaagctccaggaaatcccctaagaagctgcggctgccgcaccccacggagcgcaaacgcaccaccttcctcctgaacgacgacgacaacgaaccctcgctacggcggccggggctatccggttccactatcacctccagcctctgtcccagcgatgctgacaacgctgaggccactgacactgacttcctccttgccgacaagccgcctccaccaccgttggccaacgacgccgagccctggtggccgccgctcgacgacaaggacggagtgaactatgcccgccgccgccggcctccctccgggcagatctga

SEQ ID NO: 7323 - DNA, 1416 bp, Oryza sativa
  Clone ID: PAT_MRT4530_1392C.1
atggggaagaagggttggatcggatgcgggggaggggggcgaaatgcaaatatactgccactctggacggtcacagatttgacaggaaaccaactaaatggaacaattccgcctggacttctcaagagaattcaggatggctttttaaatctaagatatggaaataacccaaatctttgcaccaatggcaactcatgtcaaccaccaaaaaacaagagcaagctagctatctacattgttgttcctatagttctggtcctcgcgatagtatcagtgacgacactactctattgcctactgagaagaaaaaaacaaggatcaatgaacaattctgtaaagcgacaaaacgagacaatgagatatgggccaacaaataatggctccgggcataattcatcactgcggcttgagaaccgctggtttacatataatgaactggagaagataacgaacaaattccagcgagttcttggacaaggaggctttggaaaagtctatgatggcttcttggaggatggcactgaagtggcagtcaaagtgaggactgaatcttccaaccaaggtgataaggagtttcttgtagaggctcaaattttaacccggattcatcacaagaaccttgtctctatgatcggctattgtaaggatgagaaatatatggcacttgtgtatgagtacatgtcagaaggaacccttcaagaacacattgcaggaaaaggaaatgatgggagatacttaacctggaaagagaggcttcgaattgcgctggaatctgctcaagggctagagtacctacacaaagggtgcaaccctcctcttattcaccgtgatgtgaagggaaccaacattttgttgaacacgaggctagaggccaagattgctgattttggtttgtccaaggttttcaatcctgagaacggcacccatgtatctacgaacaaacttgttggcacacctggatatgtggatccagaagaaatactaattgtaagacttattgggactgaccaaatgcgtaggtaccaatcaacaatgcaaccaacgactaagagtgatgtctatagctttggtgttgtcctgttggagttggtaacagggaagccagctatcttgcgtgatccagagcccatcagcatcatccattgggcacaacaacgcttagcacggggtaacattgagggtgtggtgaatgcaagcatgcatggtgactacgatgtgaatggcctatggaaggttgcagacattgcactcaagtgtacggcgctttcgtcagcacaccgccccactatgaccgacgtggtggcacagttgcaagagtgcctcgagctagaggataagcaccaggtcagtgatataaacaatggcttttataatggcaatagtggcgatctaaactctaacttctacaccacttaa

SEQ ID NO: 7324 - DNA, 363 bp, Oryza sativa
  Clone ID: PAT_MRT4530_13930C.1
atggggacgcaggaccgaaacggtgccgcgcttccattccatgggaccggcagtcctgcaggatggctgtgcgacaccgcctcactcccgcagcccaggagagcggtagcgtggtctagaattaatcaaggcacagctagcggcgcagatgggcaggagcagggcggttgcgcggcaatgatgcgcgggaccgagccggtcacacagcgccgtgttgcaggaccgccctccagtgaggccatgcgaggcggtgccgcacggctgtcctgcgcgaccgccggtcccacggaatggaaaagcggcaccgcctccatcccgtatccccattacgcggaggaggagttagataactcccggatctaa

SEQ ID NO: 7325 - DNA, 2209 bp, Oryza sativa
  Clone ID: PAT_MRT4530_13931C.1
cggcacgaggtccaattccaattataattccaagaggctcatcatcaactcaactgaagaagaagaagaagaagaagaagaagaagaggaggagggttgtgaactgatttgggaagggagggggaggaggaaggcgatcgatcggcgatgggcacgtacaagtgctgcctcatcttcaagcgccgcttccgctggaacgacgcgccgccgcccgacgatgtccgcgccctcttcgccaaccactccgccggcggtggcccccacatggccgccgacggcctccgcgcctacctccaggccaccggccaggacggcgacgtggacatggagcggctggtggagcagatccggcagctgcaggggcgcggcgggcgcatcccgcgggtggggcgggcactcccactcctgacggtggacgacttccaccgattcctcttctcccacgagctgaacccacccatccggcacgggcaggggcaggtgcaccacgacatggccgccccgctctcccactacttcatctacaccggccacaactcctacctcaccggcaaccagctcagcagcgactgcagcgacctccccatcatcagggctctccagaggggcgtccgcgtcatcgagctcgacatgtggcccaactcctccaaggatgacatcagcatcctccatggcaggacgctcaccaccccggtctccctcctcaaatgcctcctctccatcaagcaacacgcctttgaggcctccccttacccggttatcatcacgctcgaagaccacctcacccccgatctccaggacaaagcagccaagatggttcttgaagttttcggcgacatcctctactaccctgacaaagatcacctcaaagagttcccttcgcctcaagacctcaagggccgtgtcctcctctccaccaagccccccaaggagtaccttcaagccaaggatggtaatgctgccaccatcaaagaggacgccaaggccgccgccactgacgatgccgcatggggaaaagaagtcccagatattcactctcaaatccactctgccactaaacatgaccaaagagaagatgacgacgacaccgatgaagacgaagatgacgaggaggaggagcagaaaatgcaacagcatctagctccacagtacaaacaccttattaccatcaaagcaggaaagccaaaaggtactctacttgatgccttacagagtgacccagaaaaggttagaaggctcagtttgagcgagcaacaacttgccaaattggcagatcatcatggtaccgaaattgtaaggttcacacagagaaacctactgaggatatacccaaagggcactcgggtcacatcatccaactataatccatttcttggttgggtgcatggtgctcagatggtagcgttcaatatgcagggatatggaagagctctttggttgatgcatggattttataaagctaatggtggctgtggttatgtgaagaaaccagatttcttaatgcaaactgatccagaggtttttgacccaaaaaaatccctatctcccaagaaaaccttgaaggtgaaagtatacatgggggatggttggcggatggacttcacgcagacccactttgatcaatattctcctccagacttttatgcacgggtggggatagcgggagtaccagcggactcggtgatgaagagaacgagggcgatagaggataactgggtgccggtgtgggaggaggatttcaccttcaaactgaccgtgccggagatcgcgttgctgcgggtggaggtgcacgagtacgacatgtcggagaaggacgacttcggcggccagacggtgctgccggtgtcggatctcatcccggggatccgagcggtggcactccacgaccgcaaagggatcaagttgaacaacgtcaagcttctcatgcgcttcgagtttgaatgacccaacacaccgacactttctttctttctcgccgcatcgcattgcactgtgcctgtgcttgtgcagcatccatcatttggtttggtttttcatgttcctgtgcatacgcatttgtgtctgtacataggctcggtcctgtatattgtttgtgagtaacatgtaataataaggcttcacgccatgttcattcctcctgtttgaacccctccaaatatattaataccgaaggtacaaaatatctcaacggcaaaaaaaaaaaaaaaaa

SEQ ID NO: 7326 - DNA, 312 bp, Oryza sativa
  Clone ID: PAT_MRT4530_13932C.1
atggcgatttactgcgtcgacaacgttggcctggggatggctccaccaaccatgaaggtcctgcgtgagcctctcgcatctgcagctgcacatcctgtagcagcagcaaccgcaatcagcagcagcacgatcagaaggggcgccatgcttccgctcttcttcttcttcctctggtccgccgcaagatcagctaacacgatgatgatcatggtcaccagctgggcggtgacgccggcggcggcggcgaggagtcatcagaacgtgtcccatgaaggattcttgtggaggatgcggacggcatggaacagttga

SEQ ID NO: 7327 - DNA, 1848 bp, Oryza sativa
  Clone ID: PAT_MRT4530_13933C.1
atgggcacgtacaagtgctgcctcatcttcaagcgccgcttccgctggaacgacgcgccgccgcccgacgatgtccgcgccctcttcgccaaccactccgccggcggtggcccccacatggccgccgacggcctccgcgcctacctccaggccaccggccaggacggcgacgtggacatggagcggctggtggagcagatccggcagctgcaggggcgcggcgggcgcatcccgcgggtggggcgggcactcccactcctgacggtggacgacttccaccgattcctcttctcccacgagctgaacccacccatccggcacgggcaggggcaggtgcaccacgacatggccgccccgctctcccactacttcatctacaccggccacaactcctacctcaccggcaaccagctcagcagcgactgcagcgacctccccatcatcagggctctccagaggggcgtccgcgtcatcgagctcgacatgtggcccaactcctccaaggatgacatcagcatcctccatggcaggacgctcaccaccccggtctccctcctcaaatgcctcctctccatcaagcaacacgcctttgaggcctccccttacccggttatcatcacgctcgaagaccacctcacccccgatctccaggacaaagcagccaagatggttcttgaagttttcggcgacatcctctactaccctgacaaagatcacctcaaagagttcccttcgcctcaagacctcaagggccgtgtcctcctctccaccaagccccccagggagtaccttcaagccaaggatggtaatgctgccaccatcaaagaggacgccaaggccgccgccactgacgatgccgcatggggaaaagaagtcccagatattcactctcaaatccactctgccactaaacatgaccaaagagaagatgacgacgacaccgatgaagacgaagatgacgaggaggaggagcagaaaatgcaacagcatctagctccacagtacaaacaccttattaccatcaaagcaggaaagccaaaaggtactctacttgatgccttacagagtgacccagaaaaggttagaaggctcagtttgagcgagcaacaacttgccaaattggcagatcatcatggtaccgaaattgtaaggccatctctcgctaactctgctgaaatgcccaatctttttggccaaaacaggttcacacagagaaacctactgaggatatacccaaagggcactcgggtcacatcatccaactataatccatttcttggttgggtgcatggtgctcagatggtagcgttcaatatgcagggatatggaagagctctttggttgatgcatggattttataaagctaatggtggctgtggttatgtgaagaaaccagatttcttaatgcaaactgatccagaggtttttgacccaaaaaaatccctatctcccaagaaaaccttgaaggtgaaagtatacatgggggatggttggcggatggacttcacgcagacccactttgatcaatattctcctccagacttttatgcacgggtggggatagcgggagtaccagcggactcggtgatgaagagaacgagggcgatagaggataactgggtgccggtgtgggaggaggatttcaccttcaaactgaccgtgccggagatcgcgttgctgcgggtggaggtgcacgagtacgacatgtcggagaaggacgacttcggcggccagacggtgctgccggtgtcggatctcatcccggggatccgagcggtggcactccacgaccgcaaagggatcaagttgaacaacgtcaagcttctcatgcgcttcgagtttgaatga

SEQ ID NO: 7328 - DNA, 300 bp, Oryza sativa
  Clone ID: PAT_MRT4530_13934C.1
ttttgtcgtaacgctatacacggggaaaccacggggggggattgaggatattggcgggctggacaaacaccgacaaggtgcaagaggacagcgtgccattgactagtgacgctggcaggaacaagaccgggacgaatagagagcgcctgtaaagaagctacaaagagaagggcagatagcacaccctgaggacaccagcccccgcggcggtgttgagctccatgcagctgacggcggcgtggatctgccaactcatggaagagtgtcagaggaagggggcggagcatccctgcgtcaact

SEQ ID NO: 7329 - DNA, 444 bp, Oryza sativa
  Clone ID: PAT_MRT4530_13935C.1
atggacatgtacaaagcgaagaacaagcaacacataaaaaatctgacagtcctgttatatggtgctgaccagagcaagtcgctgagaagaatgaagaggctgtactctcatggaaaaagcagcactgcaggcgcagacagagaatgggaggaagatcatgagtggatcgagcataaaggagtagcaaaattgtgccatatcgacctcaagccctcaaggtgcctgggattaccatcaacgctggagatgagaaggggaaggcggggccgacgatggcgtgaggatgcaagcgaagggagggagggagcgccaggagatgggcaggataggggagagctcgaggggcaagtcgtcgtcgccggcgaggagaagcgggggagggaagaaaaagcggcggcggcgcaaggacaagggaaaggaagagaagggattggggaacagtag

SEQ ID NO: 7330 - DNA, 585 bp, Oryza sativa
  Clone ID: PAT_MRT4530_13936C.1
tgggcttcagatctctctctctgtcaggaaaaggaaaaaaaaaagagagagagagaggaagctccagccaggcgccagctggggcctagtggcacagtagaatgtgtgggccccacacaggtcagattcgctcgccaagtcagcggtacaagctcccacgtcggcatcgctggggcccacgttcagttcaatccaccccgctgttcccgccgaaccaggtgtaccccgcccattttcgccctcacgtcgggcccacgaacagtggtgcgcgtggttagcctaggcatgggtacgtgcagctggggggctgacgtacgggaccggagttctgtcgggcccactgtcagtgacgcgtgggtggggccatggcgtgtgcgtggggctttacatgcacaccaactagcagacactagcaatgggaaaggggaaaaggaacacaaagaaaggacagagtggagcatcaattctataggagggaagcagaaacagcagatactgcaggcaaggagaggggggaaagaaagcctgattctaagggatcataagccatcattaaccattgagctatggtatttttatacaacc

SEQ ID NO: 7331 - DNA, 354 bp, Oryza sativa
  Clone ID: PAT_MRT4530_13937C.1
atgtgggacccctgcaccggcgcccccgccggccagccttcgtgtgctgaagaccgcgccacacccatcggcaggagttgctactatgctgtatatcttaaaggtacagaaaagattttcttttgcacggtgatccagccagtttactccgttcttagttacgtgaaaccagatctcatccagggttctgcaaaattccgccaggagctctccctggtggcggagctcggcgtccctctcgctggcgtcgagcgttgctccgggactcagctagcgcttctctctccagcggcagtttccggcagatcgggcgcgcagatccagacaagtccaggcaaacgggcaagcggctga

SEQ ID NO: 7332 - DNA, 168 bp, Oryza sativa
  Clone ID: PAT_MRT4530_13938C.1
ggtcgaggagttgctcccgctcaccactgccacatgcatgcctcaacgatggccgaatgaggggtaacgttggcaaagaggtcatggtgcagtgggtggtatcccaagctaacgaggaaaaactacaccgaatggacaaccgtgacgaggatgagcttgcaggcgcag

SEQ ID NO: 7333 - DNA, 663 bp, Oryza sativa
  Clone ID: PAT_MRT4530_13939C.1
ctaaagatccgggggtatatatattcccggtgcgccctcgtcttctccaccaacacttagccgtttttcgatcttgatcggcctctccttcgccgccaccgtgccgacttcgatcgacgcggccgccgccgccgtcgacgacgtcgccactgccacgaacgccgcccccccgagcttgatcgccacgccaccgcgccacgccgccgctacgccactcggccgccaccgcctcgagctcaccacgccgccactacgccacgccgcggccgtcgcgtgccgccaccgcgcccgcacgccgctgggccccgacgccgcggccgtgcccgcacgccgctggccccgacgccgccaccgcgcccccacgccgctggccccgacaccgcagccgcgcccccacgccgccgggcccccacgccgccgggcccccacgccgccgccgccgccgcgcccgcacgccgccgggccggcccacggcgccccgacgccgccgccactgcacgccacttccgcgcgcgcccgaacgtgaccgaacgcgaagaacgtgaacgatacgtggacgactggtaatgttgcagagaagacgtttagactaatacattttcctggtaatgttgcagagaagacgtcggcgtcgtccctcaagccgaagtggtagctagccat

SEQ ID NO: 7334 - DNA, 2920 bp, Oryza sativa
  Clone ID: PAT_MRT4530_1393C.1
tttgggtttctcctggttgggcccaggcacgacctcggctatcaacgcccagcatcagcaaaggttattatgatagatactaatcttagaaatcagaacggtgacctgttaggtctcaagaagagttacaaggaagactgcacttgggcacatataataactcggctatcaaaacaaagcacaaatcattcttgtctgacgaacacacgcgaacatgttaaaaacactctcgaaactgttggttgaatggcgtggaccctccatcctcagcgctcgaggcacaggctcagctagtccgagctgcttaaaccctgcagctggtcaggatacacgcacgccatggtcggcaagcaacttaaccccaactataacaaagggtaaaggcctcagtagccggtgtgctgctgccacccctggtgagacggctgtgattgggcattctggaaaccgttcaggcctccctcggccgggttctggtggtgctcttggctttgagaatggtagaaagctggatacccatggccaccgaattgcgagtgctgctgcggttgctgcgcctgacgaaagccaccctgctgactctgtccctggaagccatagaagtgactcggtggaagcgccgacgttgctcttgaaccagcaccatgaagccacattgcagaattgtcaccctgctggagggccatatattggctgggatctttgtatggcgtgctcaatgcttcgtcaaacccaagatttgttgatgcagaggcagcattctgattaagagtgaaatttccaggaagattactagagcttccaaatcctccataaccagagatcactgaagaaggttgctgttgtaagcttgtagccgataggttgttcttgaattgcggcacattcatattgtacttcatagctcctggtacagcagcagcagcagactgatggaatggtccattactcgagtatgcttgctggaaggcagctgatggtaggtaagcagcagggtagttctgtgccaaatacggataaccaatcatattcgcaaaaggcgccagtggtacagtaggctgagagtaagggtggactaattgctgagggagaggaggccccgttgctatactagtacttggaagattttgggtagattgagcgttggagaaaactcctggcttcagagtctcttgcatggagattgctggtccagtagtagttggtgcagctgagttatattttgtcattgattgtgctgctagcaaaggtgataaactgaagtccaagtcccgaagaggtgcaatgtttgaccccaataggctgttgtgtaatgaatttgcttgcagtaagtttgaaagatgggaaagagtgtgcgcctggttgtttccttgtgaggactccattgtacttggctgtgtagtgtttgcatatgcagcacttgaatcagatggtaggttatattgaagaccggaatgatcaagcacttcctgtctcaggacatcaggctgtgaaacagaaggtacatcaatgttctccatgttagttcctatgatagtatcaaggttctcatttcctgacgaattaactgcggcactatcataatagtcttgatctcttgaatcaatttgatctagaggtacagattcctctataacaggcaactccacattgttatcatcagcgctccttgatggaacagggagaagcccagaaaatgctccagattcaaaactgccaaagctcaaagtgacacagtctgagccggtaacttgcaggtgatcaggaattataactgcagggttatcttcagctaattttgttggaactaactcttcattatgtaggcttagaccctggaagttttcagtggctaacgctacatcagaattggagccctcaacttcatcttctgcatgagaattcttctgaggcagataggtactcgattcttgcaacagtccatcatcatattcagaatcgcctccatgatgttccaagtgtctctcggaagaaaatgcagctgatctgttctcatccaaatgagaattttcatgggggttaatcacaccagcaaccagtgtagatgactgtagcgatgactcatataatgattggtcaccggatgtctcaggcaaggctgattgatttcctggtggtggctcgtcctgtggaagccaatcattatcatatgcctgcttgttgacagctgctgagtggttgtgatccttgggatgaatagaatcttgagcagaatgtaacccctggtcaggatttgttggtgaaactgtgctagcagattgtttcaaattctggtttacagtactgggcaaagatgggtattgtccagtatatcctttgtctgcagtaaccgcaggcttgctagaggactgctttacctgaggcctgcccattttcacaatatcggccattgacaactgacctggtgtcccagaccaaccgtgcttggaattgtttgcttctgagtggaattggttgatgtcataccaggccctgagattgaccttgaagccacattgtctcttgaaaagtatcgcctcgtcggggtccatgccgcaatcgcgcagcgccgcgtagatctccgcctccgggcggttcacgatctccttcaggctctgcaccagcttcctcgacgccgccgggacggggcccgccgccgcgccccccttccctcctcctcctcctccccccgcgccgccgccggtcatttttttcttatcgcgcttgctctttacctcttgaaaagcctcgtgcgagaggaggcggctgaccgcctcgtcggggtccatgccgcaatcgcgcagcgccgcgtagatctccgcctccgggcggttcacgatctccttcaggctctgcaccagcttcctcgacgccgccgggacggggcccgccgccgcgccccccttccctcctcctcctc

SEQ ID NO: 7335 - DNA, 436 bp, Oryza sativa
  Clone ID: PAT_MRT4530_13940C.1
gtatgtatgcttttaatattaatcgttaatcgcattgttttttggctcacatgaagaaagacttacaatgttttaaaagatacaacccctgccactgattattttcctacagacagggtggcaccaatctaaacttagcacacatatggaacaattttgctctgcccaaacacctacagggggaccttcgagacactagctgggccaacataagaatgatcgaacggccattgcggaggcactggtaggtatctgcatcctgacggacagtaatggaaccgcaacaacaggggccgctgcaaaccagactgtccactgaaaaactgagagtcgcacttgcgggtatgcacgactgcaaccattaggccgcgttcagagtgcataccccctaaccacctgggatggcgacccactgaaactggggcgaaattccccc

SEQ ID NO: 7336 - DNA, 326 bp, Oryza sativa
  Clone ID: PAT_MRT4530_13941C.1
gcaccggcccagaatcccgggcgagacaccacgcgccctgtaaaaaaagagagagagatctgcagcaacagcggttcctgatagagacaacctacgggtgccatctactatctctgactgcagcagtgcagcactctccatctcaacccaagctaggaggaggtcatggcagcccaggggggcaaggatgcatggagcagcagctgcagacttcaagaaccattttgtgatgggggggaaccagggtcattggctacctcattgtcaggatcctatgtcagggggggcaccaggccacatctgttacaataggaaaggtcctcatt

SEQ ID NO: 7337 - DNA, 470 bp, Oryza sativa
  Clone ID: PAT_MRT4530_13942C.1
atggaaacgacaaggactactcggattctatccatattggtttccctagttctacttggacaaggggacacctatgggtataaatacaagaacccctaggaggagagggggacaacaaatcgacgaccaccacaatcaacacccaccacaatctactggacaacatacaagccaacatacgccaagacaagacgccggatatcgacttcagggacaagcacggctagtcccctatggtgtctccggatactgtcaggagagacgaaagcgctatctctgatctcgccgggcacggattcgaggaggaagactaccctgttgtcgactacgagtcagaccttcagaccgccatgtcgacaatagttaaacaggctaccccacatattgtactgtctcgcgtatatcctagcaccggcgatccccatactatgcaaataccataattgcgacatcaaacgtcgacacatgga

SEQ ID NO: 7338 - DNA, 375 bp, Oryza sativa
  Clone ID: PAT_MRT4530_13943C.1
gcaaaaacttctgagtggaataataaccatacaacaatccctcaaaaagtcattcaaaaaaaacttgtcattaaaaaaaaacaatccctcaaaaaaaaaaaaatacaacaatacaagatcatggatgtgatatcgtatgtattctactactccaggaaacaagtttcagttcaggctattcacaaaaagtgttggtgatgcagcatctccattcccccagcaataatccccactgaactgacgttgttgaggatgtcgctggatttcaaacatcgcaagcacattttcagccgccgtcgccgccaccgacgttgaaaatgtcagtggcccttacgaaaagcccttttacccgcgtgctcgtgtgggctctcattt

SEQ ID NO: 7339 - DNA, 477 bp, Oryza sativa
  Clone ID: PAT_MRT4530_13944C.1
atgtaaacgacaaggactactcggattgtatctatgttggtttccctagttctacttggacaaggggacacctatgggtataaatacaaggccccctagtaggagagaggatacagacaatcgacacgaccaccacaatcaacacccaccatagacggatcaagacagaagatcaacatagaagccaatatacgccaagacaagacgccggatatcgacttcagggataagcacggctagtcccctacggtgtctccagatactgtcaggagagacgaaagcattatctctgatctcgccgggcacgaactcgaggaggaagtctaccctgttgtcgactacgagtcaaaccttcagaccgccatgtcgacaacaattagatagtctaccccaaatattgtactgtctcgcgtataccctagtaccaacgatccccatactatgcaaataccggaaccgcgacatcaaacgtcgaca

SEQ ID NO: 7340 - DNA, 197 bp, Oryza sativa
  Clone ID: PAT_MRT4530_13945C.1
ggccttgtcgacaccccaacaagagagagagagaggatatatatttgtaagttgttctttctcaaagaattttccgccacactatctgcgcaattttctgggctccctagtgggagtgagctctcacgacgcaagatgcggtgctctcacagcgcaacacaagcgccaccaaaaattttaaaggcttgtgtataggg

SEQ ID NO: 7341 - DNA, 746 bp, Oryza sativa
  Clone ID: PAT_MRT4530_13946C.1
atggaaacgacaagaactactcggattgtatccatattggtttccctagttctacttggacaagaggacacctatgggtataaatacaagaccccctaggaggagaggggacgccacaaagccataagccaatacaagccaacatacaccaagataagacgccggatatcgacttcagggataagcacggctaggatactgtcaggagagacgaaagcgctatctctgatctcgccgggtacggattcgaggaggaagactaacctgttgtcgaccacgagttagaccttcagatcaccatgccaacaacagttagataggctaccccaaatattgtactgtctcgcgtatatcctaataccaacgatcctcatactatgcaaataccggaatcgcgacatcaaacgtcgacacctcctcgcgcctaccccgtcgcccgccgccggcagccgcgaaccccgccgccgacgcctcctcacgcctatcacgccttcatcgcctgccgccttctccaccgccgccgtctcctccaccgccgctccttgccgccactgcatcctccgcgagcagcatcaactactccggtggcgagttctttgtcttcgaggacgacgtctgctactgctgcaccaccatcgtcgacgccctcaccctccccatcgccgccgtcatcccggtgcccgccgtcgagctccccgccgaggcgcgcatcgcggtggcaggcgacgagctcttccttctcatca

SEQ ID NO: 7342 - DNA, 444 bp, Oryza sativa
  Clone ID: PAT_MRT4530_13947C.1
atggaaacgataaggactactcggattgtatccatattggtctctctgttctatttggacaaggggacacctatgggtataaatacaagaccccctaggaggagagaggacacggaacaatagatcaagacacaagatcaacatacaagccaacatgcgccaagataagacgccggatatcgacttcagagataagcatagctagtcccctacgatgtctacgaatactgttaggagagacatcgcgttgtctctgatctcgccgggcacgaactcgatgaggaagactaccctattttcgactacgggatggtttcatggccgccatatcgacaacagttagataggctaccccaaatattgcactgtctcgcatatatcctggtaccaacgatccccatactatgcaaataccggaatcgtgacattaaacgtcgacataat

SEQ ID NO: 7343 - DNA, 1194 bp, Oryza sativa
  Clone ID: PAT_MRT4530_13948C.1
atggcggggcggtggctgcgggcggcgagggggatgggggggaggaggaggagggggtggtcggaggcgccggcgttcgcggcggagcagcgggcgacgctggtgaacgtgaagctgaagtgggtgaaggaccgggcgctcgacggggcggtgtcgcgggagcgcgacctgcgcgccgcccaccacctgctcgacgtcgtgtccgcccggccaggccaccgggtatcgcgcccggagctcctcgccgatagctctgtgcgcagggcgttcgggggcgtggacggggtggacgcgtttctagccaggtaccacacgctcttcgcgctgcgccgcggcggcggcgtgtccctcacggacgcggcgctcgacctccggcggcgggaggtggactgcctcgtcgaatccgagcccgacctcgtgtcccgcctccgccgcctcctcatgctcacgctgccgcggtcgctccccctccacaccgtcgacctcctccgctgggacctcggcctgccccgcgactaccgcgcctccatcctccgccgctaccccgaccatttcgccctcgaccagcccgagggcgatgagcgcgtctggctccgcctcctctggtgggacgacggtcttgccgtctccgagctcgagaagagcaccgctggcggcggcggcggtgacaccacttgcctccccttcccggtgagcttcacgaaagggtttggtctcagaagcaagtgcatcaactggctgaaggaatggcaggcgcttccgtacaccagcccctatgccgatccctcaggcctcgatcgccgcaccgatgtgtcggagaagaggaatgtaggagtgttccatgagctgctgcacctcacggtggcgaagaggacggagcgccgcaatgtgagcaacatgaggaagctgctcggcatgccgcagaagttcaccaaggtgttcgagcgccatccaggcattttttacctctctagagtgcttggcacgcagacagttgtgctcagggaagcttacggtggtggaagcctgctgctcgcgaagcatgcacatccacttgctactatcagggaggagtattcggcagtgatgagggcggcattgccaccaaggaggaggaggagtagggaaagtgactcgtgcagcgagcaggatgaggaatgtgtaggaggagaagaatttgaactcactgaatga

SEQ ID NO: 7344 - DNA, 463 bp, Oryza sativa
  Clone ID: PAT_MRT4530_13949C.1
tgtgtgaggagcgtgtcgacgtttgatgtcgcgattccggtatttacatagtatggggatcgttgggactagggtatatgcgagacagtacaatatttggggtagcctatctaactgttgttgacatggcggtctgaaggtctgactcgtagtcgacaacaaggtagtcttcctcctcgagttcgtgcccggcgagatcagagatagcgctttcgtctctcctgacagtatccggagacaccgtaggggactagccttacttatccctgaagtcgatatccagcgtcttgtcttggcatatgttggcttgtatgttgatcttgtgtcttgatctattgtttcgtgtcttctatggtggatgtgtcccctctcctcctaggggtcttgtatttatacccataggtgtccccttgtccaagtagaactagggaaaccaatatggatacaatccgagtagtacttg

SEQ ID NO: 7345 - DNA, 1073 bp, Oryza sativa
  Clone ID: PAT_MRT4530_1394C.1
tcagtggctaacggtacatcagaattggagccctcactttcatcttctgcatgagaattcttctgaggcagataggtactcgattcttgcaacagtccatcatcatattcagaatcgcctccatgatgttccaagtgtctctcggaagaaaatgcagctgatctgttctcatccaaatgagaattttcatgggggttaatcacaccagcaaccagtgtagatgactgtagcgatgactcatataatgattggtcaccggatgtctcaggcaaggctgattgatttcctggtggtggctcgtcctgtggaagccaatcattatcatatgcctgcttgttgacagctgctgagtggttgtgatccttgggatgaatagaatcttgagcagaatgtaacccctggtcaggatttgttggtgaaactgtgctagcagattgtttcaaattctggtttacagtactgggcaaagatgggtattgtccagtatatcctttgtctgcagtaaccgcaggcttgctagaggactgctttacctgaggcctgcccattttcacaatatcggccattgacaactgacatggtgtcccagaccacccgtgctgaaacccagatgatgattgtgcaggtaccgacggtccatcagcaaccacacttttgtttaccaaggaacttggaattgtttgcttctgagtggaattggttgatgtcataccaggccctgagattgaccttgaagccacattgtcaatggagctagagtgaaaagaactgtttcgcccgcctcgatctgcaccgcctcttacacctcgactggcagcattacttgccgctcgagatcttggctcaggaatctctttaacctcttttttcttatcgcgcttgctctttacctcttgaaaagtatcttgggagaggaggcggctgaccgcctcgtcggggtccatgccgcaatcgcgcagcgccgcgtagatctccgcctccgggcggttcacgatctccttcaggctctgcaccagcttcctcgacgccgccgggacggggcccgccgccgcgccccccttccctcctcctcc

SEQ ID NO: 7346 - DNA, 773 bp, Oryza sativa
  Clone ID: PAT_MRT4530_13950C.1
tcccacctctctcttcccctcttcctctcaatctctctctatctctgtctcagatatcgttgggagcgacaagttggtggccggcgatgggcgtgccaggggcgcggcaggcggtgggcgtggctgagcccgtgtccccctgctgccgcgccgccttgctgcccccctgtcgcgatggagggcggcgaagtggcgagggtggaggcggaggtcgtctccgcccttctgctccgagcccccggcgaccgccgccatcaccaccaccccgtctgagttcgtcatcatcatcttcaacctggggtcatcggtctctctcggcgtcgaccagcgtggcggcagctgtcgacgtttgatgtcacgattccggtatttgcatagtatggggatcattgataccaggatatatgcgagatcgtacaatatttggggtagcctatctaagtgttgtcgacatggcggtctgaatgtctgactcgtagtcgacaacagggtagccttcctcctcgaatccgcatccggcgagatcagagacaacgctatatctctcctgacggtatccgtaggcaccgtaggggactagtcatgcctatctctgaagtcgatatctagtgtcttgtcttggcgtatgttggcttgtatgttgtggcttctgttgttccgtgttcactctcctcctagggggctttgtatttatacccataggtgtcctcttgtccaagtagaactagggaaaccaatatggatacaatccgagtagtccttgtcattttcat

SEQ ID NO: 7347 - DNA, 454 bp, Oryza sativa
  Clone ID: PAT_MRT4530_13951C.1
atggaaacgacaaagactactcggattgtatccatattggtttccttagttctacttggacaagggaacacctatgggtataaatacaaggctccctaggaatagaggggacagaatcaacacccaccacaattaacatagacgccacaagccaatacaagccaacatacgccaagacaagacgccggatatcgacattagagatacgcctggatcgaccctatccggtacctacagaggccggccatagggatctagcgctgtctttgatctcgccgggtacggattcgaggaggaagactaccctgttgtcgactacgagtcagaccttcagaccgccatgtcgacaacagttagataggctaccccaaatattgtaatgtcttgcgtatatcctagtaccaacgatccccatactatgcaaataccggaatcgcgacatcaaacgtcgaca

SEQ ID NO: 7348 - DNA, 2662 bp, Oryza sativa
  Clone ID: PAT_MRT4530_13952C.1
gacataataacggctacggactaccattcacaatagtttcaatcgttgctgccgaaatcgtcaaaacatctaatttatcattagctcgagattggcagctataattgatgacagcgacaaacagcatagacaataagacatctaactacggatggattagaataatccatgcggtagggggctaatgaggattactagcagtagcagaaggcccggtgagcatcttgtcaacttttgccaaaagcccctgcatttccccaagaaggttttctggcatttgctttgatccatctgatggagttgccttcttgacagatgaatggccagccagggatgagatcatcctctccaggtttttcctaatatccgtaaggggaggctttgaagctggcgaaggcacgctcaacttgattggaggaagataatgaagccttggtgtagcaaacgggggaccaaacataccaagagtttctgcgctgttgtaagccgcctcagcttcagcacttttcccaaacacaacacgagcgctatgggtatcttttacgatgtccgtctcagactcaatcacgagaccaaacttaccaaatgcagagagcaattcctctttggagggcagaacaacaccctttgcaaagtccaaaagaagggctgctgggtttccaaagtgctctgcaattttcttcttctttttcttaggagtagaataagctatatcagggaaagcactattggtagcttcaccagaggaatggtttacattagctccaggaaccatcttcttcaggctaggctgatcggccctctggccctcatctttgagggaattgcttgctgctgctacattagtgccattggcgacctccgctttcataagcatttccggcaccatcgcttcaagggaagcataagattcttggaccgtacgcacttcggcgcttgcatgttctttatttccatctgtcggctgagatagggatacgtcttcacttttaggaagaggtgcacttttgtcagtcacatctacagcagcattctgcccatctctgtgtagaggaatattagcttcagacttcactgcttccaccggaacacatctgacaggcacatctactacaatgccttgcacacctggatctgcttgaatgttggtatgcaactgtcttgcttccagcatacctgcatcattctgttttgcaggttggtcagataaattcttgcaagcattggctggggtcttcaaaacagatccaccatttgctttgtcctgctcctgtcctggttcttttgctaccttcgctgaagctaatgtagggctcttaaagtctggcttgatcttctcaagctgcacaccaactgccataccccttgcaccattctctggtttcgtcgggcttcttatgtcttctgccctcgcttgcctgataggaatagcaggggtaattgttacaccacagcctagggcagccgcaggagatttcttccccctcttctcggtcttggtcgaagaactcccaccctcattttgcccctgttttctggtcctcttcaaagcacatttgcctggtttcagagcagcacgtgaatttacaaaagaatcagatgtctcgacagcagcatttgtaaaagcattctccgtagaacactcgtgtgctataaaggacttgtagtcagcatcctcgaccaacaatgaacttgtatacaaagaaaggaaggcatggacggccttcattgaccgtatcctatggaagacgtccagcccagtcctgcgcacaaaaagcaagacctcttgtggagaaacattctcctgcaatggctttggcaataccttgtattcatcatcttcagcggcagcgggtggcgatggctttggcgaatcagacgccttctggacaagggcaatcccgcccaagttggtgtagggcggcgacagatatttgctcttcttgcgctcgcgcttgttggacttggagatggtggtagcgctgtcctggtggtgtggcgtagccttgtcatcgtcattgtccatgagctcggcgacgctgcgcttcttttgggtgggtgtctcctgcggcacctcgaatggcctggtgtcctggtcctgggcatcccaggcggcgggcacatcgaggtcaatcttgtcgaccaggtcggcgacggggcggcgcgggtagtggcccgggccagcgggaccccatccgttggcgagggcggcgacccaggccttgagcctggggaggtcgagcaggccgacggaggaggtgtcgagagcggcgtggcggagggaggcgaggaagtcggggggcggcaggttgtggagggtggcgcggaggggcgggggcggtgcgtcgggggcgggggcgggggcggaggcgcaggggcaggtgaggtgggcgtggaggagagcggcggcctgagcctgggcgtgttggacggcggcgacgaaggcgcgggtggtggtggcgcgggccatgaggtcggcgtcggggtgggcgaagggcctgaggtcggaggcgcggcgaggggcgtggtcggggtcggggtcggcgaggtaggagacgaggccgtcggggaggaggtgggcgggccaccagggtcggcgcttggacttggcccagacgaggtccccggcggctagggtttggggggttagggtttccgccat

SEQ ID NO: 7349 - DNA, 631 bp, Oryza sativa
  Clone ID: PAT_MRT4530_13953C.1
acaccgtcgtctcgccgaccgcgcctggtcatcgccgtgccgtgccgctcctcttccgccgtccaactcctctgccgcagccacgtgtcgacgtttgatgtcgtcattctggtatttgcatagtatgagaatcgtcggtgctaggatatatgcgagactgaggtaaaagagatggagacagggatttttatacaggttcgggtccctgagcggttaggtaatagccctacatcctgttggccggagccgatgttgctttttattcaccaactcatagtcgacaacagggtagtcttcctcctcgaatccgtgtccggcgagatcagagatagcgctttcgtatctcctgacggtatccggagacaccgtaggggaatagccatgcctatccctgaagtcgatatccggtggcgtgtcttggcgtatgtaggcttgtatgttgattgtgttgggtgttgatgaggtggtcgtcccgatcgtggtgatcgtgttgatcatctcatggtgagtctgtgtgtccgtcccctgtcttcctagggggcttgtatttatacccataggtgtccccttgtccaagtagaactaaggaaaccaatatggatacaatccgagtagtccttgtcgttttcat

SEQ ID NO: 7350 - DNA, 477 bp, Oryza sativa
  Clone ID: PAT_MRT4530_13954C.1
gtgacactatagaatactcaagcttgcatgcctgcaggtcgactctagaggatcccctccggtgtttgcatagtatggggatcgttggtactaggatatatgcgagacagtacaatatttggggtagcctatctaactgttgtcgacttggcggtctgaagttctgactcgtagtcgacaacagggtattcttccttctcgagttcgtacccagcgagatcagagacagcgctagatccctacggctggcctctgtaggtaccagatagggtcgatctaggcatatctctgatgtcgatgtccggcggcttgtcttggcgtatgttggcttgtatatcgatcttatgtcttgatctattgttcgtgtcccctctcatcctagggggccttgtatttatacccatagatgtccccttatccaagtagaactaaggaaaccaatatggatacaatccgagcagtccatgtcgtttctat

SEQ ID NO: 7351 - DNA, 803 bp, Oryza sativa
  Clone ID: PAT_MRT4530_13955C.1
gcgtgcggaggagcgcggcgcccgccgggccggacatgtggaggccgtagaggaggtaggcgccgaaggggcggaagacgtcggggacggaagggacgcgcagccacggcgcgcggcggtcgagcgcgcgcgccgcggcgagcgacgcgcggagcagcggcggcgcgccgccgacgcggaagctgagggagcgcgtggcgtcgtacacgctgagcaccgcaaacgacgacggcgcgccggcgccggggctccgctcgacggcgaggtacgtgccgcgggtgagcttgtgcgcgaggagcgccgggaggtcggcggggacgaactcgggcgccgccgccgccgcggggaattatgtcaacgtttgatagtcacgaatagggtatttggatggtatggggatcgttggtaccagggtatatgcgagacagtacaatatttggggtagcctatctaactgttgtcgacttggcggtctgaagtgctgactcgtagtcgacagcagggtagccttcctcctcgaatctgcatccggcgagatcaaagacagcgctaatgcgctatgtctctcctgacagtatccatagataccataggggactagccatgcttatctctgaagtcgatatccggcgtcttgtcttggcgcatgttggcttgtatgttgatcttgtgtcttgatctattgttccatgtcccatctcctcctagggggccttgtatttatacccataggtgtctccatgttcaagtagaactagggaaactaatatagatacaatccgagtagtccttgtcgtttccat

SEQ ID NO: 7352 - DNA, 240 bp, Oryza sativa
  Clone ID: PAT_MRT4530_13956C.1
atggggaggaggaggagcgatctgggaggcggggtaggcgcgcgtgacctcgaggaggcggggccgggcgtgatcaggagggagggatgggctttggtagttgggctgagaaggaggggggccggaagccttcgacctccaatcatggaaggggggcatgcagttggaaccatgctgccaggccagaagcagtcgacctctgtggatgagacagcaggctggaagaagctcacggactag

SEQ ID NO: 7353 - DNA, 414 bp, Oryza sativa
  Clone ID: PAT_MRT4530_13957C.1
ataaagaccattgggtgggatgttcttaggattcagaactgattttataagaaacttttacagtacatagcagcaacgcaaccgcttgcaattcacggatttattgatggaggcattctttatccgcattgccaacttaagaggattccgccacattataaacgtcttggtagcccttgtattggaggggagtgaatgcaccgaactcatctactctgccatgcatgagcctctgaacctcttctcttgaaatgcgataggcattagctagaacatcagttgggagagcacggaagatggaactctttcctgcaatgtgggtaaccatagagttagggtttgtcttaaatgcaatgtaagcacatccttatctttgtgccttctttacaactacataggggtgtgggacaataa

SEQ ID NO: 7354 - DNA, 315 bp, Oryza sativa
  Clone ID: PAT_MRT4530_13958C.1
gataatttccggaccgccacacataaaatttgtttatcatggccaagaaagaatagaatagacggggtgcgcattattggatcacaattggcaggttggttagcgagtagaacaacacacaactggttacttcgatcggtagaatacgacggatacttattgcaaagcacatagtcaccagtagtccaccacaaacactgagcttacgcacgtcctgctttatgagcacatggcaatcaagctgggatggcatggtgatgttgtggatggtgacaatgaaccataggaggaggaggacaagctggttgacacatt

SEQ ID NO: 7355 - DNA, 2439 bp, Oryza sativa
  Clone ID: PAT_MRT4530_13959C.1
caacacctcgcaatctccgcccaaatgccggatccccgcgggaccacaaaaccccgtaaaaatctccgcctccgccaccgccaccgccgccgacgccgccatggccgccaccgccgccgcggcccacaccctcctccacctcgcggccccgaggaagccctccgcggggcccccactcccgcccgccaccctccgcctccccagccgccgcctcgcccgtctcacggccagctgcagcagcggctccgggaacaacagcgccgccgacttccccaaccccaacgggatcctcgtcgcgcccccgtccgccgcggcggtggcggcggcgtcgtcgcatatcgatgttgacgtggcgacggaggccgacctgagggagaacgggttccggagcacgcggcgcaccaagctcgtctgcaccgtggggcccgccacctgcggcgccgacgagctggaggcgctcgccgtcggcgggatgaacgtcgcgcgcgtcaacatgtgccacggggaccgggagtggcaccggggcgtcatccgcgcggtgcggaggctcaacgaggagaaggggttcgccgtcgccgtcatgatggacaccgaggggagcgagatccacatgggggacctcggcggcgccgccgccgccaaggcggaggatggagaaatatggacatttagcgtaagatcctttgaggcacctcccccagaacgaactattcatgtgaactacgaaggcttcgctgaagatgtgagagttggtgatgagcttcttgttgatggtggcatggctcggtttgaggtggttgagaaattaggaccagatgtcaagtgccgttgcacagatcctggtttgttgctgccacgtgccaatcttacattttggcgggatggtagtattgtccgtgagaggaacgctatgctacctaccatttcatcaaaggattggcttgacatagactttggaatttctgaaggcgtagattttattgcagtttcgtttgtcaaatctgcagaagtaattaaccatctgaaaagctatatagctgcaaggagccgtggcagcgatatagcagtcattgccaagatcgagagcattgactctttgaagaacttggaggagataatccgtgcttcagatggtgccatggtagcccgaggggatatgggtgcacaaattcccttggagcaagtcccctcagtacaacaaaagatagttaaactgtgcaggcagctcaacaagccagtcattgttgcgtcgcagcttcttgaatcgatgattgagtatcctacgcccaccagggccgaggttgctgatgtttctgaagcagttcgtcagcgtgcagatgcgcttatgctttcaggtgagtcagcaatggggagatatccagagaaagctcttagtgtcctccggagtgttagcctaaggattgagaagtggtggagagaggagaagcgccatgaggaactggaacttaaagatgtttcatcttccttctctgacaaaatatcagaagaaatctgcatttcggccgctaaaatggccaacaaattggaggtagatgccgttttcgtctacacaaacactggccacatggcctcactgctctcgcggtgccgtcctgactgcccgatcttcgccttcacgacctcgacatctgtgaggagacgattgaacctccaatggggcctcatccccttccgcctcagcttctcggacgacatggagagcaacctgaaccgtaccttctcgctgctcaaggccaggggcatgatccagtccggcgaccttgtcatcgcgctctccgacatgctgcagtccatccaggtcatgaacgtaccttgagaatcatcatgctcccctctcgtgtttgtttgttctgcccaaaacggaacacggctttagttgacatcatcttaagggcggttttctggtttgaaatttattcgtttgttctccattgtgttagacgacagaaccagagaatgttacaacaataatgctgcaacttccagcgcgttgtaaactctatgctatttagcctgatgtataaggccatgaactgttttgtcgcttactatgataggctatgtatttaccaataaacccttctatttaagctatgtaagaattttcctcatcagaaataaaacaaaacaagagcccagaaaagattctttccccgggccggcgccggccccgctttcgctacatggggcccgttcgcccgcgaccggccggtttaaccgcgccctggaaaccttctgcacaacttagcgtgggagcctctatatcccctgacgtaggaaagcccctcagcgctgcgcagtaacataggggcggacgcgggtcgcccttggtcacggtggtgtgggctcgtcgccgcgggcacgacgccgggcaagggggctgcggtgaggcgatgacgggccagcctggtcgggggg

SEQ ID NO: 7356 - DNA, 357 bp, Oryza sativa
  Clone ID: PAT_MRT4530_1395C.1
agtgatacaagcggaccactactagcccatgagcttgaacgccgacctctagaagagtaaccgttgatactgagctcatcaacacggaatacactacacattgcatccaaacctggtaaactcaataaaagaggtgtgaattgatcataacgagaccaccagagtagtcacaaacaaactgatcagcggagctagatgccatacatgcacaagcaccgctcgctactactggtgaaaaagaggacatggatgatctcgcggaaattccgcatgcataagtggaaagctgacgaggatgatgactgcacattagatggcgctctagatgacgagcacattagcttcgagggctacaag

SEQ ID NO: 7357 - DNA, 248 bp, Oryza sativa
  Clone ID: PAT_MRT4530_13960C.1
tccagtcgtccgccgatgcgtgaactacaatttgcgtaacgaaagaaaaggccgcaggctcaggaccctgcaactgtagctgattgagggcattaataatggcctgaccatgtgctacctgacatcgttcaccgtggaggacctcatggagcaaatcgagatcctgcttcgtaactagtgggtgcactgccatgagataagactggtaatattcatataccgtgagaaccacatatccagaggatact

SEQ ID NO: 7358 - DNA, 1539 bp, Oryza sativa
  Clone ID: PAT_MRT4530_13961C.1
atgaggctcctccgccacaagcccaccggctgcccgcggctgccaccgtcgccgccgttgccgcaggcgcctcccgctgggtactacttcacctccccgagtcgcccggaggccgtccgcttcggccgagtgctcctccgaagcccgccgccgccgccgcggcctgcgcaggcgccgccgtctcggtacttctacacctccccgcagcggcagaaggtagtccacttcaaccgccggcgcgggtcccggtggtaccacgacccgcggaagctcaccacggtggtcgtcgtctcgggcggcgccgcggcggccgtctacttcggcaacctcgagaccgtgccttacaccaatcgcacccacctcatcctcctctcgcccccgctcgagcgccagctcggggagtcccagttcaacaatctcaagaaggagctgggccccaagatcctccccccgctacaccccgacagcatccgcgttcgcctcatcgcctcggaggtcgtccgcgccgtccaccgcggcctcgctggaaggcaccacgacgccttcgccgcggatgacgcctcctacggcgacatctccaccgacgtcgtcatcaagaaccacgaggccggcgcggaagacgtgatgctcggccggtcccgtggcaacaagaacgcgagcgtggctgccgcggcccagcgagacgaggaggttctggatgacagatgggtcaccgagagccgcgaccgtgggaaggcacggggagcacagccggagacgaggcatcttgatgggctcaattgggaggtgatcgttgtcagagatgacctcatcaatgcaatgtgcttgcccggtggcaagattgtagtctttactggactgctcaaccatttcaagactgatgctgagattgctactgtgcttgggcacgaggtggacttgggatttccgggttcatgtgtgattttggttgggcatgctattgcaaggcacgctgctgagatgattacgaagaacttgtggttttggatcctgcagattgtgatcatgcagttcatttacatgccagacatgattaatgcaatgtcgacgctactcctgaagcttcccttctcacggagggtttacgtgctaacaaggaaacggtgggggtcatggcctagccagccgaacaaagctgttcccagacgttaccaagaagccacggagcatggcaatctcacaatagcacgacattttttggccataattgtgtatccggaacaattatggttgtttgatcttgtcattgtttttgtgcataattggaagatggagatagaggcagatcatattgggctgctggtacttggtgctgctggttacgatccacgcgtagctccctcagtctacgagaaactaggaaagatcgcaggagattcaacgttgagtaattacctctccactcatccttcgagtaagaaaagagcacagcttttgaggcaagccaaggtcatggatgaagcactgagattatacagagaagttagctctggccaaggcactgaaggtttcctgtag

SEQ ID NO: 7359 - DNA, 1975 bp, Oryza sativa
  Clone ID: PAT_MRT4530_13962C.1
atgggcaacagcttggcgagcctggcgacgccgtgcttcgcggacgccgccgccggtggtgggcgcgggcgcggtcaccacgccgccggcgacgacgccgttgcgttcgacgacgacgacgccgcggggggctgcaacagcatcggtcacattctgagcttcgatggacgcgatgcgccggcgttcgccatccatggcgtgttgctgccgtcgaacccgtcgacgatggcctccaccggcggcggcggcggcggcggcgcctccgtcctcaacgacggcgcgctgtccatcgggtcgtcgtcgttcgacagctccaactccttctcgttccggacgctccagccgcggcagtactccgggccactggagtactgcaccacgtcgccgtcgacgtcgggcgcgtcgtcgtcgcggcagctcggcccgcgcaccgacaagcagatcctcaacgacatctacgccaaccggcaacgccgccggtgtcaggggtccaaggggccgccgctcctcggccgcctccgcaaggcggtggcgtcgctgctgcgcgccgggccgtgcggcttccccgagcaggaggagcccgccgccatgatcaacggcgtcggcgtggtgaggaacggcgaggagagcatcagccggaacgtcgacgcggcggcggcggacgacggtgcggagagggtgcagtgggcgcgcggcaaggccggggaggacagggtgcacgtggtggtgtcggaggagcacgggtggatgttcgtcggcatctacgacggcttcaatggccccgacgccaccgactacctcgccgacaacctgtacgcggccgtgtgccgcgagctcaacggcgtgctctcggaggacgagccggatccaccggaggcggcggcggcggcggggcggtgcaacgggtgcggcggagcggcgcggcaccgcgaggtgctcgacgcgatggcgcgggcgctgcggcggacggaggaggggtacttcgcggaggcggaggcgcgcgcggcggagtgcccggagctggcgatgatggggtcgtgcgtcctcgtcgtgctgatgaagggcgccgacgtgtacgccatgaacgtcggcgacagccgcgccgtgctggcgcaccaggccgagccggacctgtcccacgtcgtgctgccgcggggcagccaccacgatggcgacggcgacctcgccggcgtgaaggaggcgatcaagcggcagttcgacgagtgcgagatgggggagctggcggcgctgcagctcaccatggatcacagcaccaatgtgtacaaggaggtgagaaggatcaggagtgagcacttggatgatcctggctgcatcaccaatggcagggtgaagggttgtttgaaggtgacaagagcgtttggagctggctacctaaaagagccccgttggaacaaggctctactagaggtgttccaggtggattatgtgggtagctcgccgtacatcagctgccgtccgtacatccgacaccaccggttaggggcgcaggacaagttcttgatcctctcgtcggatggtctgtatgactacttcacaaaagaggaggtggtggcacaagtggaggccttcaccgccggctaccccgacgaggaccctgccaagtacctcagccaccagattctcctccgggccgccaatcaagctgggatggggttccatgagttgctagagattcagcaaggagatcgacgacagtaccatgacgatgtctccatcattatcatctccttggagggaaaaatttggagatcatcacaatgaactaatcctgtccatgtactagtgattaatctctaccaccaatattgcattggtagcatacatgatgcaatctacaatgtacaaaggatcaatcaatcactgagggggagtagcacatgcaatttttttcccctcttgtaagtcaaaatcaatcacaaatcaatgagcaagttttggcggcagtttatttttt

SEQ ID NO: 7360 - DNA, 2124 bp, Oryza sativa
  Clone ID: PAT_MRT4530_13963C.1
aaaagaaattagaatcctttaaaattcatccaaaatgaataggcgtaaatgagttagggaaaaaaaagcaaagaaggaaatggtgaaaaaggaagagaggcccatgcaggcccaccaaccaccggatctcgatgggaggagtgggccacctcttgtccatcccctcaatcctttcccttccttcttcaaagtcgagactcgagagagacaagaggagaagagagagtgtgggcgctcttaaataggagagaaaaagaaaaccaccgccaccgacatcgcctcgcctcgtaacccccaaatccagcgcctcccttcctccccaataatcgaatccaatccatcttccacgcgcattccggatccgcggaccaagggaggatgtcgtcgtcgtcgtcgccgcccgccgcctccgccgccgcgaggctggatctggacggcaaccccatcgcgcccctcaccatctgcatgatcggcgccggcggcttcatcggctcccacctctgcgagaagctcatggccgagaccgcccacgtcgtctacgccgtcgacgtctactgcgacaagatccgccacctcgtcgaccccgcccctccccacctccatggccgcatctccttccaccgcctcaacatcaagaacgactccaggctcgagggcctcatcaagatggccgatctgacgatcaacctggcggcgatctgcacgccggccgactacaacacgcgccccctcgacaccatctacagcaacttcatcgacgcgctccctgtggtcaagtactgctctgagaacaacaagcgtctcatccacttctccacgtgcgaggtctacggcaagaccatcggcagcttcctccccaccgaccaccctctccgcaaggtccggggtgaatggacctggtgaggaacctgaattttatgtactgaaagaagatgaatccccctgcatttttggtccaattgtgaaacagcgatggtcttatgcatgtgcgaagcagcttattgagaggcttatttttgctgaaggagcagaaaatggccttgagttcacaattgtgagacctttcaattggattggaccaagaatggactttattcctggtgttgatggtcctagtgagggtgttcctcgggttttggcatgtttcagtaacaatctcctgcgtcgggagcccctgaaacttgttgatggtggccagtcccagagaacttttgtttacattaaggatgccattgaagctgttcacttgatgattgaaaatcctgctcgtgccaatggtcaaatcttcaatgtcgggaatcctaacaatgaagtcactgttaggcaattggctgaaatgatgacagaggtctatgcaaatgtctcaggagagccaccactggatgaacctatgattgacgtgagttcgaagcagttctatggtgaaggatatgatgatagtgataagaggattcctgacatgaccataatcaacaagcagcttggttggaatccgaagacccctctcaaggatttgctggagacaacattgacctaccagcacaagacttacaaagaagctatcaaaaggcaaatgtcacaggcttcagcgtcgagttagacaacacgctccaatccatagatggtgatgttggctcttgtagagcactgtcagtggctataatcgtttggaagtggaatacgtatactcaagtaatcctttttgtgcatctagtcactcctagatccctaccaacttttaggtttcctcctgtgtaagccggcaaggggttatccaccatatctgtggcagagtcgatgtattcatttgtacctttggttgctcatcctgtgtcattctttcttattgcttcgtcggtgagagatgttcttgttcagtatagatgattgttcaaggaaattatgggctggaagctataatggttgtgagttaagttctttgagtttagtacagcaactagtagtaggctgttagaagcaaaatctgcaaatttcactacttggtagttgtgattcatatgaccgactaatttgtggtaacttgtttgttccatgcgcatatatctcctattattctttatcctctgggtgtttttggtacatatcctgatattttttggaatc

SEQ ID NO: 7361 - DNA, 291 bp, Oryza sativa
  Clone ID: PAT_MRT4530_13964C.1
tttttattcagtcatcattcgatgaactggagaagatcacaacacctggtgatgacatgaatggggatatgtctagcttgtctacgctattcgctcataggaaaacggggcactttatgaagggtgatgctgtcattgttatcaaaggtgatccgcaaactagggagggttgggttgagaaagtaaaggctgagactgctcacatcacaacacaaagacgtgatctaccgaaaacgttagccttcaatgagaaagagatttgtaagtataccaaacccggagatcatgtta

SEQ ID NO: 7362 - DNA, 792 bp, Oryza sativa
  Clone ID: PAT_MRT4530_13965C.1
atgccattcacatatcttggtttgctaatggggactacaagacctaaagtgattgattttgtaccacttgttgacagaattgagagacgactcacctccagttctatgtttttgccttatggaggtagattgacccttgttaactctgtgttatatgctatccctagatattacatgtgttctctccaattaccaatcactgttattgaagcaattgacaaggctaggaagaactgtttatggagagggaatgatcctagctcgaaaagaaagtctctggtgacctggcataaagtctgtagactgaaggaaaaaggtggcatagttctgttttgggatgacctatggaatggtcagattcggagcaccacatacccaaatctttgtgcccatgctttcaccagagatgaatctttggctatcacctgtgcaaaaccttttgaagattgctttaagttgcctctgaatcaggaagcttacacagaattcctgcagcttaaaggggagttggatgatctgtctttggcaagtcagcatggggacaattggagttttatatggggcatgactacttacacctccaaagctttctataagttgaaattttcatccatgcaacccctaaggccgtttcgatggatctggaagactaagtgtctgatgaagataaaagttttcatttggctactcttctctgataggctgaacaagagggacatgttggatagaagaaactgtgcccctttaaatgctgaccttttgtcacaccccgaagttctttcccaagcctaa

SEQ ID NO: 7363 - DNA, 190 bp, Oryza sativa
  Clone ID: PAT_MRT4530_13966C.1
gatgcgggagatctccagcggatcttcttcgtccctgaggatcggtggtggttgccggtggtcgcctcgaggtggtgggtgccagatctggtctgcaggtggttcgggatcaccggatctggaacccccgggctcctaccactgcctccttcaccgtccgagctccttcaccggtcgcctccccccgtaa

SEQ ID NO: 7364 - DNA, 645 bp, Oryza sativa
  Clone ID: PAT_MRT4530_13967C.1
tcagcttagaaattctggttcatgaatttctaggcgagacatcctagcttcctccacgcccggaatccccgcctcatcccctctcgcaggcgatcgatcctccaccctcccgtacgcggtaggcctcccgcctccgccaatcaacgccgtcgtcctctcccgtctcgccgatgggatattgacccggcaccaacgtctttctcgctttcgtctccccgcgccgacgagagtggcgtcccgaccgtattcccactttctcagttccccacgagaaaatggacatttcgccatgttcaaaacgcggtttcgctctacacccccgtcgtcgccgccacccgcgatggtgtagcagaggcgaggggcgggcgccggcatgttttcggcgacgtcctcgtccatgaggtcgtcgtcatcagggtcgaagtcgaccgcctccacatcagcgtcccggcagagctcctggcgcaccgccagcgtccgcgccgacctccactcggtcttcgccttccccgggttgccgagtttcttacgataacctgtcataaccctccaaccgaagtaggatacggaggtgtatccaaccccaggaaattgtatgtaggaatataaactgcgggggagacgcccatactgagctgtcaccat

SEQ ID NO: 7365 - DNA, 2397 bp, Oryza sativa
  Clone ID: PAT_MRT4530_13968C.1
atggcatccaagctgagtttcaagcgaatggacagcattgccgagacaatgccagatgccctacgacaaagccggtaccagatgaagagatgcttccaaaggtatgtatcaaagggtaagaggctcttgaagaaccagcagctcatggaagagctggaaaagtcactagatgacaaagttgagaacgagaagcttgtcgaaggctttctcggttacatcatttgttcgacacaggaagcagtagtactcccaccgtttgtggcattcgctgtcagaatgaatcctggtatctgggagtacgtcaaagttcactctgatgatctttctgtcgaaggaatcacaccgtcggagtatctcaagttcaaggagaccttatacgatgaaaaatgggccaaggatgacaactcactggaagttgatttcggtgcccttgacctctcaacaccccatttgacactgccctcgtcaatagggaatgggcttcagtttgtctccaaattcatgtcctcaaagctgggtggcaaacctgaaagcatgaagcctctgttggactatttacttaccttgaattaccgtggcgagaagttgatgattaatgacaccatcgacactgtgagcaagcttcagacagcactgctacttgcagaggttttcgttagtgggctgccaaaatacacgccttacttgaagtttgaacaaagatttcaggagtgggggttagagaagggatggggtgacactgcggagaggtgcaaagaaacactaaattgtctgtctgaagtgctacaggcaccagatcctacaaacatggagaagttcttcagcagggttccatccatattcaacattgtcatcttctctattcatggttacttcggccaagaaaaggttcttggattgccggataccggtggtcaggttgtctacatattggatcaagtcagagccatggaagaggagctgcttcaaagaatcaagcagcagggtctgcacgtaacaccgaagattcttgtgcttacaagactgataccagatgccaaaggcacaaaatgcaatgtggagcttgaaccagttgaaaatacaaaatactcacatatactacgtgtgccattcaagactgaagatggcaaggatttgcgccagtgggtgtcccggtttgacatctatccttatctagagagatatgcgcagaactcttgtgccaaaattctcgacattttggagggcaaaccggacttgataattggcaactacaccgatggcaacttggtggcatccctcttgtctaacaaactatgtgtcactcagggaacaattgcacacgctctggagaagacaaagtacgaggattcagatgttaagtggagagagatggaccagaagtaccatttctcttgccaatttaccgccgatatgatttccatgaacaccagcgacttcatcatcactagcacttaccaagaaattgctgggagcaaagagaagcctggccaatatgagcaccactacgcattcacaatgccgggactatgccgctacgccacaggcattaatgtattcgacccaaagttcaacattgctgcgcctggtgcagaccagtccatctacttccccttcacgcagaagcagaagcggctgacagatttacacccacagatagacgaactgctgtacagcaaggatgacactgatgaacacatagggtatctggcagacaggaacaaaccaatcatcttctcgatggcaaggcttgataaggtaaaaaacataactgggcttgtggagtggtatggccagaacaagaagctgagggacctcgtcaatctcgtcgtcgtcgcggggctcctggatgcttcgcagtccaaggatcgagaggagatcgaggagataaacaagatgcacaacctgatggacaggtaccagctcaaaggacagatccgctggatcaaggcacagactgaccgtgtccgcaacggtgagctgtaccgttgcattgcagatacaaagggtgcatttgttcagcctgcactgtatgaagcattcgggctaacggtcatcgaggcgatgaactgcgggttgccaaccttcgcaacgaaccagggcggaccagctgagataatcatcgacggtgtctctggtttccacgtaaaccccatcaacggcagggaggcaggaatcaagattgcagatttcttccagaaatgcaaggaagacccaagttactggaacaaggtgtccactgctgggcttcagcggatctacgagtggcaaaggctgtggcaagagcaggggatcaacaggctcggcaaaccacaacaggcgtggcgcctaaaagccgcagactcggatgcaaaggatcttaaccaggttagccgggcagaagcctccagtttctga

SEQ ID NO: 7366 - DNA, 443 bp, Oryza sativa
  Clone ID: PAT_MRT4530_13969C.1
tgtcgacgtttgatgtcgcgattccggtatttgcatagtatggggatcgttggtactaggatatacgcgagacagtacaatatttggggtagcctatctaactgttgtcgacatggcggtctgaaggtctgactcgtagtcgacaacagggtagctttcctcctcgagttcgcatccggcgagatcagagacaacgctatatctctcctgatggtatctgtaggcaccataggggactagccatgcctatctctaaagtcgatatccggcgtcttgtcttggcgtatgttggcttgtatgttgtggtttctgttgttttgtgtatgttgattcttccctctcctcctaggggccttgtatttatacccataggtgtccccttgtccaagtagaactagggaaaccaatatggatacaatccgagtagtccttatcgtttctat

SEQ ID NO: 7367 - DNA, 415 bp, Oryza sativa
  Clone ID: PAT_MRT4530_1396C.1
ttgttttttcaaggaagaacgaacgagattaggcaaccaatttagacaactctgctccagtccaacaggattgagccaccgccgccatcgccttcaagttgccagaccttagcttcttcagaaggatacatcggtaaatatgtgaatctcacctacccgctaatttttttcctctctcactcgcaacaccacacatttgtatacaggtcacattacacggcccattttggtccataataccgaggattagccttgatttgcctggccgggcgcacagtctcgctggactcccttggctagatcagctttaacggaagcccgtaggaaactggttcttgcgcattatgggtgatccctcctggcacaggataagtgctcttgacacaaaacaaatgtacctggctcccggaccaca

SEQ ID NO: 7368 - DNA, 255 bp, Oryza sativa
  Clone ID: PAT_MRT4530_13970C.1
ctatctaacagttgtcgacatgtcggtctgaaggtctgactcgtaatcgacaacagggcagtcttcctcctcgaatccgtgcccggcgagatcagagatagcgctttcgtatctcctgacggtatccggagacaccgtaggggaatagccatgcctatccctgaagtcgatatccggcggcgtgtcttggcgtatgttggcttgtatgttgtggcttcttgtgggtgtatgttgattgtcatgagtgtcttccat

SEQ ID NO: 7369 - DNA, 413 bp, Oryza sativa
  unsure (1)..(413): unsure at all n locations
  Clone ID: PAT_MRT4530_13971C.1
gcgtcggncggttggctttttctctgggtcccgggagctggttcctttgntggtttangggcgtgtgntggtgttgctgnngtgatctggtntgtntngngagtgccnnttccctgcggcgtgttgangaagggatgcangatctgttctggttgccntggtccgntcacttggcagtgccagaaatggtgtgggtgtcgtctctggcngcgggntccggccccgttttgctnggccgngctggngangggtnttgtnngntctggccgttgccccccngagctctngtntnggcgttttcttctgtgggtcttccgcccttccgnnnntgctgngggctcttntccttgnnttnagccccgcgtcggtcgcttggttccgtttcctcttggtgagcttgttggacccgacct

SEQ ID NO: 7370 - DNA, 791 bp, Oryza sativa
  Clone ID: PAT_MRT4530_13972C.1
atggaaacgacaaagactactaggattgtatccatattagttccctagttctatttggacaaggagacacctatgggtataaatacaagaccccctaggaggagaggggggacaatcaacacccaagagaatcaacacccaacacaatcgacatagaagccacaacatagaagcctacatacgccaagacacgccgccggatgtcgacttcagggataagcacggctagtaccctacggtgtctccagatactgtcaggacagacgaaagcgctatctctgatctcgccgggcacggattcgaggaggaaggctaccctgttgtcgactacgagtcagatcgtcagaccgctatatcgacaacagttagagaggctacctcaaatattgtattgtctcgcgtataccctagcaccgacgatccccatactatgcaaatactagaacaacgacatcaaacgtcgacatgtcgccggctcatcccgttctccacctttgacgcgtccctcgccttcgcgtgtcctcctcctccacggcggcagatggtcgacgagcccggcgaagcgcgcggcgagcgacggcggtgacttcgacgatggtcgacgagcccggccgcggcggcttcgatggcagcgacggcgacggaggcaacagcaagaaacggtggtggcttcgacgacgattgatgagcccggcgcttcagaggcgggctcgagcgggaggccggcgggagcgcggaggccgccgccactgccgttgagggcgggagtggcgtccttggccgacgataac

SEQ ID NO: 7371 - DNA, 479 bp, Oryza sativa
  Clone ID: PAT_MRT4530_13973C.1
atggaaacgacaaagactgctcgaattgtatccatattggtttccctagttctacttggacaaggggacacatatgggtataaataaaaggccccttaggaggagaggggacacaatcaacatccaccatagaagacacggaacatagatcaagacagaagatcaatatacaagccaacatacgccaagacaagacgtcggatatcgacttcagggataagcacggctagtcccctacggtgtctccggatactgtcaggagagacgaaagcgttatctctgatctcgccgggcacggattcgaggaggaagactactttgttgttgactacgagttagatcttcagaccgccatgtcgacaacagttatataggctaccccaaatattgtactgtctagcgtatatcctagtaccaacgatccccatactatgcaaataccggaatcgcgacatcgggtaccgagctcgaatatcagg

SEQ ID NO: 7372 - DNA, 170 bp, Oryza sativa
  unsure (1)..(170): unsure at all n locations
  Clone ID: PAT_MRT4530_13974C.1
ctccagctccgcgtccccgatagtcgcctcctcctcaaaacagcttcgatatatactgctgctggtggtggnccttcccnntctcccctctcccctcnctccaactacacctccacctccaccacccctntctctaagaataaccccgctccctctcacttctaactccc

SEQ ID NO: 7373 - DNA, 767 bp, Oryza sativa
  Clone ID: PAT_MRT4530_13975C.1
agcatctccgcgggggcgggggtgcctcctccctaaggtgaggccgccgctcggccggccagatcgcccgggcagccgcaggcagcggcagatcgggcggagggggaaagcgggagggggttgcttcgagcgccttcgagaaggtgggggaagagagaggagagagagagcagtaaatgccgccgtgttgggaatcgggaatggaaaacggaagagaagctgcagctgctggctgctgcgggacggagagggcaggtgtgcgatatatacggcatcgaggtggaggagacctgcccctgtgcagacggagtggggaaaatagaaaatgtcgacgtttgatgtcgtgattccggtatttgcataatatggggatcgttggtactaggatatatgcgagacagtacaatatttggggtagcctatctatctgttgtcgacttggcggccataaaaccatcccgtagccgacaacagagtagtcttcctcctcgaatctgtatccggcgagatcaaagacagcgctatgtctctcctgatagtatccgtagacaccgtaggggactagccatgcttatctctgaagtcgatatccggcgtcttgtcttggtgtatgttgacttgtatgttgatcttgtgtattgatctattgttccgtctcccctctcctcctagggggccttgtatttatacccataggtgtccccttgtccaagtagaactaaggaaactaatatggatacaatccgagtagttcttgttgtttccat

SEQ ID NO: 7374 - DNA, 591 bp, Oryza sativa
  Clone ID: PAT_MRT4530_13976C.1
cggcacgagggcgacgagcactccgcgtaggctcgtcgcggccacgtacgccatcccgagctcgggggggtaccccggtcggaggcggagcgcttgggggccggggtttaatcgtgcggaggactcggtagggctcgccatacctcgcgccgtccggcggcgcagagcgcggcgtcgccgctggggagaaggacggactcaacgagacgagcgagcgacggccgacaggcgaaggcgttctcgcttcttggcctctcgccgttgaattggaggcccacattgggcttgttttgtgtgttactagcatcaccaagagttcccctactactcccaatttcaaattttggggtttttcgagcaaaaaaaatggatccaacagatatccaaaccagcttccaaaaattttgagaccctaatcccgtgtttccgttctccaccagtagagaatacctcccgctcccaatccactgcagccgggcagttttcgcgcgctgccgaggtgcttggttcccccatctccattgattccccatctcgtgcgattggcggagctgatgagtgacgacagccacgggcgaacgggaggtggca

SEQ ID NO: 7375 - DNA, 208 bp, Oryza sativa
  unsure (1)..(208): unsure at all n locations
  Clone ID: PAT_MRT4530_13977C.1
caactccacttcagccgtcccctccgtcgcgacggccatgcgctctttgcggatcctctccantncnatngntnaangganttcngnggcngtaaanngccnantgcctacccttaccctacctgtgcagtgtgcaggtngtgcccggaatccccgtgtcgcacccncctcccccttcccacaggcnatcaaggctcagctcgacttc

SEQ ID NO: 7376 - DNA, 783 bp, Oryza sativa
  Clone ID: PAT_MRT4530_13978C.1
agcaagggcatgaccgtcgaggagaccgtcgccatcctcggcggccacacgctcggcggcggccactgcgcaaccgtcgacacggcgcggcgcgggcgcgggcgctccgacgccgcgttcgaggcggcgctccggctggcgtgccccgccgccgcgccgcgggcggtggcggcggccgtgcccgtcctcagcgacgcgacgccgagctggttcgacaacctctactactggaatgcggcgtccgggcgcggcatcttcgccgtcgacgccgaggaggccgccgacgcgcgcacggcggggcacgtgcggcggttcgcggcggacgggcgccgtgtgtcgacgtttgatgtcacgattccggtatttgcatggtatggggatcgtcggtattaggatatacgcgagacaatacaatatttggggtagcctatctaactgttgtcgacttggcggtctgtaggtctgactcgtagtcgacaacagggtagtcttcctcctcgaatccgtgcccggcgagatcagagacagcgcaatgtctctcctatcagtatccggagacaccgtaggggactagccgtgcctatctctgaagtcgatattcggcgtcttatcttggcgtatgttggcttgtatattgatctattgttagttgatagtggtgggtgttgattgtcccctctcctcatagggggtcttgtatttatacccataggtgtccccttgtctaagtagaactagggaaaccaatatggatacaatccgagtagtacttgtcatttccat

SEQ ID NO: 7377 - DNA, 1081 bp, Oryza sativa
  Clone ID: PAT_MRT4530_13979C.1
ccaccacctccaccgcctccgcctccgcccccgccccctcttccgccgccaccaatgtcttcggcggccggtgaaccctcctcctcctccgccgccgccgccgccatctcttgctcctcctccaacgacgacgagaagccaccgccgtctctggaggggaaggagctgcggcgagtcgaggaagaggagcccgccgccgccgcgcgccccgagaagctcacggaggggtcctcgcgcgccgctgaggctgaggaggaggaggaggtggtggaggatgaggaggacgatgacgaggaagatgaggggaaggtggcggaggccatcgacctcggccccagggtcagcatcaaggagcagctcgagatggacaaggaggatgagagccttcggagatggaaggagcagcttcttggcagcgtcgatttgaactcagtcggagagtcactggagccagacgtgaggatcacaagcctgtgcatcctgtcaccggggcggccggacgtccttctgccgctgcccgtggagccgagcaactccaaggaaccatggttcaccctcaaggaaggcagcacgtacaggctcaagttcaccttctctgtcagcagcaacatcgtctctggcctccgctacaccaacaccgtatggaaggccggcatccgagtggacaaaaccaaggagatgcttggcacgttcagccctcagctggagccgtacacttacgtgacgcctgaggagacgaccccctcgggagtatttgctcggggatcatactctgcaaaaacaaagttcgtcgatgatgaccggaagtgctacctggagatcaactacaccttcgacatccgccgggactggccctgcaagtcctgagaagctggacaccaagcagaggaggatggcaggcatctgtgaaagaggcatgttcaggctgccctgtccctgtctgctctgatcttttcagagtgtaaggatgattggttacagcgattgtttgtagacacatagtagattcatttgtcaggtcagcattgttaatctgtgccaaaaaaaaaaaaaaaaaaactcgagactagttctccctggc

SEQ ID NO: 7378 - DNA, 2034 bp, Oryza sativa
  Clone ID: PAT_MRT4530_1397C.1
atggcgcgcccccgcccgcgccgcccggcgccggcgaggtcccccgacccagccgccacaacgccgcgccaggcggcgcccggctcccgccaccggacgccgcgccgcggtggccgtggccggctgctcgtccagagcccctccctcgcctccgcgcgccgcgcggcggcggcggcggcgccgttgccggtggccccgcccccggacaccccgcctctgcggtggcccgcggcccgcggcggggacgccgtcgcgccgtgcggtgccggagcgggcgcgggcgcgtcggtgaggaagattgcggcggctctctggcgcgtgcatccgccgcaggcgccgccgccgacggagtcccgggaggcgccgcgccgacggttcgagcctagcccaaagcaaccgcatacgcctgatcgttgtaattattataaagcgcttcttgaaggtaggacaggaagtaagcctcttggcaacgacatcattcaggaggtgggagcttactctccatcccctcgaattgaaatggaggtggcaacaaagtgggaccgtcggggcctcaacaatttgaggggtactgatggtgctttgtgtgaccgttatccggtatctgccgatgcagaaatctctgcgttaaaggcagagcttttgcaggcccacaaccggatccatgagcttgaagctgagagtcgatctgcaaagaagaagcttgagcacccggtggggtcccctgctgaggaaaaggcatcctggaggagcaaggagaatgataaggttagaaacatcttagatgctgttaaagaggaactgaaccgggagaggaaaaatcgtcaaagggcagaaatcatgaattccaagttggtcagtgagctatctgagttgaaatcagcagcgaagcgatatttgcaagattatgaaaaggaacggaaggctagggagttaatggaggaggtttgtgacgaattagcgaaggagattgcggaagacaaagctgaggttgaggccctgaagagtgaatcaatgaagatgagagatgaggtggaggaagaaaagaagatgttgcagatggcagaggtttggcgtgaagagagggtacagatgaagcttgttgatgcaaagctgacactggacagcaagtattcacagctaagcaagcttcagtctgaccttgagtctttcctcagtttccaccaaggcaacggtgtgaacaaagaagcattaagagatggagaaaggctcagggaagcaatttgctccatgaagtttcatgacatcaaagagttctcttacaaaccaccacctccttcagaggacatttttgctgtgttcgaggaactcagagagagggatgatgctaatgagaaggagattgggcagtgtaatggaggtacccccaagaggcatgcaacgaagatccatacagttagtccggaaacagacatcttcttggaaaaaccattgaacaaatattccaatcaactgtgtgatagaaatgaggaggaagatgatagtggatgggagactgtcagccatgttgatgagcagggctctagcaattcaccggatggaagcgaaccatcggtaaatgggttttgtggtggaaatgatgcatcggtgagtggaacagattgggatgacaacaggtcaaatagcgagatcagtgaagtctgttcaacaacagcagagaagtaccggaagaaggggtcttcatttggcagactgtggagatcgtcgaatggtgatggccataagaagacgggatccgagttactgaacggcaggctctcaagcggtcgaatgtcaaatgctgcactttctcctagcttgaagaacggagaagtgtgcacagtttcaccaagcgtcggagaatggagtccagacctgctaaaccctcatgtggttcgtgccatgaaaggatgcatagagtggccccggggcgcgcagaaacagaacacgcataacctcaagtccaaacttctggaggcaaagctcgacgggcataaggtccagctgcgtcaggcactgaagcagaagatataa

SEQ ID NO: 7379 - DNA, 505 bp, Oryza sativa
  Clone ID: PAT_MRT4530_13980C.1
aaattgtcttctgccttaaaggactaggatttggctggctcatattttggattgcagttttcggtccccattgtcgatgtttgatgtcgcgattccggtatttgcatagtatggggatcgttggtactaggatatatgctagacagtacaatatttggggtagcctatctaactgttgtcgatctggcggtctaaagtgctgactcgtagtcggtagccttcctcctcgaatccacatccgacgagatcaaagacaacgctatgtctctcctgacagtatccgtagacaccgtaggggactagccatgcttatctctgaagtcgatatccagcgtcttgtcttggcgcatgttggcttgtatgttcattttgtgtcttgatctattgttcagtgtcccctctcttcctagggggccttgtatttatacccataggtgtcctcttgtccaaatagaactagagaaaccaatatggatacaatccgagtagtccttatcgtttccat

SEQ ID NO: 7380 - DNA, 297 bp, Oryza sativa
  Clone ID: PAT_MRT4530_13981C.1
ccctcgggcagcgccggcggatggaggaggagccgtctcccgaatggggagaagccgaagggggaggccaccagtggcattttttttattttcgctaaaaatatttttacaagcgggtggatcaaccgcctacgaaaatgatttttgtaggtgccgttgggcgttcgcaagcctttacgtacatgcgctcctttcccccgcctggaaaaactacttttgcccgcctagaaaaatgttttttctagtaatgaatggttttccgacaaaaaaaaaaaaaaaaaaaaaaaaaaaaaaaaa

SEQ ID NO: 7381 - DNA, 635 bp, Oryza sativa
  Clone ID: PAT_MRT4530_13982C.1
tgtcgacgtttgatatcgcgattccggtatttgcatagtatggggatcattggtactaggatatatgcgagacagtacaatatttgaggtagcctatctaattgttgtcgacatggcggtctgaagttctgactcgtagtcgacaacagggttgacttcctcctcgaatccgtgcccggcgagatcagagatagcgctttcgtctctcctgacagtatccggagacactgtagggaactagccgttcttatccctgaagtcgatatccggcgtcttgtcttggcgtatgttagcttgtatgttgtggcttctgttgttccgtatattgtggtgggtgtatcggcggtgagattcgatgccccaggcccttcccggggggtcttgtatttatacccataagtgcccccttgtccaagtagaactagggaaaccaatatggatacaatgtgagtagtccttgtcgtttccatgtagaactctggttgtctttccttatccggaactcccttgaggtcagtttcctcgcccgccgtcgccatcgccgccgccttcccctccaccgccgccctccccaccaccggatctgtcgccgtcgcccgagcccgcctccggattcgccgctgccaccgagccat

SEQ ID NO: 7382 - DNA, 808 bp, Oryza sativa
  Clone ID: PAT_MRT4530_13983C.1
atggaaacgacaaggactacttggattgtatccatattggtttccctagttctacttggacaaggggacacctatgggtataaatacaagactcccaaggaggagaggggacacgagacaatcaatacacacggccacaatcaatatacacggaacaacagaagccacaacataaaagccaacatacgccaagacaagacgccggatatcgacttcagggatagacacggctagtccccaacggtgtctctggatactgttagaagagacaaaagcgctatctctgatctcactgggcacggattagaggaggaaaactaccctgttgtcgactacgagtcaaaccttcagaccgccatatcgacaacagctagataggctaccccaaatattgtactgtctcgcgtataccctagtaccgacgatccccataccatgcaaataccggaatcgcgacatcaaacatcgataattatcttaaaagaaaaccatccacaaccgactcagtacattgtgccaactctcacagccagaaatcaaaatcgatctagctagctagctagctaacactctgtctaatcgatctagccaacttcaaaggcgtgttgggaaaaggccgaccgaccagcctgatcggtcacaaacccgtacgtgcgtacgtgcagccgtgcaatgcaaagcgaagcaaaagcgtacgttcgcacgcgacgggccacgtacaaaaccagcggcggagcgagcgatggtgggcctagcccagcccagctacgccgtggccgcacccgcacgtgtgcgtgcgggctactgt

SEQ ID NO: 7383 - DNA, 317 bp, Oryza sativa
  Clone ID: PAT_MRT4530_13984C.1
cacaaacaggattattgataaaagaagggaagtggacttggagtgcatacacgtttggtttttctggtccgcaaatttatttgatgaaattattcaagacttttttaattaaatgctccccgcatacacaccttttatatcttgggacaccacccgtgttctctcgggagaacatcaacaggctctatggcagcatctaagtttgactcatagaaaaaggggccagatacacggtgacgcggggaattgtgaacaactcgatgaagagtggggggatatattccatttgaccaaacctttagcatgtgaccaatgtt

SEQ ID NO: 7384 - DNA, 492 bp, Oryza sativa
  Clone ID: PAT_MRT4530_13985C.1
cgtatggaggtgacagtgagagtgcaggatgtttgtaggaagtttaatagtgtcgacgtttgatatcgcggctatggtattttgatggtatggagatcgttggtatcagggtatatgcgagacagtacaatatttggggtagcctatctaactgttgtcgatttggcggtctgaagtgctgactcgtagtcgacaacagggtagccttcctccttgaatccgcatctggcgagatcaaagacagcgctatgtctctcctgacagtatccgtagacaccgtaggggactagccatgcttatatctgaagtcgatatccggcgtcttgtcttgactcatgttggcttgtatgttgatcttgtgtcttgatctattgttctgtgtcccctctcctcctagggggccttgtatttatacccataggtgtccacttgtccaagtagaactagggaaaccaatataaatacaatccgagtagtccttatcatttccat

SEQ ID NO: 7385 - DNA, 552 bp, Oryza sativa
  Clone ID: PAT_MRT4530_13986C.1
atggccggcgggtctcagtcgtggtcgacgacggggtcgtgcggcagcgaggccttgcagcggcagctcggctcggcaggacgtcgtggcgtgcggcggcggtgggacgtcgcggcgtgcggcggcgagttcagcgcgcggcagccaggtcagcagcaggcggcgtggctagggatggcaattttccccgcggggccgggtcccctgcggggacccgcccctacgggggcgggggcgggggcgatttcagacccgcgagcagccaccatctccacgactccaccggcgggcgacggcggcggcagccaaggcacgcggcggtggcggccaaggcgcgcggcgacggcaaagacgcgcggcgacggcagccaaggtgcggcggtggcggccaaggggcgcggagacggtagcaaaggcgcgcgcggtggtggcggcgtctacggacaggcacgggcggcggcatcgggcatgctcgccgtcctcgttgccgtcgtccagctcgacgtcctcgtcgttgtcgtcagctcgccgttcaccggcccagctgggtag

SEQ ID NO: 7386 - DNA, 734 bp, Oryza sativa
  unsure (1)..(734): unsure at all n locations
  Clone ID: PAT_MRT4530_13987C.1
ctcattgtcatatttttgcttgataaaaccatgaggtacgaaaaactccccctcaaacaatgccaaaaggattcacgaaaaaaaacacaaactcccccctcaaattaacctctaattctccccgaagaaaaatcaagaagaaatcaaagattttgaaaaagacatccaattgccaatgaaaccaccaagattcttatgaattgatattcaaccactcgtataaaccaaaaccactacctcaaacactagcacttgaaaagctaataaacgaggaagttaaaaccatttttttttagttagataatattttgataaatacggtctacatttgttttaataaacagagttacaataaagttttagttatcccttgttgaatcccattagggtggctttaatagaaaaacaccccccccnccaagaatgaaacanttaaaaattgaattnggngtntaatttccccccnacaaaangaaaaaccttcccaanggttccttttntggaaggccanaantggnctccccccccccccccaangnantcnttttggaaaaacntttttaaanccaatttntnttttgaaattttttaaccntttnngccntncncttgcnaattngggnaacnttttccatccngggccgggattttnttttaangcccccgggaccccttttccttttnggngtttcacnggggtacnggcncttcccnttttaattttcccccccccn

SEQ ID NO: 7387 - DNA, 480 bp, Oryza sativa
  Clone ID: PAT_MRT4530_13988C.1
aaaaaaaaaaaaaaaaaaaaaaaaaaaaaaaaaaaaaaaaaaaaaaaaaaaaaaaaaaaaaaggaaagaaaaaaaaaaagaaaaaaggaagggggcggccgcttttccggtcccacgttcgcgtccgcgcgctggcatcgctttttttttttttttgcgtgccctaatttcatgtccctggccgtccttctacaacgctgggacgggccatgccttgcccttcctcaatctggatcgcccccatgcccatccccctttctgcggttggggtaatagggattgggccggtcccgtttgcccttcctaacagttcctcaatgtgaatggggacggcgccgccccctgtactttaacattaggcgcggcgggggtggcggtcaccccgaccgttaccgttgcttttgccatggcctctccgccctttcctttcgttcttttcttttccttcatggtcgcgggcgttgcctttccttttcaagc

SEQ ID NO: 7388 - DNA, 402 bp, Oryza sativa
  unsure (1)..(402): unsure at all n locations
  Clone ID: PAT_MRT4530_13989C.1
tttgttttttttttttttttggtttttttttttttttttttttttttttaaaattaaagacgtttccgtcgttcgtaataaccaaaaagggggaaaaaacctgaaaacaaaaaaagaaaagtcagattcagtctatctatcttccgagggcatcataaggcaaataaagcgatttttatgttgattcccggatgagaatcaagcgattgagaaaaagaaccggaagaaaaataaaaacatcaccgggaagccaccaacgccgtcgccaccaccggatccgtccacggggcgctcgtcagatccccttggtcgtcgccaccgccgccagatccatccgggggcgtngccgacgccaccaccgccaccggagggattgagaaaagaggcggtggagggagcccc

SEQ ID NO: 7389 - DNA, 188 bp, Oryza sativa
  Clone ID: PAT_MRT4530_1398C.1
tgccccacgtatgaacatacaacgagataaaaatggacaagtatgcccaatacatcctctatttttgtttaatgataacccaaaaaccaagctctatataacacccaccgttactggtcatgcttccccatgcttccattgcccacacacccagcctgccaatccaacccctgaagatcaaaaaaaaa

SEQ ID NO: 7390 - DNA, 279 bp, Oryza sativa
  Clone ID: PAT_MRT4530_13990C.1
cgagctcgcacggctgccgccgccgagctccgcccgccgccatggcgtccgcctccctgtcgctccgcctccccacgccctccactgcaccttcctccggggcctcctcctcgttcctctccctgcctccgaccttgctccgccaggcgcggggtggcgcggctgcggcttccgcgctggtggcgctgcctgatcgtgctctactaccagccggccaagatgtccaagaagtcggacgtaaataagaaggaagaggtgatcactctgctgaatgagaag

SEQ ID NO: 7391 - DNA, 591 bp, Oryza sativa
  Clone ID: PAT_MRT4530_13991C.1
atgctcgggcgccccgcgccccgccactacgcgatatcgcctatcaaacccggcgaatgcgccacagtgcgcgagccagcaaaccacgaccgtgcgcatgcgcaatcgcaagcgccgcgcggcggtttcctcgcgcggaagccgaggccgacacggctcacatgtctccgtaagcgactttccccttttctttctttttttcgtaggagggggccaaactgcgaaaggccagccagccagagcgaccgaactaaaccgaacccagcacagcgcctgcggctactgcctgcagccactgtgcgggtcaggctgtggagacgtggagcaccggaaccaaccggggagacatggaccatgcgtggctcgtgtctgcggtgtctcatggccggagtcagccatgactcatggccatgggctcacggctggatagatcgatcgatcgatggtccagtttgtcaaaaaaaaggggttactggcgcgctggatgcaacagtagctccgtcggccccacctgtcatcgcaccggcgtggtgggcccccggctgccctctctgcttaaaagcgttagcacttgcaattgcaacgtactag

SEQ ID NO: 7392 - DNA, 683 bp, Oryza sativa
  Clone ID: PAT_MRT4530_13992C.1
ccggggatcatcgtcggggaacgccacgtagccccccaggggaatagcccggatggaatattccgtttcggcaccttggtatttcaacagcggtggcccaaatcctaaggcaaagcgagtgacatggatgccctgtaaacgggcggccgcaaagtggcccaactcatgcacagcaattagtactgcaagtactccgatcgccggcaacgccgctaaaactgacataaatttctcaaataggaaaaaactggggacgaaatcccgccgaacgtgtaattcccccgattttaacccaacggccgccagaccgtgttccctggcccatgcaaacccctaagtttctgttaacctgaagaaggtgagggtatctgacaaaaattccagattacacagttatcaatatcaactctatccgttagtcaatggcggctctcagaattatatgggcgatgagcaccaagatattggcaaggtaatagcaaaactggaaacttcaaaggaagtcgttgctaacctaaaactccagacctttcttcgttctgcttttctctcagaggcatcacatattaacagtggtgaggatgtcggcaaatttctagaggctaacattcaagaaggggaagaaatgtttaattaccttgccaaccacgccccggttttatcctctagagtcgacggcagca

SEQ ID NO: 7393 - DNA, 1191 bp, Oryza sativa
  unsure (1)..(1191): unsure at all n locations
  Clone ID: PAT_MRT4530_13993C.1
atgccggggagcgtgccgctggcgctgggcctggacacggcgggggtgcaggtgccctggtacttccggtgccccatctccctggagctgatgcgcgacccggtgacggtgtccaccggccagacctacgaccgcgccagcatcgagtcgtgggtggccaccggcaacaccacctgccccgtcacccgctccccgctcgaccgcgccttcaccctcatccccaaccacaccctccgccgcctcatccaggactggtgcgtcgcccaccgctccctcggcgtcgagcgcatccccaccccgaagcagccagccgaccccgacctcatccgctccctcctcgcccagtgccccgcgctcccgccgctccgcaagctcagggcgctcgcccgggactccgacaagaaccgcctcgtcatggccacccacgagacacgggcggcgctcgttgacatggcgtttgggacgaacgctggtggggaggaggtggtggggaggagggaaagggtggcnaggctccgggagctgctggtgagtgaggaaggggcggcgacgacgacggcgacgctggagtgcagggttaatgctggggctgtggtggaggcggttgcggcggtgtccggcgcggacgccagggcggtgctgggcgcggcggagggggtcatggaggggctcgtcgcgctggtcgaggagaaggcccacgcgcgcgccgtccgcgtcgggatccgtggactgttcgcgctctgcctcgccaaggagaaccgcccccgcgccgtcgccgccggtgccgcggcggcgctcgcgcgtcgcgtcgcggagggaggcggtggcgcgggggagccggagcgcgcgctggccgcggtggagcggctgtgccggacggagggcgggcgcgacgcggtggtcgcgggcgccgggggaggcgcggcggcggtgtgcgcgctggtgcgcgccatgtccgggcggtcagcggagcacgcggcgggggcgctggtggcggtggtgggcggatcggagccgctccaggtggaggcggtccgcgcgggcgccatgagccagctcctcctcatggtgcagggcgggtgctcggagcgggcgaagcggaaggcgcagcacctgctcaagctgctccggtcggcgtggcccgccgccgactccatcgccaactccgacgacttcctccaaccatactaa

SEQ ID NO: 7394 - DNA, 1334 bp, Oryza sativa
  Clone ID: PAT_MRT4530_13994C.1
ccgctggcccggcgcccctctcccacccacccaccaacccaccccacgccgcgattccgcgaagctgagctgagaatcggatgccggggagcgtgccgctggcgctgggcctggacacggcgggggtgcaggtgccctggtacttccggtgccccatctccctggagctgatgcgcgacccggtgacggtgtccaccggccagacctacgaccgcgccagcatcgagtcgtgggtggccaccggcaacaccacctgccccgtcacccgctccccgctcgaccgcgccttcaccctcatccccaaccacacccttcgccgcctcatccaggactggtgcgtcgcccaccgctccctcggcgtcgagcgcatccccaccccgaagcagccagccgaccccgacctcatccgctccctcctcgcccagtgccccgcgctcccgccgctccgcaagctcagggcgctcgcccgggactccgacaagaaccgcctcgtcatggccacccacgagacacgggcggcgctcgttgacatggcgtttgggacgaacgctggtggggaggaggtcgaggccgaggcgatggcggttcttgctatggttgggttgggtgaggctgaggctgtggaggtggtggggaggagggagagggtggcgaggctcggggagctgctggtgagtggggaaggggcggcgacgacgacggcgacgctggagtgcagggttaatgctggggctgtggtggaggcggttgcggcggtgtccggcgcggacgccagggcggtgctgggcgcggcggagggggtcatggaggggctcgtcgcgctggtcgaggagaaggcccacgcgcgcgccgtccgcgtcgggatccgtggactgttcgcgctctgcctcgccaaggagaaccgcccccgcgccgtcgccgccggtgccgcggcggcgctcgcgcgtcgcgtcgcggagggaggcggtggcgcgggggagccggagcgcgcgctggccgcggtggagcggctgtgccggacggagggcgggcgcgacgcggtggtcgcgggcgccgggggaggcgcggcggcggtgtgcgcgctggtgcgcgccatgtccgggcggtcagcggagcacgcggcgggggcgctggtggcggtggtgggcggatcggagccgctccaggtggaggcggtccgcgcgggcgccatgagccagctcctcctcatggtgcagggcgggtgctcggagcgggcgaagcggaaggcgcagcacctgctcaagctgctccggtcggcgtggcccgccgccgactccatcgccaactccgacgacttcctccaaccatactaa

SEQ ID NO: 7395 - DNA, 177 bp, Oryza sativa
  Clone ID: PAT_MRT4530_13995C.1
atgagggaaggaggcgacgacagcggccgtgatggacaggggcggccatggcagcggcagcagacaagggcggccatgggaacggcggctgcggacgaggatggcgaactccagcgacgacaacaactagtcaaccacggcgagaaaggttacgggcttgtggtgatgagggtttga

SEQ ID NO: 7396 - DNA, 215 bp, Oryza sativa
  Clone ID: PAT_MRT4530_13996C.1
atctatttactagcgcgacagagccaatttcgcggcatctactgcttctgctgctgcatgctcctcctcgtcgccggcgatctatctcgccgccctgcctccgccgagatcgacatccagcggcgatgatgctttgcggcggccccttgaaagcaggctcgacaatctactgatcttatagataagaacttcagcgagcgagatgccatccctgc

SEQ ID NO: 7397 - DNA, 913 bp, Oryza sativa
  Clone ID: PAT_MRT4530_13997C.1
acacccacccttccttcctttcctcgatcgatcgatccgatggcccgcggcggcggcggcggcggcggcgcggacgccgacctgtacgccgtcctcggcctcagcagggagtgcaccgacgccgacctcaggctcgcctaccgcaagctcgccatgatatggcatccggacaggtgctcggtggccggcggcagcgcgagcgcggcgggcgtcgacgaggccaaggagcgattccaggagatccagggcgcctactccgtgctctccgactccaacaagcgcttcctctacgacgtcggcgtctacgacggcaacgacggcgacgacgacgacgacgaagcagatctgtcggggatgggcgatttcctcggcgagatggcgcagatgatgagccaggcgacgcctgcggagagcttcgaggagttgcagcagctgttcgtggacatgttccaggacgacatcgacgccggcctctgccagtcgacgccgccgccgccgtcatggccgtcgcctccggcggccgccaatgcacgatcgccggcggcggcggcgacttcacgcaagggcgtgaacaagcggtgctcaccggcggcgatggacatggactccggtttgagcagcctgctgggcatttcgggcttctgtttcgaggcgccatggacgtcgcaggacgcgagcactgccgccggcggtggcggcggcaagaggagaaagcagaggccgccgccggcgagccacaacgtgtagttggatgttgatcagccgaagcaacgtaccagaagaagattttgattgcccagtgctcgccacgaagactgacatttttttctttttcttcatttgttctttttgttcatggctgtactgtaaatagagaacacgctccagaatttggttgaaaaaaaaaaaaaaa

SEQ ID NO: 7398 - DNA, 907 bp, Oryza sativa
  unsure (1)..(907): unsure at all n locations
  Clone ID: PAT_MRT4530_13998C.1
ttcgcccctcgcgcacccncaccacncacacacattcccaacaattcttcatctcaagcgccacacacgctcaccacgccacacacacgctcccacgaccatcgcacgccaccccacacacaccaaatcccactcccacactctcctaccgcgccacaccggcacncaacactctcgntctcgccaacctccccccagccctgggttgttttgcaccaattcgcgtctcccaccacaccgcactccgtcgcactcgccaccccctcactctcgcctcncgccccccgcccaaccacttcgcctccccccacctcccaaacccnntccacaccaccccaccacccacaaccccgcccccacaactcccaccgccccttcgcacaccccccaccgncacacacaccgcaccctctcccccactctacgccccggncacaacacaacacactccgcggccctccaaccacaccacaccacacgttaatattcgcgctacgcnntccacaatctcgcacgcccacacccacccctccctgggggggcccaacaaacacccactttacntttcccaccgccccgccgaaaatctcttcgcgggctcggttctcggaaacgcaactcgcccctcacaacgcttngcaacggggccctctttacgacgcccacttctaaacccgcccacgttcacgcccacgccacacacgaacgcgcnccacccacgcacgcccccanacaaaatggnactccccaacacgaacggggacgaacgaaataccatttatccaattgtttgtaaaagaaaaatgggggcccctttccaaaaatttgggtgtggaaaaaaaccccgcaacctttttggaaacaaccacaaccaagccaacaagaaanacacaagcccaccaaaagg

SEQ ID NO: 7399 - DNA, 2091 bp, Oryza sativa
  Clone ID: PAT_MRT4530_13999C.1
ttagagtggttcatattccaaatagatgcaaacaggtgcagatctaataaagtcgcttccggcagtacggtgcaccacagaagcaaggcagctgacaatatttccatcaggcccaacaacactgtccaagacatagccataatcatatgaaagctcctgaagaggaagtatagtgtcagcagcaaagagcgtcacctttgccagcttaacatcattatgggagctcaagacacactggacaaaaaggttaggctcgcagctgtggtttataaaccttgcaaagttgccaatagagccagcatcaatgcaatactctggtgcaggtggatctgaatcattctccgcatgaagagacggcagatgcatgtcagagccagcccttttctctcttccatccagacccttcatagtttgaagacaatcaatatcaaatatgtaattgttctgcagcaaaccatctacttcttcagtcctcctcagcacaccagtgtactcacagatgggagccccagggaggatagtatcccaagtcctgacaccccagccttttgaagctgtcttaaatacctccaagcgatactgcagacctttctgagatgttctatttacacagttgttgttgcagctgcaattagcaccacattcaaatacaatagctttgggctccaccaacctgccaatgttcttgtgtgatacataaggtaaatcagaaccattgcgctgcgcgcatgagcagtttttgttgtttgcgcaatctccttcacagtcacagccattacaataagatggaatcttgatgccctttggaatttttagagatttggagtacacaaaaccagttggaggaacaggtgggtcatcaaccaaattagtagcaggaataggaagattctcctgcccaccagatatgtcatcacaaaccaacctagaaagtagcaaggcacaggtcatacaacatgatatcagcgtcactaagaatggcacactataaacaaagcatgaccaaacatagtaatctatctcagaagttgtcagtgatggctgtccctcaagccgctttaatttatatttgaaaacaacgtgcccttgtactccattctgcacccagtcatctacaaccttgtacagcccatcataggtgtagaccttcccagtgtagctattctttgatatatgtcctcggataactcttatgggattgccattatccttactgttcttcaatgccaaatttccacgttgcagttgttgagagccaatttggcgatgattaccgagtaaatcatttcctccttgaccagtataaataatttcatctgccttatcaagatcatcttcatatattcccgacatgacaatacaagttgccagtgggaaagttaggtttgcatactcctcctttccctgatatttcattcccatataatcaatgccattcagccaatgactatgaatgcccaaaacaaccatctcggcacgagaataaaattgatccccaacatcaacaccaggtagttcccctattatcttctctggataaagcacggcattgctttcttgcatctttgtaatggctttcaagtcaggccgctttgatggacgcttctggccttcctgtaacaccgcttgtgctcttttctgctcctcctgaaattccacaagtgcattgtcagataacatacgttcctggacaaggtgaaggtaatggctggtgaatgccctcaaggtttccttcacccgcagtttcgcactcttcccgttgccaaggacatcatcctcggcagcaggtcgtgcgaacccggcacaagaaaccggctccgccgcaattgcgggcatcggcttcccctccgaggagggcttcctctccgaggctgcatcgcccatcctgaccggcttcatggcgtgctgcgccaccggctccttcttctcctcttcccgcttcctcttgccgccgcgccgccggccagcactctccttgggctcctcctgctccacgtaagtgggacggcgcgtcctgttcaagcaccgaacgctgcggcgcagcgcaagcgccgcctccagtggcggcttcggcaccggcgagacctccat

SEQ ID NO: 7400 - DNA, 279 bp, Oryza sativa
  Clone ID: PAT_MRT4530_1399C.1
atgtaccaattcaataacaaaactacaacttataactccaacatatataacggtagtggttatactgaggtgaaagcagcatgctgcggcctaggggacaacaacgccatgttccagtgcactccggcaagctcgtactgcgccaaccgaacaagctacatgttctgggacatcgtccatccgacggagatcacggccaagagactcaccaaggttgcgtttgatggatccccgccgttggtttacccgataaacatcagccagctcactgcgagttag

SEQ ID NO: 7401 - DNA, 612 bp, Oryza sativa
  Clone ID: PAT_MRT4530_139C.1
ggactttttgcggctggatcacgtggagggctaccacgagctgtcctccaagaccagggtctacttcaccaccgccgtcgccacctgggacgccgacttctacgtcaaggtcgacgacgacgtccacgtcaacctcgggatgctgaccagcaggctggccaagtacaggacacgaccgagggtggaggggggctgcatgaagtccggacctgttctgtcgcagaagtgagcaaatggagattaaaatcttgtgttttgtttgctggtagcctgattcatggatgaatttgttggtgttttgctgttgttcgttgttgcaggggagtgaagtaccacgagccggagtactggatgttcggtgacgaggggatcaagttcttgcgccacgccaccggtcatatctacgccgtttccatgatctcggcgcctacatcttcatcaaccagtacgtacgcttgatcctagcttgtgtgcttctgaatttgtgacgtgatatgctctgaatttttcttcttcgtagccgatcctgctcaggttcgcaaacgatgacgtttcccttggcgcgtggctgatcgggctcgaggtcgaacacgtcgaccaccggagcatgtg

SEQ ID NO: 7402 - DNA, 329 bp, Oryza sativa
  Clone ID: PAT_MRT4530_13C.1
ggaggcccaagaaaagggggaccgggcttattcaactatcaacaggggcccagggatcttacaataaaaaaaatgggcccccaaaaagaaggccttcatcgagccccggggggcaacccggaagctccaaaaagcccccgcagggcccatgcaaaaggaaaaaatgaggattctgaaacggaattcacatttacaacctcacgcgaagcaaaaaaaatggccccaacccgcttggaaaatcgggggaaatttaatgggttcccccaaggggaccccaaattaacaggacttaacctagcttaatcttttaggggggggaatccgggggg

SEQ ID NO: 7403 - DNA, 321 bp, Oryza sativa
  Clone ID: PAT_MRT4530_14000C.1
gcagccggggtgatgcgtgaccacccctagagggctgtgtacccagaccactgcagtgcgctgtcctctggtgagcatgtgcctgactcgtgcggtgggtgatgtctgcggtgacttgcgaatgtgtgacccccccccatgagtgagtgaccacgcgagagaaaaaatgacaagtgcatggcatgtcatggcgtggtggtggaccaagttggaaacatccggggtggatgacaaatgtctggaataaattcatcaaatttaaacataatgcctcttaaggataaatcctagtacacttttgaaaaaaaaaaaaaaaaaaaa

SEQ ID NO: 7404 - DNA, 1978 bp, Oryza sativa
  Clone ID: PAT_MRT4530_14001C.1
tatagaagagcggcggcggcgcgatgggcaactgctgcgtgacgccggagggcagcggccgcgggaggaagaagcagcagcaggagcagaagcagaagcagaaggagccgaagcagcagcagcagcagcagaagaaggggaagaagccgaacccgttctcgatcgagtacaaccggtcgtcggcgccgtcggggcacaggctggtggtgctgcgcgagccgacggggcgggacatcgccgcgcggtacgagctgggcggggagctcgggcgcggcgagttcggggtcacctacctctgcacggagcgggagacgggggacgcctacgcgtgcaagtccatctccaagaagaagctccgcaccgccgtggacatcgaggacgtgcgccgggaggtggacatcatgcgccacctccccaagcaccccaacatcgtcacgctccgggacacctacgaggacgacaatgccgtccacctcgtcatggagctctgcgagggcggggagctcttcgaccggatcgtcgcccggggccactacaccgagcgcgccgccgcgctggtcacccgcaccatcgtcgaggtcgtgcagatgtgccataagcatggagtgatgcaccgggacctcaaaccagagaatttcttgtttgcaaacaagaaggaaactgcagctctgaaggcaattgattttggcctgtctgtttttttcaccccaggtgaacggttcactgagattgtcggaagcccttattacatggctcctgaggtgctaaagagaaattatggccctgaggttgatgtttggagtgcaggagtgatcctttacattcttctttgtggagtccctccattttgggcagaaactgaacagggtgttgctcaggcaattatccgttctgtcattgacttcaagagagacccatggccaagggtctcagataatgcaaaggatcttgtcaagggaatgctcaatccagaccctaggcggcggctaaatgctcaacaagtgcttgatcatccttggttacagaacattaagaaggctccaaatgtaaatttaggcgaaactgttaaggccagacttcaacaattctctgtgatgaacaagttcaagaagcatgcacttagggtcatagctgagcatctttcagtagaagaggttgctggtataaaggacatgtttgagaagatggatctcaacaaagataatatgattaattttgatgagctgaagcttggcctgcataaacttgggcaccaaatggctgatgcagatgtccaaatactaatggatgctgcggatgtcgatggaaatggatctttagactacggggagtttgttgctctatctgttcacctgagaaagattggcaacgatgagcatctgcacaaggcatttgcatactttgatcggaaccagagtggatatattgaaatcgatgagctccgtgaatcattggctgatgacctgggagcaaatcatgaagaggttatcaatgccatcatccgtgatgtagacactgataaggatggcaagataagctatgatgagtttgcggcaatgatgaaggccggaacagattggaggaaagcctcaagacaatattcaagagaacggttcactagcctcagcctaaaacttcagaaagatggatcattgcagttaacaactacccaatagatagatgacggaataggcaagttgtgaattccccagatgaaaaccttgtgtagctttcctggttctttgttgacgactattttcttccgttctcatttctcgagatttccactgctctatttttcattttggtgccccgtatgaagcattaggtgattgttggaaggtttgtttgtttgtttgtatttagattatattgatccatgccccacgggtggccaaacatttggcgaaatgtactgtacaagagaaaggaaaaggaagtaggtggtttttgtgcattcctaaaaaaaaaaaaaaaa

SEQ ID NO: 7405 - DNA, 359 bp, Oryza sativa
  Clone ID: PAT_MRT4530_14002C.1
agaagatttataaagtccacaaaatataaaattaactaaaaacaataataaacattactcggcgtcgtcagcatagtgccttggggcgcaaaaacgatttttcactcgctcatttggaaagtttggcaccggggaaatgtaaattccgcgcatggcttgtcatccaaaacagggtttggaccttcgactggctcgcaattagaggatggcaaaataataggctttgtcccctctgccgtagagaaggcgaaacggctctacatcttgttgtcagttgtagatacacaaaaagaatatggagcatgctagctgtctgggtggcttaccaacagcttgaccctagagaatgggaggcgacc

SEQ ID NO: 7406 - DNA, 1821 bp, Oryza sativa
  Clone ID: PAT_MRT4530_14003C.1
atgcacccgttgcgtcggcaccatcaactggcgcctgctcgacttcctcgacctgcatgtaccgccgtgccgctagagagaaaggagggtcatattctccgtcttcttctccagtacgctcgcaatggctgcttcgtccggcgaatggctgagcagggcagctatggtgttggtgctaggtctcgtggtggcgtcgtcagctaaggcgggcgctgtggacatggtgttcctgaagagtgcagtgagcacgtgagcagtttgcctggatgggagcccaccggtttaccacttctctcctggttctggctctggtgccaacaactggctggttcatatggaggtaactcatttgtcgacgtgtccgcccagctgatcgcggaggcaacctcaactcacgggggcttccgaagcgaggacgatccaagggcggacaaggatatttggctggatccagtggaacaatcatgatttctatcagttgaacatgctaaaggtcagaaattatgatgtcccttcatttaatagcgacatttaagcagtagaaccttcgaggaggcattaaagctcatgataaagagttactatttcagatttgctagccagggaagggaagaacgttgtctttgcagaatggctgcttcgtccggcgaatggctgagccgggcagctatggtgttggtgctaggtctcgtggtggcgtcgtcagctaaggcgggcgatgtggacatggtgttcctgaagagtgcagtgagcacgggagcaggttgcctgcgggaatgattttgtcagaacattctacaaggatgtcgtaaatctagatggatcggctaaaaagttaccatcttcatgtacgtcaaagatgtcccctgatctgtgtttcttcccgcagaatgtagtgccaacattgcgcacaccgttgttcatacttaatgcagcatatgatgcatggcagatcaagaacgtcctagcacctagtgccgctgatggaaagaagacttgggccaaatgcaagcttgatataacattactggcgacgttgaaacagtagaaacttcgacgaacctccatttcagaggggccagagtttggaatgccatcattgaagatctactagcaaaggggatgagcaaagcacaaaatgctcttctttctggttgttcggctggaggtctggctgccatactgcactgtgatagttgagaagacgcaaattggtaaacgcaatagggagagtggttccacgatcgggaagtatccctggaggattgattgcccttatccctgcaatccaacctgcaagaaccgtgatgatgattaagcaattcgacatgaaaacttctgttaaattctagtactgtgttgttgatgtcccctgatctgtgtttcttcccgcagaatgtagtgccaacattgcgcacaccgttgttcatacttaatgcagcatatgatgcatggcagatcaagaacgtcctagcacctagtgccgctgacaaaaagaagacttgggccaaatgcaagcttgatataacagcttgctcctcaagccagctcacaaccttgcaaaatttcaggacagattttctggcagctcttcctaaaccagagcagtccccagccaatttgagcatattcatagactcatgctatgcccactgccaatctgggtcccaggatacatggctcgctcaaggttctcctgtagttgagaagacgcaaattggtaaagcagtaggagactggttccacgatcgggaagtatcccggaggattgattgcccttatccctgcaacccaacctgcaagaaccgtgatgatgattaa

SEQ ID NO: 7407 - DNA, 1802 bp, Oryza sativa
  unsure (1)..(1802): unsure at all n locations
  Clone ID: PAT_MRT4530_14004C.1
cccacgcgtccgcttcttcctcctccaactcctcctccgttgggacggcgacgagttgagtttgattctttgattgatttctcttctgattttcctcggtagcgaagggggaggatgtggcgctctgccttctgcgattgaagctcgattcgccattgccggctacctgtggaacgggaacccggacagggcggcgcctggacgaccgatcagttaaaagttaattcagtaatcagatatggttcatcagcatgatgagtcaacagcaaatgaagtcagcaccaccacacagcttccctcctatggatcatctgaagaaccgcgtgtgtacaaggtcaggtgtcctcctcanaagaactttgcgagagagtttagagacacattgagagagactntcttccatgacaacccattacgccagtacaaggaccaatctggatcggcanagttcatgatggcgctgcagttcctgttcccaatctttgagtggggcaggtgctacaacttaagaaagttcaaaggtgatttaattgctggattgaccattgcaagtctctgcattccccagaatgaagtcgaccctgtcaaaaacaaggaggaatatctgcgccttgctttcacggctaccttctttgctggtatcactcaagcagccctaggatttttaaggctaggattcctcatcgagttcttgtcacatgctgcaattgttgggtttatgggaggagcagccattactattgcccttcagcagctaaaatatgtgttgggcatcaagagctttacaaagaaaaccgatataatttctgttatgcgctctgtttggacttcagctcatcacgggtggaataggctaactattgagtttggcatcactttccttgcattccttctgcttgccaagtacattggaaagaagaataggaagttcttctgggtgccagctattgcggctctgacttcagttattttggcaatccttttggtgttcattgtcatagataacaatacaagtggcatccatgctctagaagatctatacaaagaatcttaagaagagagacattcagctcatcctagcaaatcctggatccatcgtcatggaaaagctcttgtcatccaagctcaacgagcacatagggagtaacaatattttcctcacggttgctgacgctgtgcgtttctgcacaagaaagtcgatgcaagaaccatgaagaaaaatagatgagagaacaagagagagatgatgaacaatattatatagcatatgcgtatcatctacttatgatatagaggaatagatccatagacaaatcagctggttcagtgaaatactggtgatagcatatacaattggaaatagttgtatggtgaatatggtcttcacaaatgtagagataggcaccacaatatacaggaacactgatcagtatccagaagcaagacatattcctggggttgtaatagtgagggttgattctgctatctacttctccaactcaaactatgtccgggagagaactcttaggtggttgacggaggaagaagagaaagccaaagcagagggacagtctaaaatcaatttcttgatcatagagatgtccccggtcatagatatcgatacaagtggcatccatgctctagaagatctatacaagaatcttaagaagagagacattcaggaaagggagacggcgaggctgaggaggacgaggtctaggggcactggcatgaaagtggaggcggtcggtctcggcgtggagggcaatattggagttgacaaactggagaggaggtcatga

SEQ ID NO: 7408 - DNA, 506 bp, Oryza sativa
  Clone ID: PAT_MRT4530_14005C.1
atggaaaccacaaggactactcggattgtatccatattggtttccctaattctacttggacaaggggacacttatgagtataaatacaatgccccctaggaggagacggaagacacccaccacaatctacggaacaacagaagccacaacatacaagccaacatgcgccaagacaagacaccggatatcgacttcagggataagcacgactagtcccctacggtgtctccggatattgtcaggagagatgaaagcgctatctctgatctcgctgggcacggattcgaggaggaagactacaatgtagtcgactacgagtcagaccttcagaccgccatatcgacaacagttagataagctaccccaaatattgtactgtctcatatatatcctagtaccaacgatctccatactatacaaataccggaatcgcgacatcaaacatggacacatggatcatcaatcactgcacccccaccgtgcggacaaatctacacataaattta

SEQ ID NO: 7409 - DNA, 345 bp, Oryza sativa
  Clone ID: PAT_MRT4530_14006C.1
ccaatacaagccaacatacgccaagacaagacgccagatatcgacttcagggataggcacggctagtcccctatggtgtctccggatactgtcaggagagatgaaagcgctatctctgatctcgtcgggcacggattcgaggaggaagactaccctgttgtcgactatgagtcagatcttcagaccgccatgtcgacaacagttcgataggctaccccaaatattatactgtttcgcgtatatcctagcaccaaagatccccatactgtccaaataccatagtcgcgacatcaaacatcgacaatatgtaaagcaggaaatacatatacatatgtgatatgtacc

SEQ ID NO: 7410 - DNA, 440 bp, Oryza sativa
  Clone ID: PAT_MRT4530_14007C.1
taatatgtgtcgacatttgatgttgcgattccgatatttgcatagtatggggatcgttggtactaggatatatgcgagatagtataatatttggggtagcctatctaactgttgtcgacatggcggccgtgaaaccatcccgtagtcgacaacagggtagtcttcctcctcgagttcgtgcccagcgagatcagagacagcgctagatccctacagccggcctctgtaggtaccggatagggttggaccgggcatatctctgatgtcgatattcggcggcttgtcttgacgtatgttggcttgtatgttgtggcttctgttgttccatgtcccctctcctcctagggggccttgtatttatacccataggtgtctccttgtccaagtagaactagggaaaccaatatggatacaatccgagtagtacttgtcgtttccat

SEQ ID NO: 7411 - DNA, 450 bp, Oryza sativa
  Clone ID: PAT_MRT4530_14008C.1
attgaaacgacaaggactactcggattgtatccatattggtttccctagttctacttggacaagaggacacctatgggtataaatacaagaccccctaggaggagaggggacacccaccatagaagacacggaacaacagaagccacaacatacaagccaacatacgccaagacaagacgccggatatcgacttcagggataagcatggctagtcccctacggtgtctcttgatactgtcaggagagacgaaagtgctatctctgatctcgccgggcacagattcgaggaggaagactaccctattctcgacttcgagtcagaccttcagaccgccatatcgacaacagttagataggctaccccaaatattgtactgtctcgcatatatcctagtcccaacgatccccatactatgcaaataccggaatcgcgacatcaaacgtcgaca

SEQ ID NO: 7412 - DNA, 288 bp, Oryza sativa
  Clone ID: PAT_MRT4530_14009C.1
attaaattcccgtttagaaattcaattaatatacagatccaaatgataatacatgaaaatagttctagaagtagctgaataaaattcggcccatttactagactcctagattcggccttgtttggatgggctcgagatgaatcctgggctaaccaccatggatgggtcggaatagaggagggaaaagtacacgcaaggtccctcaacttgtcatcgagatacaaaatcgtccctaaaccgcaaaaccggacatccggcattccccaacttacaaaaccggtcataaaa

SEQ ID NO: 7413 - DNA, 345 bp, Oryza sativa
  unsure (1)..(345): unsure at all n locations
  Clone ID: PAT_MRT4530_1400C.1
gaaaaaccacaccaacgctatattataagggggtaccggaacacaagctagaactgcatattacaacagatgcgcacgtaccgatagcgataataaaagtactacaaacaagacaaaggacagagtacaaagagaatacacactggtaccgcgatacgtacaaacatgtcaggatgcacgatcgatcatgctttgacacacatgcaaagtacgtacataacgtagtaccatagaaacagagcagcatgcaaatgagatcatgagtatgcaagaccaactaatcaccgtacgtaggatcaacccatgcaagcattgcatatgcacgctgattancacttgaaagcc

SEQ ID NO: 7414 - DNA, 348 bp, Oryza sativa
  Clone ID: PAT_MRT4530_14010C.1
atgaaaacgacaaggactactcggattgtatctatattggtttccctagttctacttagacaaagggacacctatgggtataaatacaaggtcccctaggaggagaggggacacagaacaatagatcaagaccaagatcaacatacaagccaacatgcgccaagacaagacgccggatatcgacttcagagataagcatagctagtcccctacggtgtctacggatactatcaggagagacataacgatgtctttgatctcgccggatgcagattcgaggaggaaggctactctgttgtcgactacgagtcagcacttcagaccgccagtcgacaacagttatatagg

SEQ ID NO: 7415 - DNA, 615 bp, Oryza sativa
  Clone ID: PAT_MRT4530_14011C.1
cggcgatcacgaaggagatgtgttcatctcagcggccgctcgctcgggaaggcggtgtttctgcagcagaaactactactgcaagaatccgccgagtttgagctacattcacttgcctccaatgaagggttgatatcatacactgtcgacgtttgatgtcgcaattctgatatttgcatagtatggggatcgtcggtgctaggatatacgcgagacagtacaatatttgaggtagcctatctaactgttgtcgacatggcagtctgacgatctgactcgtagtcgacaacagggtagccttcctcctcgaatccgtgcccggcgagatcagagatagcggtttcgtctctcctgacagtatccagagacaccgtagggtactagccatgcttatccctgaagtcgatatccggcggcgtgtcttggcgtatgtaggcttctatattgatcttctgtcttgatctattgttccgtagattgtggcggtgttgattgaggtggtccccctctctcttccttaggggtcttgtatttatacccataggtgtccccttgtccaagtagaactagggaaatcaatatggatacaatccgagtagtccttgtcgtttccat

SEQ ID NO: 7416 - DNA, 2194 bp, Oryza sativa
  unsure (1)..(2194): unsure at all n locations
  Clone ID: PAT_MRT4530_14012C.1
cagttgttcagaattgccaactgatgcataaagatgggatttggtatggccaaaatttcttcttttacatcctctctgttcacgaacaaacaaaaactggaaaaaaaaaagctaatatgcagacatgtaagttttgcagcaactaagctagctagtcattgacaattgtctcgtctatgattgacaaatattattagacatgacacatagaacacatccccttcaaatcaaagcaatcgcacaaaaaacatatatgagacaaaccaaaaaaaaaaaaaatctatctgccacataggatagacattgtcacatcattaagactgggagattcaagagctgtggatgcctcttcctttgttacccttatgtgaaaatatgctggatggttgggtttaggcagtgtcatattctcgctgcttagcatcacaaccacatctgacattgtgggccggtcagccgcattctcttgaacacacagcaatgcaatgttaatgcatctcatcatatatccaagtagggtgaagaaatctccacattgatgaaaaccagagttccttttcccactaacaatctcgagaattaggacaccgaagctgaatacatcagatttaattgagaagagtccctccgaagcatactcaggagccatataaccatatgtcccgacaatcctttttgtgttttcttctttatcattcgagctgaatattctcgcaagcccaaagtctgaaattttaggattcatttcacagtctaggagaatgttgcttgctttaagatctctatgtatgactcgcagccgagaatgtttgtgcaaataaagaagtccatgtgctatcccttcaattattgctaggcgattattccaatttagcgtaactcttcttcgttcatcaaagataaagaagtccaagcttttatttggcaaatattcatatatcagtattttctcctctccttgatagcaacatcccaagagcttaaccagatttgtgtgctgaagcttggctatgagttggatttcatttctgaactctgtgaaaccttgccctgaatgtgaagcaacaagcctcttaactgctatctcggatccatcagaaaactgacccttgtataccgggccaaatcctcctttcccaagcttattatcttcagagaagttgtttgtagcatctaacacttgtgataatttgaacgatgtgaactctgaactacatgcttctcttccccaggccaatgcttcttcatctgtctgcatattcatatcaccctgcaagctcacttcacctttcttgtaccttctgaccaatccgaagcaaaagatgacgcagcaaaatgatccaagaagtgggaaaatcgtggccatggccatgactttgctcctcctcctcctcctcttgtgcttctctcccggcggcgacgcgacggcgttcgccgccaccgccggagctacggcgtcggcgcccgacgagccgatgcgccgcatcggctgtcccttgtagaagggatacgtctcgtacctgaagttgcaccagaggccaaggatccggccgccgcggcggccggcgaagtacctcgtcgtcatgtcgttgatgctctggaggcagcgccagcagccgccgggacgcaggtccggcgtgcagtcgtcgtcgccggcgggcggcggcgacnagttgtacgccgccgtcctcgccgtctcctggacgagcaccttgatgatgtaggtgatgatcgccgcgctgtcggcgttgccggggtcccacccgggcagcatcggttgcgagatgttatccgtgttcatgagcaccatggcatcgcccgcgtccgtagtcgtcgtagtagagttgctgttttggttgagaatgtcatgtccgtagaaccggagcggcgccacccggatcgcgccggcgaggcagtcgccgcaggctgaggcgttgggtaagtcgccgcggcagagcgccatcccgtacacggtgtccggggcggcgccggcggcgcccttgccgaacagcgacggcgtcgacgcgttcttggccagcccagcaatcaatcgctcgaggttggactcgtaggcgctcctcgccgtgtagttggtggcgccgcagttgaaccacacgtccggatcggcggcgacgatcgggtgatcgtggccgacgacgaggacgacggcggcgacgacgacgatgtcgatcat

SEQ ID NO: 7417 - DNA, 800 bp, Oryza sativa
  Clone ID: PAT_MRT4530_14013C.1
cgctcgggaagaggcggatgagcggcagctgcaccctgggatgggaggggaggcgttagggaggacggggcggcgacatggccggccggagagggaaggaagggaggaaggtctcaccggtgtacgggaaaacggacgtccagtgagttttcggcaatgggaagaggtggccgaggttctcctcgtccttgcggagccgagggaggcgacggtgtagcgcgggacggacgagagcggcagcgattggcggccagaggcggcaatggcgacggtggctcgggttcaccgtggagagggcagctcgggggtggaatgggggagcggctccgggcttgcccgcggggcggcgtgtcgacgtttgatgtctcgactacggtatttgcatggtatggggatcgttggtactaggatgtacgcgcgacagtataatatttggggtagcctatctaactattgtcgacatggcggtctgacgatctgacccgtagtcgacaacagggtagcatttctcctcgaatccgtgcccggcgagatcagatatagcgctttcgtctctcctgacagtatccggagacaccgtagggtactagctgtgcttatccctgaagtcgatatccggcggcgtgtcttggcgtatgtaggcttctatgttgtggcttctatgtcgattatgttgggtgttcatcctcccccctctcctcctaggggggcttgtatttatacccataggtgtccccttgtccaagtagaactagggaaactaatatagatacaatccgagtagtcattatcgtttccat

SEQ ID NO: 7418 - DNA, 606 bp, Oryza sativa
  Clone ID: PAT_MRT4530_14014C.1
gtagaagacgaattcccacaactctgccgcttaatttcttgttggttcgtgttcaccggcggcgtcgacatgatcgacatcgtcgtcgtcgccgccgtcgtcctcgtcgtcggccacgatcacccgatcgtcgccgccgatccggacgtgtggttcaactgcggcgccaccaactacacggcgaggagcgcctacgagtccaacctcgagcgattgattgctgggctggccaagaacgcgtcgacgccgtcgctgttcggcaagggcgccgccggcgccgccccggacaccgtgtacggcgtggcgctctgccgcggcgacttacccaacgcctcggcctgcggcgactgcgtcgccggcgcgtcccgggtggcgcggcgggcgtgcccgctcgccgaagacgtggtcgtcgccgacgacgccggctgccagctccggttctccggccatgacatcctcaaccgcagcagcaactctacgacgacgacgacgaacgcggacgatgccatggtgctcatgaacacggagaacatcacgcagccgatgctgcccgggtgggaccccggcaacgccgacagcgtggcgatcatcaccaacatcatcaag

SEQ ID NO: 7419 - DNA, 441 bp, Oryza sativa
  Clone ID: PAT_MRT4530_14015C.1
atggaaatgataaggattactcggattgtatccatattggtttctctagttctacttggacaaggggacacctatgggtataaatacaaggcccctaagaggagaggggacacagaacaatagattaaaacacaagatcaacatacaagccaacatgcgccaagacaagacgtcggatatcgacttcagagataagcatggctagtcccctacagtgtctacggatactgtcaggagagacatagcgctttctttgatctcgccggatgcggattcgaggaggaaggctactctgttgtcgactacgagtcagaacttcagaccgccatgtcgacaacagttagataggctatcccaaatattatattgcctcgcatatatcctagtaccaacaatccccatactatgcaaataccggaatcgcgacatcaaacgtcgaca

SEQ ID NO: 7420 - DNA, 311 bp, Oryza sativa
  Clone ID: PAT_MRT4530_14016C.1
gcacgagggcaatcggctaaaacccaaaaccttcagaagaaaggcagagactttatcgtgttcttggctttgatccggttggaatcaatctcttcgaagacccgcaaactctcgccttggaatccgcgcatgttttacttcctgtctcaaccatcttgaatcgttcttggagcctgatgctgctctgcctcgcctttgcagtagaccagtagtacgcagtcttgcgatggagtcggcgacggagaaggtgaggaggacgccctcctcctgcctgctgctgcgcatctccgacatctgcaaggtgcgctccg

SEQ ID NO: 7421 - DNA, 667 bp, Oryza sativa
  Clone ID: PAT_MRT4530_14017C.1
gcctagcaataattggaaggatagcacatggacttctttatttgcacaaacattctcggctgcgagtcatacatagagatcttaaagcaagcaacattctcctagactgtgaaatgaatcctaaaatttcagactttgggcttgcgagaatattcagctcgaatgataaagaagaaaacacaaaaaggattgtcgggacatatggttatatggctcctgagtatgcttcggagggactcttctcaattaaatctgatgtattcagcttcggtgtcctaattctcgagattgttagtgggaaaaggaactctggttttcatcaatgtggagatttcttcaccctacttggatatgcatggcaattgtggaaagaataaagatgggttgaactcttggatgcttcgttgtctactgaattgcatgcatttcagatgatgagatgcattaacattgcattgctgtgtgttcaagagaatgcggctgaccggcccacaatgtcagatgtggttgtgatgctaagcagcgagaatatgacactgcctaaacccaccatccagcatattttcacataagggtaacaaaggaagaggcatccacaggtctttgatctcccagtcttaatgatgtgacaatgtctatcctatgtggcaagaagtttttttttttt

SEQ ID NO: 7422 - DNA, 486 bp, Oryza sativa
  Clone ID: PAT_MRT4530_14018C.1
tgtcgacgtttgatgtcgcggttctggtatttacatagtatgaggatcgttgttagtaggatatatgcgagacagtacaatatttggggtagcctatctaactgttgtcgacatggcggtctgaagttctgactcgtagtcgacaacagggtagtcttccttctcgaatccgtgcccggcgagatcagagatagcgcttccgtctctcctgacagtatccagagacaccgtaggggactagtcgtgcttatccctgaagtcgatatccggcgtcttgtcttggcgtatgttggcttgtatgttgatcttgtgtcttgatctattattccgtagattgtggtgggtgttgattgaggtggtcgtcgattgtccgtgtcccctctcctcctagggggccttgtatttattcccataggtgttcccttgtccaagtagaactaggaaaagcaatatgtatataatccgagcagtccttgtagtttccat

SEQ ID NO: 7423 - DNA, 424 bp, Oryza sativa
  Clone ID: PAT_MRT4530_14019C.1
atcctgttggccgaagccggtattgctcttattcatgataatcacaccagtacaatatttggggtagcctatctaactgttgtcgacatggcggtctgacgatctgactcgtagtcgacaacagggtagccttccacctcgaatccgtgcccagcgagatcagagatagcgctttcgtctctcctgacagtatccggagacaccgtagggtactagtcgtgcttatccctaaagtcgatatccggcggcgtgtcttggcgtatgtaggcttctatgttgattgtgttgggtgttgattgtcccgtggtgggtgtccccctgtcctcctagggggcttgtatttatacccataggtgtcccattgtctaagtagaactagggaaactaatatggatacaatccgggtagtccttgtcgtttccat

SEQ ID NO: 7424 - DNA, 251 bp, Oryza sativa
  Clone ID: PAT_MRT4530_1401C.1
atccatgaaccaaaattataaatactgttagtcttggtaacactcaacatttcaacagatcagcaggcaattctaacactgacagtgctattcgccgatcaacatgagccaggctaattttcttggcagcaacattttcttaccgcggttctctaggaaaacccacatggaggagaaaaaaccagggcagccccaactttcaaggatttttgggtccattctttccaaaggggagcatggttctggtccct

SEQ ID NO: 7425 - DNA, 290 bp, Oryza sativa
  Clone ID: PAT_MRT4530_14020C.1
gaggagaggggacacggaacaatagatcaagacacaagatcaacatacaagccaacatacgccaagacaagacgccggatatcgacttcagagatagactagccagtcccctatggtgcctacggataccgtcaggagagatatagcgctagcgctgtctctgatctcgccggatgcggattcgaggaggaaggctaccctgttgtcgactacgagtcagaccttcagaccgccatgtcgacaacagttagataggctaccccaaatattgtactggtgtgattatgatg

SEQ ID NO: 7426 - DNA, 1796 bp, Oryza sativa
  unsure (1)..(1796): unsure at all n locations
  Clone ID: PAT_MRT4530_14021C.1
ttttttttttttttttttttagaaaacatcatctcatcactaggaatcaataatactaggagtctaggatattgctcgtggttccaactttgccggctgncaatgactgncaacaacgtgggccgtcggcaacatagcaaatattcccatttatatccccttgtgtagtactccataaacacgcagaaaacacgagccaatcgagcaatgaggagcagggtcgtgctgtacacatggatggtccgggggcacctccaccccatgacgcagctcgccgatcgcatcgccaaccatggcgtccccgtcacggtcgccgtcgccgacgttccgtcgtcaggcgagtcccgtaagaccgttgcccgcctctccgcctactacccttccgtctccttccagctgctaccaccggcggcaccggcccgttccggcgccgacacggccgaccctgacgctgaccccttcatcaccctcctcgccgacctccgcgccaccaacgccgcgctcaccgccttcgtccgctccctcccgtccgtggaggccctcgtcatcgacttcttctgtgcgtatgggctcgacgccgccgcggagctcggcgtcccggcctacctgttcttcgtctcctgcgcttcggcccttgcttcctacctgcacatccccgtcatgcgatccgccgtgtccttcgggcagatggggcgctccttgctgcgcatcccgggagtccatccgattccggcgtccgacttgccggaagtgctcctgctcgaccgcgacaaggaccagtacaaggcaaccatcgctttcttcgagcagctggccaaagcgaagagcgtactggtgaacacgttcgagtggctggagccccgcgccgtgaaggcaatacgagacgggatcccccgccctggcgagcccgcgccgagattattctgcgtcggcccattggtcggcgaagagcgcggaggcgaagaggagaagcaggagtgcctaaggtggctggacgcgcagccgccgcggagcgtggtcttcctctgcttcgggagcgcgagctcggtgccggcggagcagctgaaggagatcgccgtggggctggagaggagcaagcactcgttcctctgggccgtgcgcgcgccggtcgcggcggacgcggactcgacgaaacggcttgagggccgcggcgaggcggcgctggagtcgctgctcccggaggggttcttggacaggacatgggggcgcgggctggtgctgccgtcgtgggcgccgcaggtggaggtgctgcgacacccggcgaccggcgcgtttgtgacgcactgcgggtggaactcgacgctggaggccgtcacggcaggggtgcctatggtttgctggccgatgtacgcggagcagaggatgaacaaggtgttcgtcgtggaggagatgaagcttggggtggtgatggatggctatgacgacgacggggtggtgaaggcggaggaggtggagaccaaggtgaggctggtgatggagtcagagcaagggaagcagatcagggagaggatggcgttggcgaaacagatggccactcgcgcgatggagatcggcggatcgtcgacggcgtcattcactgactttcttggcggcctgaagatagcgatggacaaggacaattgatgttcggtcaacaaaaaatcgcgaagcgatatggagtactccttttctttattttaggggatgtacagcttgaaaacagcgatgtctgatctttgtatttttccattaaacaataatacaaatatgaatattattcttatcttaaaaaaaaa

SEQ ID NO: 7427 - DNA, 186 bp, Oryza sativa
  Clone ID: PAT_MRT4530_14022C.1
agctcgtataaagtccggaatcctgtaatatcttggcttggtgtgtacaaactcgttctcctgtgttctgtcaatccaggacaatatagagataccttgaggtcatgtacgtgtactagccggcgtggtgccttaatggagtgaactgatatctcacactacattttgcgtggacgcttcacttgt

SEQ ID NO: 7428 - DNA, 143 bp, Oryza sativa
  Clone ID: PAT_MRT4530_14023C.1
cccacgcgtccgttttttaattggtgtaccaattaacataacacacaaaaacgtgtggtaacaaacaaaacacatcgtgcgctcgccacagatgtttcacgctaagcttagctaacctgccgactagtcaaacattcattgcc

SEQ ID NO: 7429 - DNA, 140 bp, Oryza sativa
  Clone ID: PAT_MRT4530_14024C.1
cattaccaactacactctcaagcatggggatgcaggttggtcatcgtcggaggaaggatggaaatgcaacatcattcagcagagcttttcgatgaatttatggtgtcagaacacaacagggaagagcaccgtagaagcgc

SEQ ID NO: 7430 - DNA, 726 bp, Oryza sativa
  Clone ID: PAT_MRT4530_14025C.1
agatacagatgaagctacttcctcttgaactgtaaacaacttgtgaatttcccggctaaactctaccaaacacaagaaaaacttggagaaacttgaaaaagaaaaaaataagaaaagataaatacgtagtatactagtatagccgaaacatatccaggcatcaaggtcgtcgtcgtcggcgaagcgatcgatcaggcggccaaggtggcggcgaagccgaggatgaactccctggtgtcgtcggcggcgcggtcgagcgccgtccggccgtcgacgtccttgacgtcgtacttggcgccggcgcggaggagctcctcgagcttgggcttgtcgccctcggaggcggcgagcatgaggaggatgtccaccgggtggatgtcctggttcagcagcgcctccatcttgtcgtaggtgccctccaccgccagcatccccatgtagttgaagtactgctcgacgtcgtcgcggtcgaagtcgtccctgccctggctgccgtagatgccggcgccctcggcgtccttgttcccgaacttgaagaagcacgtcggccccaccctcccgctctcgctcgccggcaccaccgcgctcagccgcgacggccgcagccaccccagcctcgccgccgcccgcggcgacctcctcgccgccgccgccgccgacgccgacgacgccctcgcgctcagctggaaggtgcacgggatggatgccatggcttctcgcacgttg

SEQ ID NO: 7431 - DNA, 594 bp, Oryza sativa
  Clone ID: PAT_MRT4530_14026C.1
atgcccgctgataaccccgttccgcgcacccggcagttgcgcagtcgatgcgacagcggtaatgattccgagtgcggccaggcgggacctccggctttttcggttggcacgcccccgggcttggggtatcttgtcgcacccctcgggcccgaggttctgagttaccccgaggccctcgctcggctgccatgtggcggccgcgtgggtggagataggggtgcctcctggcgcattgacgggtggtgccccaaccacaccccatcgtatttaatgcggcgtggctggtcatgcgccacccagcgattgacgtgcatcaatcgccttgaccaggttgtgaccggccaccagcgaatgggacaggtggcaacgcgcccacgacctgccctgtgtcaggcggcgtgggggcaggagaaggacggcgctggggcccacctgaggacgattggccgccttactttcggcctaaggcatgggcggcagctcgaccttggccgatcaagcctgtcaaggaggcacgagaaggggcatgtgggtggaacacggccgaccgtggctacgacggcgcagaggaagcccattcttggtatttattaa

SEQ ID NO: 7432 - DNA, 180 bp, Oryza sativa
  Clone ID: PAT_MRT4530_14027C.1
gacggctacatgggagccgtcccacttgatcccatcacccccaacctcgtcaatcccaacttcttcgacctcgtcatggccaagaagatgccgctcaccgtcgaccacctcatggggatggaccgaggacgtcatccggatcagctcgctaaacctcgaggagatgatgggctcctttga

SEQ ID NO: 7433 - DNA, 390 bp, Oryza sativa
  Clone ID: PAT_MRT4530_14028C.1
ttttggggtttttttttttttttttttttttttttttttttttttttttttttttttttttttttttttacaaaagcataaataccttataaaatcaacaaagggggggcccctacatggggaaaacaagtaggggaagggaggggatcaagcttaggaattacaacaacgggagattttttatggttttagggggggaaacaaaccgggaaagccaaaatgggatatttttaggggaagtttgttgcaaaaactggaactaaatcatgtccttgggttaagggggcggccaggtttggtccaaaattttgggggctttggggggggactcgggcttggtcttgctgaacagtttggttgctttggagtttgcaggggagtttgggtttg

SEQ ID NO: 7434 - DNA, 459 bp, Oryza sativa
  Clone ID: PAT_MRT4530_14029C.1
atgactacctgccacaatgagaagacagacggcttgtgtagagaagaaaaggtggaattgtggaaggtaatcgcggggagttttggttcattttttgaagatttctctaattgcggcgctggggacgacggttgcagtggcgccggggacgacagtgatggggatggaagcgctaggacaccggaagtggaggggcggtgggcggttggacgaggcggcggtgctgcgagcaacgaagccaggacgccggcggtggaggtgtggttggcagagaatggggagggcggcggcgctgcgggcgacggcgccaatacgccgacggtgaaggcgtggtgggcaaaggacggggagggcgctggcgctgcgggcgacggggagggcggcggcgctgcagatgacggggagggtggcagcactgtgggcgatgacgccaggacgccgacggtggaggcatggtga

SEQ ID NO: 7435 - DNA, 235 bp, Oryza sativa
  Clone ID: PAT_MRT4530_1402C.1
ccgccccgcgtccgcggacgcgtgggcggacgcgtgggcggacgcgtgggcgccgccacgtctcccgcaccctatccagctggctctacttgcgcccatgttacatcatcaatagtgagcggtgcggcaggcggcagacactagctgcgcccatcgttcgctctaccaccgggagctggacgtcattatcataccagtggatgcagttatccttagaccaataactgtgacttgc

SEQ ID NO: 7436 - DNA, 225 bp, Oryza sativa
  Clone ID: PAT_MRT4530_14030C.1
ggcacgaggcaagggatgcaaaaacatcatgcaggtgtcgcaggtctaaatcccgtacgcatgaaagcttctgttcaggcgctaatggcttgcaacatcgcgtcacgcatgtatacggccgttcgccagcgtgagcggccaagcagcagcagagataatctcgcacgcgcatcgacgaggcgtgcagcttgcgccgccccttgcgccttctctctcccatcctct

SEQ ID NO: 7437 - DNA, 537 bp, Oryza sativa
  unsure (1)..(537): unsure at all n locations
  Clone ID: PAT_MRT4530_14031C.1
tctttgggggcttgnaaggggaatttccgggcaccgaaangganttggggttccaaactttgggcttcaaggggaaccgaaancttccgggctttccnaacgngggttggggggccctccnaactttccccccaaagggggcttacttcccgccgcccgccttgggnggaanggattcttnccgttctaacaaaacacccaaacccccgaacgtttccgtccngtccgggnggaaaaatcttgggaagcttccgcttccatcctttaccaaacgggggngaanangggnnaaacccgttcccnaacccaaacccaaanggaacgccggggaacaagggggcaangggaaaccttggggttgaaaacttgggggttnggaaaaggggccgttccgggcnaaanccccngggcnnaaanngggnnttttccnaacttttccacccnncccnnnnngggggcattcccctccccanngcccntntcntttttctttggggcnnaanncttgtttnngaanggcttccccccnnaacnngg

SEQ ID NO: 7438 - DNA, 276 bp, Oryza sativa
  Clone ID: PAT_MRT4530_14032C.1
acatagtcagaatcttggcatattatactgagtcaggcatgtacagcgtatctgatgcgcacaggtgaatgttgtgctgaagaatagcctcagctatatatatacatcgacggatggccactaatttatggagctgcagatcacggagatggcctggcctagtattgcatccattcttgaagcagaccatggctcctattgagcgtcctgagcgcaccgtttgccaagggtactgcacgaatgtcaaagtccttaggcgccttggggaccttgagt

SEQ ID NO: 7439 - DNA, 429 bp, Oryza sativa
  Clone ID: PAT_MRT4530_14033C.1
aaaatatcataagtcccttcatgtcgaaatgcaatttaaatcttaagatataaatgcaatggtaatataatatggttagaggtaacaaccaccatggcatttgtgtagatcaaaagctcgtgtatcagtaacatccccaacaaacatttgacaatgacaacggtaagaaaaatagaacatacgcagaccattatttatcttgaactgaagatcaatgcaccgaatggaaatattgccaatataagcaccaattggactggtatatagacactgtggcattgatcgccttgaagacaaacggaaatatgtagcgaactcatcatcgctagctagtagaggtgcacttggaaccaagctagcagagatgactcagttgtgcgtacgatatcgatatcggtttggcgatggtcttccagaatgtgcaggcat

SEQ ID NO: 7440 - DNA, 447 bp, Oryza sativa
  Clone ID: PAT_MRT4530_14034C.1
gccagaaaagaacagaagaaaagagctcaagaaagaaagcggatacacgatgagtgaagctggctataaaatggtttggcttagcccaaacccgcactctcgcggattcttctcctttgtaggtcacagacataaacggtgaaatgaaattttgtagcgatggatgtaatattgagtaggttggtgcaatcacatgtaatcactagatctctcaaatcaaatgtactactggtctttaccagtggcacttggtatttgtcaccattgaccagtgacttactttatttcagcttaacggctaataacctttaaatatcaaattttgatgaacgaaagtgcactcgatagtatgataaaaaaaaaaaaaaaacctaaaaaaaaaacaaataaaaaaaaaaaaaaaataaaaaataaaattttaaaaaacaaaaatggggcggccgtttt

SEQ ID NO: 7441 - DNA, 1795 bp, Oryza sativa
  Clone ID: PAT_MRT4530_14035C.1
acgaaggaccgacggggcattaaagggtatggaacagatacacataggctgtccattgcatatagctacgaccaaaataactgattacagcactggagatgttgttcgaccctggtgtctagtgagaggcacacatgctagcttgggtgcaatatttacaaggtaattagatgtctatagaaaggctataaagggcgctaataataaacatagaaacaggctggagatatttagaaagccctggcagagtcacttggcgataacaggaggatgacaggttgtagccgatgcatattgccttcacaagacatctgccgttgcttccaggcgatctgtcttgtaaaagtggaatatgcaaattgttccaatcttgatttgtgctgtcttttcatcgtgcaagcggtgcaatgtacttctttgaaaattcctttactaagtacactctcccttccttcatgaatgttgcatttatggcagtcacataaaatttgtctgagggctggaggaatggcgcaatatctttgatgtagttcttgacttcagctgataacctgatgtccttggtgcagaaacacatttcgctgatagtgcgcctgttgttgcttgcagaagtggatgtgccatcatgttttagcttccctttgatgcagcattggataggcgaagtaattgtagtggctttcccttgtgggcttgatgtgcgaaacgattgtctggtcggttcagagtctctgggtttgtctggaactgggcatctaagataaccgtcctttgcaaatatgatgaaatgcatcttcgaggttgataaaaccctgaaaacggcgggctcttgaacctgcagaccagttgcttctataaactgggcccatcctgctgtcatgtacatgttgttagatgctttcctcagttcaatgtagaccttaaggtgatgtgctgtcaccaacttttttgaccgtccttgagttcatatgcttgcacaattgcgggtggaatacacgcacagtgctgatttgccgcggtcatccagatcgtgaagaatgttggtggatccataactgcaaatatgtttggtgatgagaaaccgcgggcaactgcagtgcatggattccctaatcattgatagtaattcatcccgttagcatgcatttccattgttgtttggccagattaaaactgttgataaaacaggaaaagaagagaaagcaaacaagcttgtaagtgtaaaaattatcaataggtctcccaccctggcctatagcatgttggaaggcatttccaaaaacaccctattagcatgttaatgcactgtagtgaagatcagcatatagctgattgcaatcctgatataattttttcatcatacacagctttttcccttcgaaacactttgttttctttagaaacttattatatacatgaacacgaatctgctcaacataacaattccatagggaacctagcaacccaatgaaaataataccagcttgtacaaaaactggttattattggattaagtttaaataaagaccaatccagtacaacattcagttctggtcttttcaattatttcttatagttttttttttcttttgcgcaattctggaaataatggtacaaatcaaggaaaagaaacacatgggatcctcatggtaaaatgaaaaattaaggttctaattgaaatacatcaagaacaactgatttgtttgttctgacagctggaaacattgacctatcagcctatagggcagaagagaatacctgataataacttcaaaaattgcttaatagtatatga

SEQ ID NO: 7442 - DNA, 459 bp, Oryza sativa
  Clone ID: PAT_MRT4530_14036C.1
atgtaaatggttcagaatgtcgacgtttgatatcgcgattccggtatttgcacagtatggggatcgttggtactaggatgtacgcgagacagtacaatatttggggtagcctatctaactgttgtcgacttggtggtctgtagtactgactcgtagtcgataatagggtagtcttcctcctcgaatccgcatccgtcgagattagggacagcgctatatctctcctgacagtagccatcggcaccgtaggggattagccatgcctatctctgaagtcgatatctggcgtcttgtcttggtgtatgttggcttgtatgttgatcttctatcttgatctattgttccatatcccctctcctcctagagggccttgtatttatacccataggtgtccccttgtccaagtagaactaggaaaaccaatatggatacaatccgagtagttcttgtcattttcat

SEQ ID NO: 7443 - DNA, 3765 bp, Oryza sativa
  Clone ID: PAT_MRT4530_14037C.1
atggcctccgccgccggacgatccgcgaggaggcaggctacgccgcgcgtggacccgcggcggcggcgcaaggaggtgaggtccgagcatggtgttcccttgctcgatcctctgcaaccactgtctccatggggcgccacatatacgagcgcgtccgccggcgatgcggagatggaggagaccgatgtttcccctcggcggccgcggcgcaatagcacgagtgacgaagaggattcatctttagctagcctttctgcaagactggctagggtaatcgacaagaacatcctgatgtctgaagtagttgcttctgcggtagtcagcgaggctgtgagcaggatctccaccttcttcatcgacaagcataaatggaaattaagcgaggaagatggcatggagaggctggagattgcacacatcagaatggaggcagccctcgagatatccagcaggtggcctcgggtcacagacgcctcgctcctgcgttggaggaagaagctaaagcgcacatccgatgagtgcagccaaatcatggacagatgcaagcgccgtgccatggaagacgatgagatggaacaggaggtcaggcagtgcgccttccctaaacggatcgcccatgccacaaaatcgttcatatcatctttcactggccagaagaaagttgatagcctgatcaccacttcaaccattcagaggtttgaaaggtttgccaatggtgccggcgagttcctgagattcatggagttcggcagcataggcaggataaactatatgcctgttgatcctctcactgggcaccttcgtgcaggcaaagctctacagtatgaaaattctcatggaaatcagtactacctagcagcacggccaatgcgttttgcagagcgaggacaagaagccggggtattgcttcggtaccaaaaccatgagaggccagaggaaaacttcattcttggaattatgctacgcttggcagcaagcacaaatgtgactgcaattgtagctagttgcttggagttgctaccacccaatttcaagtctgttgctgaagctgcaaagcaggagctcactcagttgcaccagcgaggcttctactgcttcccgtttgtggattctactgatccagagtactggagcatccaccatgctgagactcaccgtgctcgaccaaactcagcatgctgcgactgcgaagaacacgagcaccatggtcgaagcagaagcagtgacatggttgagccgtcaggtgcattcccggagccggtgatcaaactggccgtgcagcgctatgtctctacgagccagagacagaagcaatcatcgtcttcatcgtcatctggtttttctggaaattcggggccacctctgcttcagctgacggccgtcttcgcgccacacgcgtcaccagagcagctgctgtccggggctgagagcgtcacggttgtggcgatcgatgggagggaggagcaacccgtgcacaccaatgttggattgcatgagttggaggagttgctgctgccaaacgccgtcaatcacctgtgccacgaggcggtggatgaatcgtcggcgcacgaggtgttctggaggtcttgccatggtgttgcttacctctgcatggagaatgtggtaacagagatggcagggtgcaggccgactcattggccgcgctcagctctggtgcggcaacgaagacggcgtggtggctggtggcttgtggcggcgccccagcgggagggccggaagaggggagtgcgagcgcccaaccatcgacttatgagagagagctacatgtgtaggcagcacgtcgaggaagaagaggctgaacaactagtaaggaattcatcctttcctatgcaaattgtgcatgccaccaagtctctagtattatccatctataacggcaatatccatgagccaaatagatctgttgttcgaagatttgagtggtatgcagatggagctaatgattttctgagatctgtggagtttggagggacgccatgctattatctgttcttcgaccctcttgtggggcacgttcttgctggtgaaacgctggattacaaattagtgcagggaaacagagacacacctgaggataactttttctttggtttgatgctacaactttcagcaagtacatacatagttggcactataattaagtatgtgcagctgaaactgttaggagtttatgcaagtgaaacacagttttttaagatcatgattaacatgacattgaagcattaccacgaattttcaaggaaaaggattgcggtttatgctgttcacaatctgcaaagctatcagtttaaagcactagtttcagtttcaaccagtttggtgtgggcagcagtgatcaccaagaacatcctgatgtctgaggtcatcgcttctgcggtcgtcggtgaggctgtgagcaggatctccaccttcctcatcgacaatcataaccgcaaatcaagcgaggaagatggcctggagaggctggagatggcacacatcaagatggaggccgccctggaagtgtccagcaggtggcctttggccatggattcctcgcttatgcgttggaggaagaagctgaagcgagcctccgacgagtgcagccatgtcatggacagatgcaagcgccgcgccatggaagacgatgagacggagaagatcagtcggtgctctttccccaaacggatcgcccttgccacaagatcattcctctcctccttcgccgctgacaagaatgttgatagcctgaactccacttcaaccattcagaggtttgaaaggttcgccgatggcgccggcgagttcctgaaattcatggagtttggcagaataggcagcatcaactacatgctcgttgatcctctcactgggcatctcctcgcaggcaaagcactgcagtatgaaagttctcatggaaatcagtactacctaatatcaaagccaatgagtttcgcagaacgagggcaagaagccggtgtgttgcttcgctacaacaaccatgagaggccagaggagaactttgttcttggaattcttctacgtttgacagcaagcacgaacgtgactgggattgtggccaggtgcttggattcacttctccctagtttcaagccggtcgctgaagctgcaaagcaggagctcactcaggttcaccaccgagccttctactgcttcccctttgtggattctactgatccagagtactggagcatccaccattccgagactcaccgtgctcgtccaaatccggcatgctgccatggccagagcagaagcagtgacatggttgagctgtcagggacgacgacattcccggagcaggtgatcaaactgttcgtgcagcggcatgtctcggcgcgaccatcatcatctggtcacggcggcgacggcgagaggaggagatcctctgaagattccgggccgccgcctctgctgcaggtgacggccatcttcgcgccgcacgcctcgccggaggagctgccgccgtcaggatccgagagcgccgcggtcgtggcgatcgatgggagggaggagccagccgtgcgaacggacatcggattgcgcgaggtggatgagtttcttctgcctggcgccatcgatcgcctgtgccactgccacgacgtccatggcacggtggatggatcgtcggcggcggcggcgtacgaggtgttctggaggtcgggacatggcgtcgcctacctgtgcgtggagaagatgggcacggagatggcaaggtgcaggccgactcaatggcgggagtaa

SEQ ID NO: 7444 - DNA, 1897 bp, Oryza sativa
  Clone ID: PAT_MRT4530_14038C.1
atgggatttcgtgattcattatgtataaatttcatgaatttagatgtggtcgcagatcgcggatggcggcggccaccaggcggatgtggtcaagggaggactggcagcgctgagcaacgacgtctaggaatagcatctcagttgaggagaaggaattcacaaaggaactgctcctgcacccactccccaatcgcaacgcgctggcccacttccactcctctgcgcatccctctgctgccaacggacgctagcaacatgtcaaaccccaaggccatcccccagctgtacacaggtcttgcgactgctactgcccttagttggactgtattttcttctgtccataacgatcctatggcatctgatgttattgcaccttctccatggacaatatttgactgtaaaaatgcatgcttgtctgaaaagcagattgacctgagtttgtgtgctatagctgatgatggaattttttttaaaagtaatatgattttaatggaaaatcgcaaaactataggtcagttaggcgaaatcgcaagtttagcaccctatcgaacaaccgtggttcgacaagttttgcgattttccattaaaatcatattgtttttaaaaaaaattcctgatgaacttcctgaccccactctccgtggacgaccaccgtgcctccttgcggtcttctcatcgctctctggtggaggtgatccagcacgcttgaacggcagtgatgtcaacaatgaccgtgtgtggacatctgatccccctccctatacacaggataaggacaccaatgaggcaatgaaaggattagggaatccatgcactgcagttgcccgcggtttctcatcaccaaacatatttgcaggcaacaacaggcgcactatcagcgaaatgtgtttctgcaccaaggacatcaggttatcagctgaagtcaagaactacatcaaagatattgcgccattcctccagccctcagacaaattttatgtgactgccataaatgcaacattcatgaaggaagggagagtgatgctacaacttgaaatcgggatgaacccgttttgtgacaatcaacaacttccagattggaacaatttgcatattccacttttacaagacagatcgcctggaagcaacggcagatgtcttgtgaaggcaatatgcatcggctacaacctgtcatcctcctgttatcgccaaatgcattgtgcacaggcggcgcgccaatggcgcgccccagcatctagtgcaggcaaaactcagataatcacgttgcctctgctgcaagtcacgttgcctctgctgcaagtctgcaaccaagacttggcttgctgcaagaaaacaccacacgctgccgcttaccgccgcctccaaccaccgctagccatcgctagtgccgtcgccgcgccgctccgttgccgccgttggccttgcgaggtcaagggccgcctcgtccaccccgcgcaccccgccgtccgtcgctcgccgtcgccgttcgttgtcgcctccttccgcgccggccgaaccctgcgccgagccgcgccgccatcgtcgtccggcacttcgccgccggccgcccgtgtcgtcggccgctcgtgtcgccggccgccgccgtcttctcgccggtcatggccgtcggttgccgattgccgccgccacatcgcctatcgccaagtgactctgccagggctttctaaatatctccagcctgtttctatgtttattattagcgccctttatagcctttctatagacatctaattaccttgtaaatattgcacccaagctagcatgtgtgcctctcactagacaccagggtcggacaacttttccagtgctgttatcagttattttggtcgtagctatatgcaatggacagcctatgtgtatctgttccatacccttt

SEQ ID NO: 7445 - DNA, 488 bp, Oryza sativa
  Clone ID: PAT_MRT4530_14039C.1
atggaaacgacaaggactactcggattgtatccatattggtttccctagttctacttggacaaggggacacctatgggtataaatacaaggcccctaggagaagaggggacacggaacaatagatcaagacataagatcaacatacaagcaaacatacgctaagacaagacgccggatatcgacttcaaagataagcatggctagtcccctacagtatctacggatactgataggagagacatagcgttgtctttgatctcgccggatgcggattcgagtaggaaggctaccctattgtcgactacgagtcagtacttcagaccgccaagtcgacaacagttagataggctaccccaaatattgtactgtctcgcatatatcttagtaccaacgatccccatactatgcaaataccggaatcgcgacatcaaacgtcgacataatcttcctccgcaactgcatctgctactaccttactttcagtaaa

SEQ ID NO: 7446 - DNA, 543 bp, Oryza sativa
  Clone ID: PAT_MRT4530_1403C.1
atggcgagaccagctgctgccgtcaccgtcctcctcgccgtcgtcgtcctcgtctccgtcgccgcctccctcccctccgccgtcgtcggcgacgcccgcttcgtcgcccgcacgtgcaagcgcaccaaccacaccgagtgcgtgaagatgctcagcgccgaccggcggagcgccagggccaccaccgtgcaccagctcgccggcatcgcggtcgacatcgccgccgccaccgtgaagtccagcgccgccgccgtgtacggcaagttcctggagaatcacggccaggtcctcgagctgacgctgctcgagtgctggtggatgtacgacctcgccgccggcgaggcccaggcggcggtcgacgcctacagctccggcggcgcgtacctcgacgtggtcaggcaccagctggccggttactacgccgggatcatgtgcgacaacatgatcgtccgccgctcgaaggtctctccggtggccgacatcgacaggacgacggcgacgcactgtaacatcgccgtcgatctcatcgggctgctttactaa

SEQ ID NO: 7447 - DNA, 1259 bp, Oryza sativa
  Clone ID: PAT_MRT4530_14040C.1
ttttgttcatcacatcacatatatataaatatataatcatcatcatcagcagcatgcatataaatacaactaatcgattaataattagccaatatataataataatgcatcacacacatatatatatatatatatatatataatcgatccatccatgcattcaccgaccgaatcaatggattggacgaattgggaattggggaatttggatggacaatgatgtgatcaccatcatcatcatcgtcagttcatgttgcgggagcagcgggtaatggcggagcagccgcggcggtagggattcgccgcctgctgcgacgcgcagttctggtagtaggtctggcctcgcttgttgcacggcaccttgttcgcgtccagcgccgagtagctgacgtaccggttcgtcggcttcctcgccgccagcgcccgccggagcagcccgccgtcggcccccaccgccgctgagcactgccgccccagcctgccgccgcacgacgaggaggagatggcgccgaggtgggccgtggtgagcagctggctgtagccgaggccgccgccgctgtaggcctcggcaggcgacgcgcgcaggcaggagaccaccagcgtggccgccaccaccgccgcagccgccgccgccacgccgatgccgaggcgagccatgggatggattcacgccgaattccgaggtggtggggggctggggaggttggcgtttggagcaatttggggagggggttctttgagcggggtgggtgtctctctctctttcaagcgcgggaggaggagacgagcggcggtgagagaacgcgggggagacatgtcgacgtttgatgtcgcgattccggtatttgcatagtatggggatcgttggtactaggatatatgcgagacagtataatatttggggtagcctatctaactgttgtcgactttagcggactgaagtatcatcacgtagtcgacaacagggtagtcttcctcctcgaatccgtatccggcgagatcagagaccgctagatccctacagccggcctccgtaggtaccggatagggtcgtccaggcatatctttgatgtcgatatccggcggcttgtcttggcgtatgtaggcttgtgttggcttgtggctttgtggtatctatgttgtccgtctcccctctcctcctagggggccttgtatttatatccataggtatccccttgtccaagtagaactagggaaaccaatatggatataatccgagtagtctttatcgtttccat

SEQ ID NO: 7448 - DNA, 231 bp, Oryza sativa
  Clone ID: PAT_MRT4530_14041C.1
atgaagacagttgtaaaactgcttctagaatcgatcaacgtgcttcgcaaggattgccacgatggagaaaagctctcagaaaggcaattgatcaaatcaactggcatgctcacgaacctaaaagcaagattttggatctgcacaggagttaagcagatcttccaggccagtgaactacaccccaagggtggtcagttacctgagcatgggaatttcaccggaatcaagaga

SEQ ID NO: 7449 - DNA, 841 bp, Oryza sativa
  Clone ID: PAT_MRT4530_14042C.1
ccacttctcatctgaagttcagacacacacacactgacacaaacatatatacttacatataaatacagatatatataggtggttagctacctgtatagtttatacattagctagcgtatgtgttgttgttgatcatcgatcgccggcgacgacagggagagatcgatccacgatgggttgcctgctgcggcggctgttcccgttcctggtcggcacggcggtgggcgtgtacgcggcgcagaattacaaggtccccaacctccggggcctcgccgaccgcggcgtcgacgccgccaagcactacgaggaggcctatgtcgatgtttgatgtcgcgattccggtatttgtatagtatgggaatcgttggtactaggatatatgtgagacagtacaatatttaggttagcctatctaactgttgtcgacttggcggtctgtagtactgactcgtagtcgacaacagggtagccttcctcctcgaatccgcatccggcgagatcagagacaacgctatatctctcctgacagtatccgtaggcaccgtaggggactagccatgcctatctctgaaatcgatatccggcgtcttgtcttggcgtatgttggcttgtatgttgatcttatgtcttgatctattgttccgtgtatgttgattgtgtcctctctcctcctagggggccctatatttatacccataggtgtcccattgtccaagtagaactagggaaaccaatatggatacaatccgagtagtccttgtcgtttccatgtagaactctggttgtctttccttatccggaactccctccatatctgaagtccagtttccgtatagggcat

SEQ ID NO: 7450 - DNA, 435 bp, Oryza sativa
  Clone ID: PAT_MRT4530_14043C.1
atggagggagttccggataagaaaagacaaccagagttcaacatgaaaacgataaggactactcggattgtatccatattggtttccctagttctacttggacaagaggacacctctgggtataaatacaagccccctaggaggacagggggacacactcaccatgagacaatcaacacgatcaccatgatcgggatgaccacctcatcaacacccaacacaaacaacatacaagcctacatactccaagacaagacgccggatatcgacttcagggataggcatggttattctcctacagtgtctccggataccgtcaggagatacgaaagcgctatctctaatctcgccggactcggattcgaggaagaaggctaccctgttgtcgactacgagtcagaccttcagaccgccatgtcgacaacagttagatag

SEQ ID NO: 7451 - DNA, 421 bp, Oryza sativa
  Clone ID: PAT_MRT4530_14044C.1
atggaaacgacaaggactactcggattatatccatattagtctccctagttctacttggacaaggggacacctatgagtataaatacaaggccccctaggaggagaggggacacgaaacaacatacaaaccaacatacgccaaggcaagacgccggatatcgacttcagagataggcatggctagtcccctacggtgactatggctaccgtcaggagagatatagcgctgtctctgatctcgccggatgcggattcgaggaggaaggctaccctgttgtcgactacgagtcagtactacagaccgccaagtcgacaacagttagataggctaccccaaatattgtattgtctcgcatatatcctggtaccaacgatccccatactacgcaaataccggaatcgcgacatcaaacgtcgaca

SEQ ID NO: 7452 - DNA, 448 bp, Oryza sativa
  Clone ID: PAT_MRT4530_14045C.1
atggaagcgataagtactactcggattgtatccatattggtttccctagttctacttggacaaggggacacctatgggtatacatacaagacccccaaagaggagaggggacatagaacaatagatcaagacacaagatcaacatataagccaacatacgccaagacaagccgccggatatcgacatcggagataagcctagttagtccccatacagttcctacgacaaccgttaggagggatctagcgatgtctctgatctcgccgaacatggattcaaggaggaaaactactctgttgtcgattacgggatggttttatggccgccaagtcgacaacagttagataggctaccccaaatattgtactgtctcgcatatatcctggtaccaacgatccccatactatgcaaataccggaattgcgacatcaaacgtcgacacattta

SEQ ID NO: 7453 - DNA, 270 bp, Oryza sativa
  Clone ID: PAT_MRT4530_14046C.1
atgcgaggcccgtggcttgtgtcgccgtcgcgggcactccagccaaacccgaggatgcgaggcccgcgctgccgcgcagcttgtgttgtcgtcgtcgcgccagagagcagcgaaggtgccgccgaccacttaagccacccggctgcctccggttcagggatgcaagctaaaaaaacccgcttgtccgtcccgcttgcatcactgttccagcttggggaggatggcggagaaagtgaggtggggactggggaatgggaattggggatctga

SEQ ID NO: 7454 - DNA, 771 bp, Oryza sativa
  Clone ID: PAT_MRT4530_14047C.1
ctcttgccaagttgccgattggctgattgcgtccagggctccaccgctccaggcgggaggtgggcaggcggctgtcggctggcggccggcgggctggcgccaggcagctgagtggtgacttgtgtgctgtgcgatgcgatgccggcgacgagtcgacggtgctgtgcgcctgcctgtgcgatgcgatgccgtctgccaagttgctgaggcaacgatgcagcgatgctgcacctcctctcatctctcgggcgtttccggttctgtgataattctagaagcaagtagtaccttaacagttttttaaagaaaaagtagtaccttaacaactctgtcgatgattgatgtcgcgattccggtatttgcgtagtatggggatcgttagtactaggatatatgcaagacagtacaatatttggggtagcctatctaactattatcgacttgacggtctgtcgtactgactcgtagtcgacaacagggtagccttcctccttgaatccgcatccggcgagatcaaagacagcgctatgtctctcctgacagtatccgtagacaccgtaggggactagccatgcttatctctaaagtcgatatccggcgtcttgtcttggcgtatgttggcttgtatattgatcttgtgtcctgatctattgttccgtgtcccctctcctcctagggggccttgtatttatacccataggtgtccccttatcgaagtagaactagggaaacaaatatggatacaatccgagtagtccttgtcgtttctac

SEQ ID NO: 7455 - DNA, 349 bp, Oryza sativa
  Clone ID: PAT_MRT4530_14048C.1
gacgtcactactcactaggcatgaagtcaaggtgtacacaactacacaagcatgggagaccatggacttaattacacagtggcacagagcaacagatagctttattggtatagaggacactatacgcttatacgtacatacataccatatacgaggtgtacacatactgagcccatacgtacaaaaaccccggctcttattcagctgcacacgcccatggccacaccttacgcgtgcgcgcggacgccggtcatggcgccgccgccgccgaatgcatggcgcgatcgatcgatggatcatcaggcgaagagggggggcttttttttcccctcggcgccgagggcgccgg

SEQ ID NO: 7456 - DNA, 496 bp, Oryza sativa
  Clone ID: PAT_MRT4530_14049C.1
atggaaatgacaagaactactcggattgtatccatattagttttcctagttctacttggacaagggaacacctatgggtataaatacaagaccccctagaaggagaggggacaatcaacatacacggacaatctacacaatctacacccaccatagacgggacggaacaaaagaagccacaacatacaagccaacatacgccaagacaagacgccagatatcgacttcagggataagcacggctagtcccctacggtgtctccggatactgtcaggagagacgaaagcgctatctctgatctcgccgagcacggattcgaggaggaagactaccctgttgtcgactacgagtcagaccttcagaccgtcatgtcgacaacagttagatatgctaccccaaatattgtactgtctcgcatataccctggtaccaacaatccccatactatgcaaataccggaatcgcgacctcaaacggcgacataatatttatttt

SEQ ID NO: 7457 - DNA, 249 bp, Oryza sativa
  Clone ID: PAT_MRT4530_1404C.1
atgaaggaaaaaggaggcatcatggaaggaagctttggcagacgagtactaaccgctggggtgctgatcacggcggcgaggggaagagaggcgcacgcggcgacccgaaactggcacgccgggatcggggagaacagcgccgccgtcgagatcggggaggacagcgccgccgtcgacgccccttcgctcctgcatctccgcaccggcggcctgtacccggactatgggcttgcgtggttgaaggaatag

SEQ ID NO: 7458 - DNA, 901 bp, Oryza sativa
  Clone ID: PAT_MRT4530_14050C.1
atggacgacagcagcagtagcagcagcgaggttgagctgatgctcgagagggcgttcccggatggggtcgagatagacgtcgccacgcactgcgacggcctcatcgccgtcacgacggacgccggcgagacattcgtctgcaacccagccaccaaggagctcgtcacgctgccgctcggcatcagctgccacaacggctgcgtcgtctgggatcggttcgcggccatcggctatgatccgtggcgccgcgcaaccgggtgcttctactggtgcaccaacgaggacgtcggcaacccgagcatgttgctccggtttagccttcgcagccacaagttcgacatggttccatgccatccgggctgctcatccgacgtcttcgcattcaacaccgtgtcggagctggacggtaagctgttctacaatgctctcgacgtttaatgtctcgactacggtatttggacagtatggggatcgtcggtgctaggatatacgtgagacagtacaatatgtgggtagtctatctaactgttgtcgacatgtcggtctgaaggtctgactcgtagtcgacaacagggtagtcttcctcctcgaatccgtgcccgacgagatcagagatagcgctttcgtatctcctgacggtatccggagacaacgtaggggaatagccatgcctatccctgaagtcgatatccggcggcgtgtcttggcgtatgtaggcttctatgttgattgtgttgggtgttgatcctgtcgggtgttgattgtctgtgctgatcaccccatggtgggtgtccccctgtcctcctagggggcttgtatttatactcataggtatccccttgtccaagtagaactagggaaaccaatatggatacatccgagtagcccttgtcgtttccat

SEQ ID NO: 7459 - DNA, 1368 bp, Oryza sativa
  Clone ID: PAT_MRT4530_14051C.1
atgaccagcgttgccaccaggattgccacgctcgtgcgggccgcggcggcggcgagccggccattgcggctccaccgccggcccggcggcgaggatacgaggatggtggtgatcgtcggcgccacgggcaccgggaagaccaagctgtccatcgacgccgccaaggtgatcggcggcgaggttgtcaacgccgacaagattcagctctatgacggcctcgacgtgaccaccaacaaggtgagcctcgccgaccgccgtggcgtgccgcaccacctcctcggagccatccgccccgaggccggcgagctcccgccgtcgtccttccggtccctcgccgccgccacggccgcgtcgatcgcggcgaggcggctcgtgccggtcatcgccggtgggtcgaactccctcatccacgccctcctcgccgaccacttcgacgcctccgctggcgatcccttctcccccgccgccgccttccgccactaccgcccggcgctccggttcccgtgctgcctgctctgggtccacgtcgatgaggcgctcctcgacgagtacctcgaccgccgcgtggacgacatggtggacgctggcatggtcgaggagctccgggagtacttcgccacgacaaccgccgcggagcgcgccgcgcactccgggctgggcaaggccatcggcgtccccgagctcggcgactacttcgccgggcgcaagaccttctccgaggcgatcgacgacatcaaagccaacacccgcgtcctcgccgccgcgcaggtgtccaagatccgccgcatgtccgacgcctggggctggcccatccaccgcctcgacgcctccgacacagtccgcgccaggctcacgcgggcgggctccgccgccgagtccgcctcctgggagcgcgacgtgcgcggcccaggcctcgccaccatccgcagcttcctcgccgatcagtcaccgccaccgcgcagcgagggcaccaacgactacctgtacgccatggagacggaaccagagccgccgccgccgccgacgttgccgccgcggctgctccggttgccgcggatgcagtactgcgacatggtgggcagaatttgtgtactctttcttggagaggtggtgattcatcacatcgctctcctcctaaccgcggcacttatactccagtccagtacttttgcctgtatcatcgctgcagtatacgaatgccaagtctcctggataatcgcaagctttgcctccggcctattttgcaggattgctgtactggatgagacagtcaaggagttagatatttggaagcttaagatagtcaatggatttctaaaaattacaatgtgtctgaaagattggtcaggctatccccttggagtgtga

SEQ ID NO: 7460 - DNA, 381 bp, Oryza sativa
  Clone ID: PAT_MRT4530_14052C.1
atggcgtcggcagtggccttggcgcacgagctgccggaggcccggctcggcgctagggcgcggctgaggctaggggcgaagctccggaggaggtgtttacacgagctgatgcgcaccatctcatgcttcaagctcacttggtccttctcctcgttgggagtcgaagtggacttattacgtctcaatattctggcgagattgggctttccagtttgtaccttggatctgacgccgaaagctcatcagctgacagcaatggtgaaacaaagatttgcagtagtcccacttcgccttcgctgctacggcgatgctctgcgaatctgcgaaaaacgcaaccgaccaaacaaagttttccagctcggaccgcatgcgattctttga

SEQ ID NO: 7461 - DNA, 448 bp, Oryza sativa
  Clone ID: PAT_MRT4530_14053C.1
gctctaataactgtacgtctattgcacagctcaaatcattgtacatcatacatctggaaacccatctgaaacacactaaaaagaatttacatcacatgcctcttttagccacaatagcaagacctctacgttctttgcccaatcagacagcacaagtgaattacacagggtttgaaaagtaattctgggaacactctcttcggaggccatgcaattgtggcttgaaacagaagatctggttcaattccatccgcttgcattgcctgaatgaccttttccatatcttcaatatctctagcagcacccttggtatctacaaggagcttataagtgaagagggaaggcttcacattctccttttccatcattgtgagaacatcaccaagcttcttcttgtccactctcttgtagagtagcagaagctgattgcaagaaaatacgctaactg

SEQ ID NO: 7462 - DNA, 535 bp, Oryza sativa
  Clone ID: PAT_MRT4530_14054C.1
gtcagatggcgcatcaacatctaatatgcgtagaggacggcgaagaagtataagttttacccctgaaattggtgacgatattgtgaggactgataggaacttttacttgcttgtttacagcgcagttcgagcaatgagtgaaaggatgagagagaatcgcctttcaaggggacaaatgatggaatcacctcatgatttcaatgacaatgaactacatgtaagaggaccagatgagcaagagggctcaagaaggcaagttagtaaccagaaggctgtgtcattaccttcatcgccccatcgattgcgcagtgatggttctggcctcagaggaccagccgagtttctgacagcagatctgatgtccacttggaataaggttttgcgatcttcaccatttctgaacaagcctttattgcctttcgaggaatggcatattgagttctcagagattactgttggcactcgagttgggataggcaagtacatgggttctttggagaagttttccgtggtatctggaatggaacagacgtag

SEQ ID NO: 7463 - DNA, 2506 bp, Oryza sativa
  Clone ID: PAT_MRT4530_14055C.1
tttttttttttttttttttttttttttttttttttttttttttttttttttttttttttttaccatggaaaatggtcacacgaccaatggtgtaacattaaagatgctttgaggcttgcttattatagtacaggttgccaatttacatcatcaacgatgtcaaaatgatgagaaatgggaaaaagaaacgatgtataagccgaaccaattcgctgcctctaaaaccgctatacagaccagaggcagattatctcaacataaggtgtattcgcagtcaagcaagcgggtgagaatctcctggcaacctggacgcttatccggttccgcccagcaatcagctatcaggcttccgagaggtccatggattatagtagaataagcgtagtcattctttagccacccaataatctgaactgacggtattccttcccaaggcctactcagagtgcaaagctcccacatgataactccaaggctgaagatatcacacttctctgtaaatggttcattacgaataagctcaggggccatccactccggagttcctttctggccacttgcatgaattaaatagtacaacgaacccatttccatatattcagtgactaaggataagtgaggaggcacggaaaacttctccaaagaacccatgtacttgcctatcccaactcgagtgccaacagtaatctctgagaactcaatatgccattcctcgaaaggcaataaaggcttgttcagaaatggtgaagatcgcaaaaccttattccaagtggacatcagatctgctgtcagaaactcggctggtcctctgaggccagaaccatcactgcgcaatcgatggggcgatgaaggtaatgacacagccttctggttactaacttgccttcttgagccctcttgctcatctggtcctcttacatgtagttcattgtcattgaaatcatgaggtgattcatttttttgtgaatcattcaattgtccaggactaccatcattttgtccccttgaaaggcgattctctctcatcctttcactcattgctcgaactgcgctgtaaacaagcaagtaaaagttcctatcagtcctcacaatatcgtcaccaatttcaggggtaaaacttatacttcttcgccgtcctctacgcatattagatgttgatgcgccatctgaccttgagacagctacaccatctccatgctgtctatcaccaagcatagagcgtccccgtgttctagacaatgggtgctctggacttgagctagcagttctttgatgttcctccacaaccttcctccggctgcgaccacagaaggaattggccacatttggttcactgtgtgatgagcatcgcaatttaccctccatagagtttgtcgatttaagcatgatatttcttagagatggtactttgaaggacctattgttgtcatcttgctcttggcgttgggaacacagaggactattaggttcaagaggagaatcacaagaatcataatcagctgagtcactctctccagctgcagatatatgtgatgtaattatagccttggatgagaatggaactagttgtccaggaaaacgcataagatcaactagaaactccacagatttcagcataaccacaacagacatatgtttggatgagtcatcatattcatggtattcttcattcggaatgcccaccagcaacttacaatccataccaacagcatctgcaagaactttgaataatattgctctgggcctacaagatccatgtctaatttgccccagcaattgaactccacggttttccatgaaatgagaaatttcctcagaggaagttcttgcaggactgagttgcggatttggccgtttatagaagtcagaaaccaaccctgcaatcttttttatcattgcagcagggttcgatttcaatccttttaccaatgctgcacatagctgctttatagcagatagttttttatccttctctaaatccacaagaattatctcagctttgaatccctctattccaagggaataaagatcatctggagacgggatggtgtcaaaacgctccttcagtttcttatcaggaataattgaataaaaaccattgggtattggacttgataaacacccagtacaccataatgtctgggcagcccataatgaatggtcaccttccccacaatgagaagatcctggcgaacccgaattcctttcctgtttagtcagagaaattgatccgagcttgtgctccgcatgtgaggaccaccaatttggatctgaagggtgtgcgtcggattgtccttgatcatccggcagatcatccatctcctacatatgttgaaataaagaatcattttatggattcattctacaaggtcaacctgggtggcgcggagacgagagggggggcctcccgcgtctcccctccgatagcaacctgcgcgcggcggcggcggcggaggaggaggaggaggaggcgggcggtgggaggaggaaggagaagggggatctc

SEQ ID NO: 7464 - DNA, 176 bp, Oryza sativa
  unsure (1)..(176): unsure at all n locations
  Clone ID: PAT_MRT4530_14056C.1
ggagccatggcaaggggagacatagtcagacaccgcagagaagtgtgtgtctgcctnngtgaaagataagcgcgtctgctctgctcgcgaggagagagagagagagagagnagagctagagatggcgcggctcagcgcgcgagcggagggacgtgatcggatcacagctcgcggtg

SEQ ID NO: 7465 - DNA, 315 bp, Oryza sativa
  Clone ID: PAT_MRT4530_14057C.1
agcataacacacacagagggttgaactcatgacttatgtcagataataaaatattgtaccatgtgggacaagtgctgctacagtgactgtgctgacaagagcctgcgcgtgacgaaaggtacgatctatggcgtcataatagatgaagtcttgaactgccactatacggagggcggcgacagagaggagaacggcagatgcaagagcaggactctgctgcttctgcaccgactgcaagtgcagcaagagaagtcacataaatagctcgaacacttatgcgtcggcgatgcacctaccttaatatgttcacattaa

SEQ ID NO: 7466 - DNA, 1317 bp, Oryza sativa
  Clone ID: PAT_MRT4530_14058C.1
atggcggggctggcggcggcgcgcgagctgcggcgagagggcctcgacgtgacggtgctcgagcagagcgccgacgtcggcgggcagtggctgtacgacgcggcgaccgacggccgcgacccgctcggcatggccggcgtgcacagcagcatttactcctcgctccgtctcaacagcccgagggaggtctgcggcttctccgacttcccgttccgccccaccaatggcggcggcggcgacgcgcggcggtaccccgtccacggcgagctcctcaggtatatccgggagttctgcgacgtgttcggccttatggacgccgtcaggctcgacacgacggtcgtgcgcgtcgccatggcgccgccacggcgcgacggctcgttgcggtggacggtgaggagcaagcacaacggcgatgcggagacggaggaggtgttcgacgccgtcgtcgtggccaccgggcaatactcccagccaaggcttccaagcatcgacggcatggataagtggaggaggaggcagctgcatagccactcgtaccgcgtcccggactccttcgccggcgaggtcgtcgtcatcgttggttgcaacttgagcggtaaggaagtcgccctggagctcctccgcgtcgccaaggaggtgcacctgagctccaagtcgacgaaggaggccatgacgccgtcgatgtccaagatgctcgccaggacggccgggtggtgttcgacgacggctcgttcgtcgtcgccgacgccgtcatctacggaggggaaggtcaccgtcgacgacaaccgcgtcgggccgctgtacgagcacgtgttcccaccggcgctcgcgccgtcgctctccttcgtgggcatcccggtcaaggtgatcctgccgcggttcgccgaggtgcaggcgaggtgggtggcgcaggtgctgtccgggcggaggacgctgccgtcgccgggggagatgctgcgcgccgtcgaggagtacaaccgcgccaaggaggccgccggcttgccgaagcggcagacgcacgacctgttcttggacctggagtactgcgacgagtacggcgagcgccactgcggcttcccgcggacggagcagtggaagaaggagctgatttggtcgtccatctccgacatgtgcgacgacatcgagaacttccgcgacgactaccacgacagcgacatcgtccgcgacggccggcgcctgcacggctgggcttcctctcctcccctcgcgccgcggccgcaggagaaggacgacgaccatgacaaagaagaagacaagcatttgggatttggccctagtaaattcagcttaagataa

SEQ ID NO: 7467 - DNA, 337 bp, Oryza sativa
  Clone ID: PAT_MRT4530_14059C.1
ctagttccggtcgggattagttcggggcgtgacatagtcggaggaggctgccccccgatgccacgtggccctcccccgaggggagtcaggcccgaggtagggcagcggccactccttcccagagactggatggaggaggctgccctccaatgccacgtagccctcccccgaggggggtcgggcccgaagtagggcggcggccactccctggccgagactagagggagaaggccgccccaggcgccacgtggctcccccccgaggggggatcgggcccgaggtcaggcggcggccgccccctcccatgaccaggggtcgggctcccccgaccccctct

SEQ ID NO: 7468 - DNA, 229 bp, Oryza sativa
  unsure (1)..(229): unsure at all n locations
  Clone ID: PAT_MRT4530_1405C.1
cccgggtcgnacccacgccgtccggngaataccaggnaataaagtttcaactgactttggcatagtacacggaaaactagaatggaaagctgtaacaagtgaagtattgcaacaatgtgcaaaagtggtacttcttatcatacaaatggtttctcactgtcctgtggtatccatttttgaaacctggagacaattcgttgccaactttggagaaaatattattcctgac

SEQ ID NO: 7469 - DNA, 1618 bp, Oryza sativa
  Clone ID: PAT_MRT4530_14060C.1
atggcgattggctcggtggaatccgtggccgttgtcgcggtgcccttcccggcgcagggccacctgaaccagctcatgcacctgtccctgctgctcgcgtcgcgtgggctggacgtgcactacgcggcgccgccggcgcacctccggcaggcgcggtcgcgcctgcacggctgggaccccgacgcgctccgctccatccgcttccacgacctcgacgtccccgcctacgagtccccgccgcccgacccgaccgccccgccgttcccgtcccacatgatgcccatgatccagagcttcgccgtcgcggcgcgcgccccgttcgccgcgctgctcgagaggatctcggccagctatagccgcgtggttgtcgtgtacgaccggttgaactccttcgccgccgcccaggcggcgcgtctgccgaacggcgaggcgttcgggctgcagtgcgtggccatgtcgtacaacatcgggtggttggaccccgagaaccggctcgtacgcgagcacggcctcaagttccaccccgtggaggcctgcatgccaaaggaattcgtggagttcatcagccgggaagagcaggacgaagagaacgcgaccagctccggcatgctcatgaacacgtcccgggcgatcgaggccgagttcatcgacgagatcgccgcgcacccgatgttcaaagagatgaagcttttcgcggtcggtccactgaacccactgctcgacgcgaccgcccggacgccaggccagacgcggcacgagtgcatggactggctcgacaagcagccggcggcgtccgtcctctacgtgtcattcggcacaacgtcgtccctccgtggcgatcaagtcgcggagctcgccgcggcgctgaagggcagcaagcagaggttcatctgggtgcttcgcgacgccgaccgcgccgacatattcgccgactccggcgagagccggcacgcggagctgctgtcccggttcaccgcagaaaccgagggagtggggctggtgatcaccgggtgggcgccgcagctggagatcctcgcgcacggcgccactgcggcgttcatgagccctgtggctggaactcgacgatggagagcctgagccatgggaagccgattcttgcgtggcccatgcactccgaccagccatgggacgcagagctggtgtgcaaatacctcaaggctggtctgctcgtgagaccattggagaagcacagcgaggtggtcccggcggaggccatccaagaggtcatcgaagaggcgatgctgcctgagaaagggatggcaatacggcggcgggcaatggagctcggcgaagtcgtccgcgcgtccgtggcagacggcgggtcctcgcggaaagacctggatgacttcgttggctacatcacaagatgaagcaggaatatcctgtgattcttcgagtggtcggatatgctataaattttaatcttacgtcgaaacatatcaaattttaaaaaatggcctaagtaggaaaatatgtgtaccactccctccattctcaaataagcatttcccggattcaaattctgtatgcggtagccatttctgaaatactgattccattgtatggaaattcaaatcaaaaaaaaaaaaaaaaaaaa

SEQ ID NO: 7470 - DNA, 246 bp, Oryza sativa
  Clone ID: PAT_MRT4530_14061C.1
tcggttcgagcacccgaggcacggatccatcgggttactgcggaggaagcgctcatcgcggcaccgcacaaaggataagacattacctacggatgacgttaccaagccatgccgactcacattcttcgtggggtacaaaggtgtgatgacccactttgcgcgagaggtacctatgccggtgtccaaactatacaagaaggagactctgggaggctgtgaccatgattgagacacctactattgacg

SEQ ID NO: 7471 - DNA, 571 bp, Oryza sativa
  Clone ID: PAT_MRT4530_14062C.1
aactacttactggaacacccaaaagcaccacactgaagtgcaacatttgcaaatgaactagtgaaatactagaaaatacttattgaaacacccaaatagcatcgtacgcaacataaagaacaactctttccaacacaaaaaacttaaaatgtggaacaaatttaaattccaattgaaacgttggcatctgacacgtgaaacataaaaaaacaatggtctaaaccttcttttttaattgtaatataatcatatgacatcttgttgtaaagatttaattgcaccaaatatagcagtgatcggatcgttgatcgaataaataattttagagaaaatatttagaacatgctaatagatttaatgcatgcacgcattttgttagcaaaacaacatgcattttgttagcccgcatgcgtttatgcatgcatgcatggaactgggatagagcaagagaagagagaaaaaggtaattgctcatcttgagaaaaaatcttgtggtcaacacaaccctggtccaccatttggagcgaccgatatttccctggcccgtcgagtgcccgggggaaagcattct

SEQ ID NO: 7472 - DNA, 968 bp, Oryza sativa
  Clone ID: PAT_MRT4530_14063C.1
atgttgcagccctcacatgagctgcagtctcctgtgccagctttgcccttccacttgtcgagtgcatgtgggcaaatggggagattcaatgaggccattgatcagttgatcaaatttcctgctggtaccaacagtaaactcaatgagcccgaggtttcacattcagtaccactcacacctctagagggagatataactctagaaactaaaggaaggaggctggaggagctggagttgaaccctaaagagaagggaatcatcttcaagatagatggtgagaaaatgtatgacagggcacaatggccctttctaatagaggtgctagagagggacaattttagtcccaaatttacaaggtgcatcagagaggctgtggaaatggcaaaactgagcggcggtgggcttgggagcggtcgggaccggcaacagctggatcgaggagcaacacaggcgggcgagagagacggcgacgagctcgggccggcggcggctggcttgggagcagcacttgtgggcggtagtgtcgacgtttgatgtcgcgattccggtatttgcatagtatggggatcgttggtactagggtatacgcgagacagtacaatatttgggggtagcctatctaactgttgtcgacatggcggtctgaaggtttgactcgtagtcgacaacagagtagtcttcctcctcgagttcgtgcccggcgagatcagagatagcgctttcgtctctcctgacaatatccggagacaccgtaggggattaaccgtgcctatctctgaagtcgatatctggcatcttgtcttggcgtatgttggcttctgttgttccgtgtatgttgattgtgggtgtgtattgtgtcccctctcctcctagggggccttgtatttctacccataggtgtccccttgtccaagtagaactaggaaaaccaatatggatacaatccgagtagtacttgtcgtttccat

SEQ ID NO: 7473 - DNA, 445 bp, Oryza sativa
  Clone ID: PAT_MRT4530_14064C.1
tatatgtcgacgtttgatgtcgcgattccggtatttgcatagtatgtggatcgttggtactagtatatatgcgagacaatacaatatttggggtagcctatctaactgttgtcgacttggcggtctgaagtgttgactcgtagtcgacaacagggtagccttcctcctcgaatccgcatccggcgagattaaagaaagcgctatgtctctcctgacagtatccgtagacaccggaggggactagccatgcttatctctgaattcgatatccggcgtcttgttttggcgcatgttggcttgtatgttgatcttgtgtcttgatctattgttccgtcccccctctcctcctaggggtcttgtatttatacccataggtgttcccttttccaagtagaattagggaaaccaatatggatacaatccgaataatatttgtcgttttcat

SEQ ID NO: 7474 - DNA, 484 bp, Oryza sativa
  Clone ID: PAT_MRT4530_14065C.1
atggaaatgacaaggactactcggattgtatccatattggtttctctagttctaatttgacaaggggacacctatgggtataaatacgagacctcctaggaggagaggacgaccacctcaatcaacacccaccatagacgacgcggaacaatagatcaagacagaagatcgacatacaagccaacatacaccaagacaagacgccggatatcgacttcagagataggcacggctagtcccctacggtgtctcaagatactgataggagagacattgcgctgtctctgatcacgccgggcacgaactcgaggaggaatactaccctgttgtcgactatgagtcagaccttcagaccgccatatcgacaacaattagataggctatcccaaatattgtattggtgtgattatgatgaataagagcaatatcggcttcggccaacaggatgtagggatattacctgataatttaggggcgcgaacct

SEQ ID NO: 7475 - DNA, 142 bp, Oryza sativa
  Clone ID: PAT_MRT4530_14066C.1
ccgggctgcaggctggatgtagttccgaaagccgaaggcttgattgtcttctttcctggtaattttttcttctgttcacatgattggagttgcctttcagcattagaataactgagacgctgatgatatttttctctgttca

SEQ ID NO: 7476 - DNA, 412 bp, Oryza sativa
  Clone ID: PAT_MRT4530_14067C.1
acgcctccaaatattgatattagagataatcctagatatacccaatctggcgcctacagaggccaataagaggaatttagcactatctctgatctcgacgagtacatattcaaggagaaagactaccccgtcgtcaactacgtgttgatgaataagagcaacaccggcttcggccaatagaagtagggctattacctgattctgatgaataaggggcccgaagttgtataaaaatccttgtctctgcctcttttatctcaatctcgcatataccatgttaccaatgatccccatatcatgcaaataccgtagtcgtgatctaaaatgtcaacagatgtgtcgggtacctcacccgcacgcgggcagccgcttgcatgggaaaataaaaagatgaaacaaaagaaaaatcaaa

SEQ ID NO: 7477 - DNA, 1064 bp, Oryza sativa
  Clone ID: PAT_MRT4530_14068C.1
tctcggcgggtacaccatctcttcattccgtactccttgtcgagatccaccaaccgttctcgagtaatcgagtaggcgtagagtctgcgacggagccttgtcaacatttgtcgtactcgccttagtcaatcttggtgtagaaccatagagacatggagtcttcgataatgtcgaatagaattttcctgatatcaactttgttgaagtagaggtaatgggagaatcgctacacctctggtcaagaaccaggtagtagtcgtaactcaaccatttttctcaaatagtccagccatggccggtgctatgagataggtcatcggtcttcgttggtaggttgggcacgacgactctgcatttgtcgagatcgtcctcgataatgcggtgtacttgaccacaacctactcgagtgctcaattgttcctgcaaaatattttctttgtagatacatgccggatgtatcttgtcacgtactcgttcgatatcatgcgatctgacatcttttggtacgtcgcgtatcttgaggcttggtcgatctcgagagatcgaattgttgatgacgatggttccgatctcgtcgggagatgtactggtgcgccactgtcgacgtttgatgtcgcgattccagtatttgcatagtatggggatcgttggtgctagggtatacgcgagacagtacaatatttggggtagcctctctaactgttgtcgatatggcggtctgacgatctgactcatagtcgacaacagggtagccttcctccttgaatccgtgcccggcgagatcagagatagcgctttcgtctctcctgacagtatccggagacaccgtagggtactagccgtgcttatccctgaagtcaatatccggcggcgtgtcttggcgtatgtaggcttctatgttgtggcttctatgtcgattgtattgggtgttgattctcttggttgttgattgtcccccctctcctcctagggggccttgtatttatacccataggtgtccccttgtccaagtagaactagggaactaatatggatacaatccgagtagtccttgtcgtttccat

SEQ ID NO: 7478 - DNA, 969 bp, Oryza sativa
  Clone ID: PAT_MRT4530_14069C.1
tgtcgacgtttgatagtcacgactagggaatttgaatagtatgggatcgttggtaccagggtatatgcgagattgaggtaaaagagatgcagacagtgatttttatacaggttcgagccccttatctgataggtaatagccctacatcctgttggccgaagccggtcattacttttattcatcataatcacaccagtacaatatttggggtagcctatctaactgttgtcgatatagcggtctgtagttctgactcgtagtcgacaacagggtagtcttcctcctcgaatccgtgtctggcgagatcagaaatagcgcaatctctctcctatcagtatccagagacaccgtagaggactagccgtgcctatctctgaagtcgatatctggcgtcttgtcttagcgtatgttggcttgtattggcttgtggcgtctatgttgtctgtgtcccctctcctcttagggggtcttgtatttatacccataggttccccttgtccaagtagaactagagaaaccaatatgaatacaatctgaatagtccttgtcgtttccatgtagaactctggttgtcttttcttatccggaactcctcctctatccgcagtttgtttccgtataggacatggtatgtggtgggtcctgccgagatttagtcaactaatgtggtatccataaccctgacaacagttaaatttactttttcgttgcaacttgtagaagttaaatttaaacttgtgtagtgatttatcacatattagtctatatttttatttttattttttataaccatttaaatgtcatgtaaataacgggacagtatcctctcaagtttaaaataatctcccattcaatttgctataacatccccgcgttcatgatccatcttcttgtcgccctcctgatgggagctaaactaaagggcaccatctcgtattcaccaaacctcctgcccctcacgaagaaggc

SEQ ID NO: 7479 - DNA, 1395 bp, Oryza sativa
  Clone ID: PAT_MRT4530_1406C.1
atggcggcggggaacgggagcccaataggtcctccgcctccgccgctcgagttccgtcgccccgtcgctgtgcagcggcgcgtccgacgctcgccactcccaactacctccgccatcgaccgtcgcttgtgctccattaccccattgctgcttccccctcctgtccccgtccccgcctaccacctactccgctccctctccgccgttgcctccgccaccatccccgaccaaaaccactacggtttaagtcaaggacccgtcaccatggcggaggacgacggcggcgtcggcggcggcgacgagtggagcggcctagatcccttcttctacgacgaggcggcggcgagagcggacggcgagcgagcgctggagaggcagcgggagaaggagcggaaggaggcggagcaccaggcgtggcgggaagcctgcgacgccgccagggacaagatcctcgagtacgaccccaagcatggctgccgcacctacacccgcttgtggttctgcagctccatcctcttcaacctcgacgaggagtcgccgatcggccccttgtgccgaaccgtcgaccgcggccagccgcccctccaccgagccggcgacagcaggctgcgcatgtcgttgaacgtcctcgccgtgaacatcgtctcctccgacgtcggctaccccgtgctcgtctacggcaccgtcatcgccagggatgtcatcgatcgaaagtgcctctacctcttccgccgcaccaccgacaatccccagctcatcacctccaaggcaagtgtccgactccggttcttcgaggtgaatctcaagttgaaggaggaggaggatgacggcgatgtcgtcgtcgacgacagagaattcagcaaagggctaatcgaatttagaagcctgagcatgccaagaggtgtcgaggatgtggtcgtcggaagctgcagcacgctggatagcaggctcagcacggtcgagctctcctacgcctacatcggaggcgccgtcgaggccgccgtcgacgtcaccctgcgcctgcctgccgccgccggcgccggccgccatcgtcgctgcttccatggacagatcactgcgtgcagcagcagcatcccggatgcatccattgtgctctacgacagcagcaaagtgaacgcgaccagcaattcttcagctggaggcgccgccggagacgtcgccgtcgatcttgcccgccgcgtcatggccgtccgtgcggccgacgagctcgtcttgacgctcattgctgctgcaggcgatgctgactgccacattatcgcacaaatgtcgaattcactccaaggatctgtggttcagagagccttgaagtcagcatctgcggaattaagctgctcatcaaggtttcctggtctgcattttaaacaaatttactga

SEQ ID NO: 7480 - DNA, 212 bp, Oryza sativa
  Clone ID: PAT_MRT4530_14070C.1
gggtgaaaacggtacggaaactttccagattctggacctattttcgaaaacggaatatgtcggtcggaatttttcggaaacggaaacgaattcggaaatattttctcagaaatgataagggcagtttccgtcggaactcggaatcggtcggaaactttccgaaaattttctcggaatttccaaaaattttctcggaattaccagaaattttg

SEQ ID NO: 7481 - DNA, 647 bp, Oryza sativa
  Clone ID: PAT_MRT4530_14071C.1
accagattagcatgtccagtcaatgaagaaaatctggtctttctgcacggactttgggtgttcagccagcagggcggtgcagtcttgcagagctataccaggtctacttcagcatgaggaagcagtcaactaacaacgtcggcggcaagcacatgctgggaatgcatgagactgtgttaattgggctcatatgtgtcgacgtttgatgtcgcgatttcagtatttgtatagtatggggatcgttgggactaggatatatgcgagacagtacaatgtttggggtagcctatctaactgttgtcgatatggcggtctgaagttctgactcgtagtcgataacagggtagtcttcctcctcgagtttgtttcaggcgagatcagagatagcgctttcgtctctcctgacagtatccggagacaccgtaggggactagccgtgcttattcctgaagtcgatatccggcgtctttgtcttggcgtatgttggcttgtatgttgtggcttctgttgttccgtatatgttgattgtgggtgtgtcccctctcctcctagggggccttgtatttatgcttataggtgttcctttgtccaagtagaattagggaaaccaatatggatacaatctgagtagtccttttcgttttcat

SEQ ID NO: 7482 - DNA, 672 bp, Oryza sativa
  Clone ID: PAT_MRT4530_14072C.1
gcaagaagtaacatttcagcgaattattagaataaaaaacaacacaaaattattgtgtgcaccagcttacaaaaattgttggtaatattatcattatttttacaacaaatgtctcttaactattttttcttggacctcagctctgccactctttcctcggtggccttcaaagcttcaccgtatatgctcaccagtccatcaacttctctttggctcattattagtggtggcgacatggcgatctcatctccaacaaccttaactagcataccacgcttcttacactctgctccaaagatttgcgcaactccccactcaacaggaaatggatcatttggtgatttgttattagcaaattcagtcgcgagcagcaaacctacaccacgtgtctctcctataattgaacttcccgcgaaggccttgattccctcctggaaccttggagaaatttgcttgacatgagcagggatgttcctttcccgataaattttcagagcttctagggcgacagcacaagaaactggatggccagagtatgtaaagccatgagcaaaaaagccaatcttattgctctgagaatgaactacatcggatatttctgggctgacaagagtcgctccaattgggacatacgcagatgagagtgcctttgctaaggagacgagatctggc

SEQ ID NO: 7483 - DNA, 781 bp, Oryza sativa
  Clone ID: PAT_MRT4530_14073C.1
atggaaacgataaggactactgtgattgtatccatattggtttccctagttctacttggacaagcggacacctatgggtataaatacaaggccccctaggaggagaggggacacggaacaatagatcaatacacaagatcaatatacaagctaacatacgtcaagacaagacgccggatatcgacttcagagattagcatggctagtcccctacggtgtctacggatactgataggagagacatagcgctgtctttgatcttgccggatgcggattcgaggagtaaggctaccctgttgtcgactacgagtcagcacttcagaccgccaagtcgacaacagttagataggatctatctcttttacctaagtctcgcatgtatcctggtaccaacgatccccattctatgcaaataccggaatcgcgacatcaaatatcgacaaatactctgtctatctgaccgaccacatgccaccaattagacctgcccatagacggcgggcttctgcccgtacttccgccacgcccacaagtccggcgccggcccgctcgccgccacgcgcaccacctcctttctcgtgggccacaacgagggccccgcagagctcgtcgacgaccatgggggcctgatcaccccagccaccaccggtctgaagccccgggagcggcgccatccacgccgcgtccccgtcgtctccctcctcccacacggcgggcagcgccgcctgctgcgccgtcatgggcggcgcgaggaacgacgagaacgggtcgtcgtcgtact

SEQ ID NO: 7484 - DNA, 213 bp, Oryza sativa
  Clone ID: PAT_MRT4530_14074C.1
atgaggcgtgggctggtgcggcacctcggctggggagacgctacagaatcgtacgcaggggctcgggccgacacgacgtggtggaggtaccaggcgcactacaccaagtgcaagctcgccgcgacgtgtccgctcaagctgcagcttgcgccgccggcggtggtgttccagaaggtcaagtgcaagcttggcactgccgacaagaactactag

SEQ ID NO: 7485 - DNA, 1236 bp, Oryza sativa
  Clone ID: PAT_MRT4530_14075C.1
atgggccgcgccgtcggcgcgctggtcgcctccgcgtccgcctcgccggcgccgctgcacgcgctgaacgggctcgtggcctccatccgcagcccgtggacgagctccacgcgcgcggcgagtacagcgcctctcggtgtccgcccaccaccgccgctgccatcaacgccgctccctcgtgttcctgatccactccggcgccacgccaccgcgcacgagcatctcgaagtcctaaagggggtgaccgtactcaaggacgtttcttgggaggtgcagcgtggggagaaagtcaggctcgtcagcgtcaacagcgccggcaagacgacccatctccgcatcgccgcggggctggaggaccccgacaccggcaatgtcgtcaaggccaagaaaaacgtgaggatcgcctctctcagccaggagttcgaggtctgcgcgttgctcaccatcagagaggagttcctcgccgcattcgaggaggagatggaggtgaggtctcgcctggagaaggtgcaggccgcgctggagggtgccaccgaggacatggacctggggaggctcctcgacgagctcgacctgctacagcggcggtcgcaggatgtcgaggtcaagatccagaagctcatgcccaggctcgggatagaggatcctgatttggtgctgctcgatgagctgatcaatcatgtcgatttggatacgattgtgtggctggagagccacctcaagacgcaggaagtgccaatgatagtggaaactgtattcggcatgtccaaaacacacaaggcaaactattcagaatacgttttggcgaaggcaatttgggtggagactcagtatgccacatgggagaagcagcaggaggagattgagcagacaaaggaactgataaacagacttggggctggagttaacgcagggcgtgtgtggagcgagcagaagatcaatgcagttgatctctgtatttcagccatctgtcattacttactaattgctaaatggaaaaggttgtttccgtataggacatgggagactgtttgtttacttgctttgacacatgttggtatttttcggcttgttggatggccttcagtttatgtcaaggttcctacaatcctgcaagtattatatgctcacagccctgtttatttagtaggaataaggctgtgtttggtagggagatggattcccaacacccacctcccaacaaagcctaagttcaccggaggtccctcaacttaa

SEQ ID NO: 7486 - DNA, 442 bp, Oryza sativa
  Clone ID: PAT_MRT4530_14076C.1
atggaaacgacaagtactactcggattgtatccatattggtttccctagttctacttggacaaggggacacctctgggtatgaatacaaggccccctaggaggagaggggacatggaacaatagatcaagacacaagatcaacatacaagccaacatgcgccaagacaagacgcctgatatcgatttcagagataagcatggctagtcccctacggtgtctacagatactgtcaggagagacataacaatgtctctgatctcgccggatgcggattcgaggaggaagactaccctgttgtcgactatgtgatgatactttagtccgctatgtcgacaacagacagataggctaccccaaatattgtactgtctcgcatataccctggtaccaacgatcctcataccatccaaataccgtagtcgtgataccaaacgtcgaca

SEQ ID NO: 7487 - DNA, 427 bp, Oryza sativa
  unsure (1)..(427): unsure at all n locations
  Clone ID: PAT_MRT4530_14077C.1
agccactgggacacagaagaatgtgggaaggagctaacgttaggagatgaaaatatggcaggtgagaggaagaaaggatgctgtccctcaccaccatgctcagctgcagcgcacagcagcaacccccaggggagaggtgctattcctccagtagtcggttggcctccaatccggtccttcaggagaaacctcacaaatggcagttcatttaaacagtcccctgaacgacaaaatgacgaagctgatgacaaggcaaagccaatcttgcaagaagagacctcttgtcaaaatcaacatggatgggatncccattggaagggaaagtagncctttcaaatatacgacagcttaccagaagcttgtcatctgctgttngaggagtttttccgtggtttttntttgaagctcaaaagatctatcttgtgct

SEQ ID NO: 7488 - DNA, 456 bp, Oryza sativa
  Clone ID: PAT_MRT4530_14078C.1
cccacgcgtccggcatgaggaaggtggatacctttgcgccgcacaacgacggccaccagtggaggaagtacggcgagaagaagataaacaactgtaatttccccaggttcggatgaaagatgatatatttgcagtatatttcctcatttctggtatctgcatctgtatatcttctggaaagagtgggcatctgttcattcttgtcaaccttgtcctctcctgcaaacaataagaaatttatcagttagacacctttctgtgatgatacttagatgctcttctcattctacccacccaaatcgaccacaaagagatgtgttgcaacaaatagtcgtagaaaactgaacccttttcttgttcatttcactcaaactgttgtctcgcctgtctcaatgcagatactactacagatgcacctataaagataacatgaattgccagcaacgaagcagattc

SEQ ID NO: 7489 - DNA, 587 bp, Oryza sativa
  unsure (1)..(587): unsure at all n locations
  Clone ID: PAT_MRT4530_14079C.1
atggaaacgataaggactacttagattgtatccatattggtctccctagttctacttggacaaggggacacatatgggtataaatacaagaccccctagaaggagaggggagacggacaatatagacgccacaaagccacaagccaatacaagccaacatacgccaagacaagtcgccggatatcgacatcagagatatgcctggattgaccctatccggtacctacagaggccggccatagggatctagtgctatctctgatctcgtcgggcactgattcgaggaggaagactaccctgttgtcgactacgtgatgatactccagtcccgctatgtcgacaacagttagataggctaccccaaatattgtactgtcttgcgtatatcctagtaccaacgatccctataccatgcaaataccggaatcgcgacatcaaacgtccccatacataatttaataatgtggtgctacagtaaacatttgctaatggcgtgttaattaggcttaataaattggtatcgcggtttacgggtaccgagctcgaattcgccgtatagtgagtagtagctctcttcntgtcgcgcg

SEQ ID NO: 7490 - DNA, 1965 bp, Oryza sativa
  Clone ID: PAT_MRT4530_14080C.1
agtagcagactagcagtggcatttcattagtagtaaaatgctgcaacgtagccgtaccgtagttcagagttacatcatgcagacaaaagccgaacaaagatttccccctttccccccccccctactcttagaaaattgatctatattcacaccaactgtttcttttgcaatggttcagatgctacaatctggcattcctgaaaaaaacagctatggcactattcgggggagctgagcttctagcagcggcagcttatatcctaaaatcttaggctcccgaagcagtgcaaaacagattctcacccagactgtgagaagatgtagctatagaatctcgaaaataatgaactagaagcctagctgcttctcagtaaaactacatggaatgaaacttgatgttaccaacaatggcacatggagatgctcttacaccagatatgaggacatgatattccagctaattttcatatgtgcaggcatcggtgcgatgaacctgaggagattgggcttctccttggaccatggagcaccattttcatgccattctccattgctgctcaggaatttcgcgatgttggggatgaccatttcccggcaatgcaggtgcagcagagggactttagagagaacactgcccttctggatttccaagccttctgggcgcctcagcttgtatggctccccagtaaacggttcaaagtctggttggggattctgcttccacctttggtgcacaaaccacccgtacttgtagtctccgacaatgggtgtgcctagagcttctgcacaatgtactcggagctgatgctttcggcctgtcaatgggcgtagctcaatccatgagcacccatgaatggttggtcccatcacccgatatgctgttacagcttcttgtgcaccatctatgccagatggatgtgccagaatgacacgctcggctttcccatcatcaagaagtacctttgaaagaggtgcagaaataatcccttctctttctttaggggtcccaatcaccaatgcccaatacctctgcatgtatgcttcacaggcagcattccatacctgagaattcgtttttgctaaattgacgctagtgaaaagccaatgcaatcgagtaaagctttcttttgttctcccgaacaacagcaaaccactactttctctgtccagtcgatgaaccaattttggaccttcttcatttccatatgacagagctgctgctgcaagcacatccatgctgttatgcactggcaaatttcccttcatgggcacttttgggggcttgttaagtacaagtatggcagaatccttgtgtatgacaagccttctcaagtattcaatctcatctttattgggatgcaatgtggcagttggaatggtctcataccgcttcttaatctcgccctctgccactgacacaggaaggtgaattctcatgccaggctccatcacatcattatgcttgatcttcttgagatgatgcttctggctcttaatagtctcaactgaaacctcatgatctgagcactcggaataaaccagcctcttgttgaagtgcgcctgcacgacctcctgcggcacgtcggcgaggtagtgcttcacccagctgaccgccgtcacccgccgcggcgccgcccgcgcttcctcccggggagcgggtcgccgtccccgccgcccgggaacggcggcagcgacagcagctgccgcggcctcgggccgggcttgggcttcccgaggcgggccacgttgctcccgtccacgcggaccaccaccgggtccgcctccgccggcgcgggcggggccagccgcgacagccaccggaccgccgcccccacgcgccgccggcggcacagcatcctcccctccactcgctctccgaccgccgccgccggcggctgctcgcatctgcaggtaaaaccagcaactgggccgtgctgacgtaaggcccatacaacataggtccat

SEQ ID NO: 7491 - DNA, 294 bp, Oryza sativa
  Clone ID: PAT_MRT4530_14081C.1
ccgggctgcaggaattcggccgaggctgagaaagcttgtgatatttgtgggcgaccaatgcttcttgaaaaggatgtagctaccttgctcaactgcaagacaggaaatctagcctgcagcagtagaaactcaagcggggcatttcatttgtttcacacttcttgccttgtgcactggactattttatgccaatatgagatgctagcagacaaaattgcaagcaagggaaaaagcaatcgaggaagaaaggcaaaaaatgcacctaagaaaataacatccatcctttgcccagaa

SEQ ID NO: 7492 - DNA, 285 bp, Oryza sativa
  Clone ID: PAT_MRT4530_14082C.1
atgggagagggcgaggacgccggccaaaggcggcggccatggcggtgctcaccggcgcacggcatggagtggattccggtagtggattccgacggaggaggggtggacgggacggcccgcacaacggcgaacgcaacggcgcggctcagcacggcggctagcggcgaccggagcggcgatggcggcggcggagaggagggcgacggcgctagggcgatagagggcacggggaagcttggcaaaatggggaaaaagagagaggggagagtggggatgcttaaatag

SEQ ID NO: 7493 - DNA, 858 bp, Oryza sativa
  Clone ID: PAT_MRT4530_14083C.1
agagctcgcaaaccggtggcgcttgccgcggacgcgtggtggtgtcgcgaaggtttgagagaaggagagtgggagggagccgatggggttattcgaaaattacccgccgcctttacccttgtcgtgtacgcgactcaactccctctttcgttggagaggcggcggcgcgaaaaatccgaagctttcgcgggaggagctagggtttgtgtgtgtggttgggcgcgcggcgagcggcgggagatgtcggcgtacgacgaggtggagatcgaggacatggagtggaacgcggagctcggggcgtacacgtacccgtgcccctgcggcgacctgttccagatcacgctcgccgacctccgcctcggggaggagatcgcgcggtgcccctcctgctccctcttcctcaccgtcgtctacaacgaggaggacttcgccgacgccaaggagcccccgcacaagccggccccgcgccccgtcgccgtcgcctgaggcgcaggatggaatcaggcttaactaagatgagaaaacaaacgggagcatttgtacttctaagatgagaaagtagttatatcgacctttggcttttgaattcactatgtacggagttaccaaaaataaaaatcaccacgggttcacggggcagttcggatatctttgccttgggatgaaaaaaaaaaaaaaaaaaaaaaaacggtgagttttttttttttttttggcgcaattggaatccgtttccggtgaagcgtgctcgtttgttaggttataagtttgaatcgttgctgtgtaatttggagtattaattaatcgatctcctgtatacctgattatggattcaataaatagttctgaaattttagcttt

SEQ ID NO: 7494 - DNA, 300 bp, Oryza sativa
  Clone ID: PAT_MRT4530_14084C.1
atggtggtggaagcgattggtgatccaatcggtgggtcggacactttgggcgggtggcccggactttccgtcgtgggaggacaagtgagaggtcccgggcaacagtgggtgaaaatcattgaggacgtcaacggtattcagtctacgaatgctggagaagcgtgcatgttggatttattagctcggttcataagacgacaaggaagaaagggttctcttcgtgtctggtggagtcaagaggaagaagttgtaagaatagcggtgtctcttgtttacggtgagcctggtgaaggcttgtag

SEQ ID NO: 7495 - DNA, 816 bp, Oryza sativa
  Clone ID: PAT_MRT4530_14085C.1
atgcaggagagtaggcaacctcgctcgctcgccagcgcggccagccatgcaacctcgccgtttcccgccctcgcgtgcgagtcaccgctctggccgccgccttgcctccgctcgccgccaggcgccaagctaccatgcctgcctttaccgtcacagccggcgtctcaccatggccccgccgctagtgtccaaggcgtcgacgccgagctcgccgatcgcttccaccactccgctctcgtccaccgcgtggctcgcccgaggtgccggtgcgttcctggcgactggggcgaggtcgtcttcccttaccccgaccttaattggttcgcgccgaggtcggaagattacttccgctctgctggcatttcttcactacgcgcccttcgtctcggccgcctccccctatctccctcgggcgctgacaggtggggcccacctgtcagtcccttccccaacctccggccgcctccccgagccggcgacagccacgccacgcgcgcgccgcccaccttctccgccttccccgcgccccacccccacacgccccgccttccccgcgtccacgccctcactcccgctcgcgcccacccgcctctagccgccgctagggtcgccgccgcaccacgccgtcgccgccgtcgggttcgcgtggccgagctccacctcgtccacccctcctccgtcgaattccgccatcggaggccgccgtccgccgtgcgccgggtgtctcggagcccgtccgccgttcaccgtcatttccccggtcgtcgccgtcgccgttcgccgtcgtcttcccccgcgccggccaactcatggtga

SEQ ID NO: 7496 - DNA, 1378 bp, Oryza sativa
  Clone ID: PAT_MRT4530_14086C.1
ccacgcgtccgttttttttttttttttttttttttatgggagtcaggaacaacacaacacatattcaacaaaatgtcgatcaaatagtattacagtagggagagagagaaagaaaaagggaaaaaaaattgagaggaaaggatcagtttgaattagggcgtgcacacaccccgtttcttcttcgaacgtcgccatgcatgatcgagcaaaatctatatacccatccatctaaatccgagctcgctcgaagcaaatccggagcgtgacgtgacaagctttagtttagtttcatcgatttcgtctcccgaaagaagttcgtgttcgtgtctttttttttttatcagtcgtgatcttgagcttcttcggtcgccggcggctctggcgccgccgcgtcctccccgccggctccggcgccgtcggccttggaggccgcagcggcgccggtgccctccgagccgcccttgtttttccggcggttggacttcttgggcacggcggggaggtcctggcaggtggcgccggaggcgtcgtcgccggcgccggcggccgccgacttgtcggacttgtccttcttgcggttcttgccgcgggagctcttcttggccttgtccttcttctccggggcggcgccgccgtcggcggccgtgcagtccatggaggaggtggcggcggagcccctggagcggtgccgcctcgaccggcgggagtcgggcgacggcggggagtcgccggcggtgatgtccatgctgccgctggcctcgcttctggtttcactgaaggatgtgtctcctaggcttcctccgtctaccacgatttcttgagaagcccatggattagctgcagcagagccccctctgtcgctcctaaatgaggctgagtccagtggcgccgaatggtaatccttcatccagctaggtgctcctgcagtattattattgttgttggggacactaggcccatcccatccgatgtgcgccacgtgtttcacatccgtggggaatccaatctgcatgtcttgtgccgcctccttaccatccatcatgttagagatgtagcggaatggtcttaggattcccttcttcatctttgtgctcatgccctttcacctgaaattccttttttgtgtgtgcacgcgccttctcttctcgaattcgcaaaaccgtctgccaagggtgaacgtcaaaatttgctgttaacaagattgaacctctctatatggtcaattcttgttaacaattaattggctctcacccttcctcaacgggccaatggcattgtgtttattcctccctcaatgtcttctttctcagaggtcagtattgtccgtccctccgcgttgccaagccaagctcacgcgtgggcgccttgtggtggatgg

SEQ ID NO: 7497 - DNA, 297 bp, Oryza sativa
  Clone ID: PAT_MRT4530_14087C.1
atggggccggccgtggcggcggacctggccgcgagcgccagccgtccctcccgccgcacgggcaccggcgccgcggtgaccttcgcaccacgccgcacggacatggcggcaatgctgtatcctagaagaactcacaaaggtattgttggaagttttcggtatagtcctggtaaaagtccaagacctgtcgaacagcccccgttcgacaggaagggctgtgtcgaactgcccctgttcgataggatatccgtcgaactggcgcagttcgacagggtcgcgttctccatttatttgtaa

SEQ ID NO: 7498 - DNA, 495 bp, Oryza sativa
  Clone ID: PAT_MRT4530_14088C.1
tagagagacttgagacatcacatatgttttcactcagcaattggacaaaaaaaaaaggtcaggtgaagttgcgaaaagcaccacctgcttgatggtcaaacatcaatcaccacctcaactccactctgtagacttgactgatgctaagatgataaagctaaaactgtctcaccaaattcatatggtcctcatcttgcacctacggatctccttcaccaccaatgtccatcatctgcccaaaaaggtccaaagaaaaacattcatattagtgcaaaccaagagaataaccaagtgctgtcagcatccaattaagtaatcagcagtcgtactcagtactgttctcagctaccacaaagtactgcgagagaacaaggcactctgcggttcatctctttttccaacaagaaccacaccaaaaaatacatcaaataaatgaaccagataaaatcatgtaaatcttgtatcataagccaggcccaacgaaagttaggactc

SEQ ID NO: 7499 - DNA, 231 bp, Oryza sativa
  Clone ID: PAT_MRT4530_14089C.1
ctgacatccattcactcggacacccagcgctatgcccagaaccggttgttgccggtcagaccgctcggggtcgccggtcagaccggcggcatgcggccggtcggaccgcccctggtcactcgcacagctgtagttttggaccagagacttggaggggacttcctcgcggatgcatcaaccggcgataccgggagccgagaggacaacacccggcttggtagcggatacaca

SEQ ID NO: 7500 - DNA, 862 bp, Oryza sativa
  Clone ID: PAT_MRT4530_1408C.1
ccggccggggcatcccctcttctccgcgtcgccgccgtcctctgccgccgccgtcgtccgtgtctcctgtattcctcctcccctttgtgtgggagattgtctgcccaatctctggaatcgacaaggtttggtggtggtaacccgctccggcggctgcctctcgtctctccaccaccccgtcccgccgattttccgcctcgacctggtggtgcagtgctcgattcggcagttcggggcttaccgagggcgcagggtgtcgatgtgcagcccgaggaatcgcatatccgaaggggagtcgaaattagggtttccctctactcgccgccgatgaaggaaaaaaaaaaaaaaaaaaaaaaaaaacgaccgcgatctcacccggttcgccgcctccacaaatccgccgccgccgacgtcgagagagaagggacagagagcgagtgcttcgccgtccccgccgccgcgatgagggccaagtggaagaagaagagaatgaggaggctcaagaggaagcgccgaaagatgaggcagagatccaagtagtcgttatcagtagtgtggatgtcttcttacatcatgttgaccggtgcatttggattgatggtgccttcggattcttgatgttccagttattggtgtaggaatgtgaaaccttttctggttttggttaattctagctgttgaaatgtctctggttatgttcctagactggagtattatgtaatgtgatgaccataattcgctttatgaaagtttatgagatttgaagtaaaaaaaaaaaaaaaaaagcggccggccaaaaaaaaaaaaactaaaaaaaaaaaaaaaaaaaaaaaaataaaattaaaataaatttaaatataat

SEQ ID NO: 7501 - DNA, 446 bp, Oryza sativa
  Clone ID: PAT_MRT4530_14090C.1
ctttgttcctttcattttttctcctcttactctctctcttctcaaaaagtcacgagagatgccgagggcgaggcgtcgtcgccgtcgccggcagccacacggcgacatcggcggtggggcaaggtggtgcatgcataggtaggaggtgctgaacctcgccggcggccacaagatggcgatgaggcaaggcggcgcgagttagggaggaagcactggacctcgtcgatggggggcgtggtagggaggaggcgatggacctcgtcggcgtccacgggacaggcaacgcaggattagggaggagtcgcggtggcttgcagccggtcgccggaattgctatactccggccgccgccgtctctagcccgggatccgcgccggcctttctccgccgccccgtcactcgccttcgccaggcgtgctggcggccccctaaaaggatccaacctc

SEQ ID NO: 7502 - DNA, 132 bp, Oryza sativa
  Clone ID: PAT_MRT4530_14091C.1
atggcgttcatttcgcgccctgcagcaccaggcgcggtgccgcataacagtagcgcggaaccaatgtcccgcggattcatcgtccgggactgcaccaccaccgacaaatcccgcaataaaaagaggatatag

SEQ ID NO: 7503 - DNA, 215 bp, Oryza sativa
  Clone ID: PAT_MRT4530_14092C.1
gtggaagctgatggatgggtaccagaacctgcggcacacactgctcgatcttgatctatacgctgatctgaaccaaggagcgagagattggctaaatagagttagaacccaacctggatctggaccattataagaggttttgccatgggggaacatactgtgaccctgtgggctaggcatgacaccctcataagaatgcatgagtaggcatgacc

SEQ ID NO: 7504 - DNA, 330 bp, Oryza sativa
  Clone ID: PAT_MRT4530_14093C.1
atggcggcgtggggcagctttcatcaaggcaacgacgccattgggctcactcctggagaattaaatcgatttaattcttcatttctcagctccgacacaatttcaattagccaaagctacgccatcagattggcaatctatttacagcggattcagcagcgtggtcggatgaatgctgaagaaaaatccagcttcagaacctgctcttggatgcgcagaatggccagtatcactgatgctgacgacgatggctgcctcgccattcatttcgtctcgctgcgacgaaccagggacacattcagaacagcttgcttagccatcaagagctag

SEQ ID NO: 7505 - DNA, 2058 bp, Oryza sativa
  Clone ID: PAT_MRT4530_14094C.1
ttagcactgaggcatgtttggaggacgaggcagcatctgagcctgcggtgtcttgccgtccttcacgatgaacacagtgtccatcccccacaccacgtggcgatcaaaatggcaatgcatgaaccacacacctggattgtctgctcggaagcggattgcggcccagccggacctgggcacagagaccgtgttctggaacggcgggtcaacgaggttgtaggtcgccgggtccctgctctcgtcgaaggtgccgttccctcgtcccacgacgtagaaggcgaagccatgcagatgcatagggtggttctcgctggacaagtcatgaaacaccacctctaccacagtgccgtactccagcaccttcaccttggtgccacgcttcgtcatcaagggcccgccgccgttgatgtcgccggtggggttgacgatgaccgtcagcttgttggggaagttctcctcgtacacgccgcggccggagccgtagtagtaggcgtcgaggacgtcgatagccgggttctggaagctaacattattgaggctcgccgcgaaccggttgccttggggtccctcgcacaatttatttgtcgcattgttagcgtcgcaagggagaaagttgatgtcaatgtcgatgagcatgtgctcgtccacctgctttggtacgtgcaccgggtggtcctggttgcctaatgacctgagctgcttgacgaacgccatcgccgcgtcctcgtccttgatggccggcagcaggacggggaattctggtggcccgaccggcctcgccacggcactgtccgtgtactccacgatggccgtggcggtgctattgttgaaacggatggtatcaaccggtaacgtgataaacgtcctcgcggccatgtaataccggctgttggatcccaaggtgcggttggccttgaggagcacgtccatggtctggcctggcgcgatcatgatgtagtcgacggtgatcggcttggtgtagcgggcgtcgatgccgaccacggtgagacggtgccccgcgatggcgaagaacatgtcgttggtgagccccgcgttgatgaccctaagcaggtacgtgttgccctgctgcacggccaccttgaacgtgtcgtccattgttaaacaaaattgattaccgaggatgacgggtatctccttgtctagcttcctgaagaggaaggtggtgccgcgcttggggtggatgacgatggcgccgtggacggttgcgcggtcgaagtcgctgtgagcgtgccaccatagcgtgccttcctcctcgaacaggatcacctggtaggtgaagttgccgcccggccggatcgggcactgtgtgatgaactccggcccgtcagaccacgggttccgaggctggtccacaccgtgccagtggatggtgatgtttttgttgccgttgttgtggacgttgacgatgatgaagtcgcccttgcgcgcgtagatggtcggcccggggaactgcccgttcacggtgaggatgctcttctcgtggcagagcctcgtgtagttggtctccgtaatgaagaaatcgtagtggcgagtcttggctccatgagcggggttcactgcaagtgctaacaccaggccagccacggaaactgacgacgacatcttgaagttcaaagtatctctccagtctttcccggacatgcgcatccgtttcctgcctgttgtcgacatggcggtctgaaggtctgactcgtattcgacaacagggtagccttcctcctcgaatccgtgtccggcgagatcagagatagcgctttcgtatctcctgacggtatccggagacaccgtaggggaatagccatgcttatccctgaagtcgatatccggcggcgtgtcttggcgtatgtaggcttgtatgttgattgtgttgggtgttgatgaggtggtcgtcccgatagtggtgatcgtgttgatcgtctcatggtgagtgtgtgtcctcctagaattcggcggtggcgccgccgcctcttccttgtcgtcgtcctcctcctcgtcatcctcgtctttggccgaggacgccactcccgtcctcgtcat

SEQ ID NO: 7506 - DNA, 1128 bp, Oryza sativa
  Clone ID: PAT_MRT4530_14095C.1
atggcttaccctcctagctctgggtacccaattacaggcagtagcctgcaggtgacgccgtgcggggcgctggtggagcagtacaacgagctcaacttccgcaacctctacttgcaccatctctacctggggcccaacccgacgcagtcggtgatgctcgccgccgacgccgccacggggctcggcgccaccaccgtcaacaactggcccatctacgacggcctcggctccctcgtcgcccgcgcgcggggactccacgtctacgccggtgactggcacaactccttcaccatcgtcttcgaggaccaaagaagccacaacatagaagcctacatacgccaagacacgccgccggatatcgacttcagggataggcatggctattctcctacggtgcctccggatactgtcaggagatacgaaagcgctatctctgatctcgccgggcacgaattcgaggaggaagactaccctgttgtcgactacgagtcagaccttcagaccgacattcgagacatcaaacgtcgacaagtgtctgtcgaaaacggtgaatggggaattgttggtgggaccggtcagttcgccatggcaggaggtgtgatccagaagagggtgcaccaacggagaaacgatggcaacatcatagagattacaatccatggattctgccctgtgcctagaggctctcagactctgccaatgggaccatcccagcagtaccccatgcccacgtacaatcaaagccatcccactaaggttggaccatggggtggaactggaggcactcctcacgacatccctattgcaccccagcgtttagaaagcataacaatccgtcacggctggacaattgactccatgtccttttcttacactgaccaaactgaggaagcaacagtggttcatatccagctggggctatcggagtacgtgatggaagtgtccgggacgtacggcgcgtacaacagcaacgtggtggtgatgtcgctgagggtggccaccaacctgagggcgtacggcccgttcggccgcgcggagggcacgtcgttcaccgccagcggccgcgtcgtcggcttcttcggccgctctggagaattgctcgattccatcggcgtctacacggcctaa

SEQ ID NO: 7507 - DNA, 2104 bp, Oryza sativa
  Clone ID: PAT_MRT4530_14096C.1
atgaaaacgacgaggactactcggattgtatccatattggtttccttagttctacttggacaaggggacacctatgggtataaatacaaggtcccctaggaggagaggggacacggaataatagatcaagacacaagattaacttacaagccaacatgcggcaagacaagacgccggatatcgacttcagagataagcatggctagtcccctatagtgtctacggatactgtcaggagagacatagcgctgtctttgatctcgccggatgtggattcgaggaggaaggctaccctgttgtcgactacgagtcaacacttcagttcgctatgtcgacaacagttagatagactaccccaaatattgtactgtctcgcatatatcctagtaccaacgatccccatactatgcaaataccggaatcgtgacatcaaacgttggcagtggcgcgccaggatccaacctaaccagatcggaaccatcatcgtcatcgacaacttggtctatcgagatcatccaagcctcaagctccgcggcgtaccaaaagatgtcagatcgcatgatatcgaacgagtatgcaacaagatacatccggcatgtatctacaaagaaaatatttttcaggaacaattgaacactcgagtaggttgtagtcgagtacactctattatcgagaacattctcgacaaatgtggagttatcgcacccgacctaccaacgaagaccgacgacctatctcatagcaccggccatggctggactactcgagaaaagtggtcgagttacgactactgcctggtcctcgaccagcgtggtcgagttacgactactacctggtcctcgaccagtgtggtcgagttacgactactacctggtcctcgaccagcggtgtagcgattctcctactacctctactccaacaaagttggtatcaagtacacactatcgccaagtgttttacccagagattccttaccacgacgacacctagcgttgaaacctatcctactgtccctttacgccatcttgacaaggcctccgaggaacctaagggatcttcggctggggacgcccagagccgataaggccttgtcggatcctgtagagacgaaagaccatgtaagatctggtcgtgtaacagttctcgccagggggacaaccatgatgagacgatcaacacgatcaacacccaccatgacgagacaatcaacacccaacacaatcgacatagaagccacaacatacaagccaacatactccaagacaagacgccggatatcgacttcagggataggcatggctattcccctacggtgtctccggataccgtcaggagagacgaaagcgctatctctgatctcgccgggcacggattcgaggaggaaggctacccggtgaccaaaacaatggcggaagatcaacggacggcgacggcgtcgaggaagaagcggcggcaaccttcggcttgacgacgacggcggagaggtggacgagatcggcgacggcttggtgaccacgacggcgacctccccgagcagcgacgacgaccggagcgacggcggcgcacggctggagctgtatctcccttcaccacttggtatcttgtgcgatgaatgaaggattaaccctgagttatgctccaacatatcatagaaattaacccgctgattgagaggagcgaagatatcgatatcagctgagtgccactcgaatttggggaaattggaaccgtgccactccgttgggttttccatccactccctgttaatttcccaactccgacactcggcctcgatgcggcggcgaaggagctcggcgacggtgccatttcccaactccaatggcgagaagagttttggcaatggcggagttcccgccgaccatcgggactccgaacgccgcgccgaccgccctgacctatcggtgttggcgtcgtcgtcggacgccggcctaggtggctgtggttgcgcccactccccggagtcgcgccaacgggcgaggcagcggatgaggcaccgcgcggcggcgtggaggtagaaggcgaggagggagacgcgggcgaagatgatgaggatggtggccacgttggagaagaatgcacgcat

SEQ ID NO: 7508 - DNA, 507 bp, Oryza sativa
  Clone ID: PAT_MRT4530_14097C.1
atggaaacgataaggactactcggattgtatccatattggtttccctagttctacttggagaaggggacacctatgggtataaatatagggccccctaggaggagagggggggacaagacaatcaacacccaacgggatcaacacccgacaggatcaacacccaacacaatcaacatagaagcctacatacgccaagacacgccgtcgaatatcgacttcagggataggcatggctattctcctacggtgtctccggataccgtcaggagatatgaaagcgctatctctgatctcgccgggcacggattcgaggaggaagactaccctgttgtcgactacgagtcagatcgtcagaccgccatatcgacaacagttagataggctacctcaaatattgtactgtcttgcgtatatcctagcaccgacgattcccataccatgcaaataccagaattgcgatatcaaacgtcgacatgtttggtttactactatttttagtcataata

SEQ ID NO: 7509 - DNA, 325 bp, Oryza sativa
  Clone ID: PAT_MRT4530_14098C.1
gggagagaaaatcaccccatgttacccactaggaagaatatattccagggtaaaacaggataaacctgtgtaacaaagcagtcccctaactgaaaaagccccccatagtttgggctactacaacagtaaaccgggacagaacacatccaacacgaagacgactagggcatgggggttttgaccattgcaatactggcagcacgaattcgaggggccgcacaaaggcgcaccccatttacttaaaaagggtttaaacgatggaattagcattgagttttttgagggcagtgtaagactgaccacagcccacaaaaatgattggagc

SEQ ID NO: 7510 - DNA, 473 bp, Oryza sativa
  Clone ID: PAT_MRT4530_14099C.1
gaacagtgcgaaatgcacagcattttttcactgtttttatactgttgctacagcaaacaactgcacatcattgttttgtactgtaacacaagactttactgcacttctctgcctttagtaccaaaaggcagaggatcctttctgttaggaggggttgtaagaactgtcaaactacagtagtggaagtactacgaactcttagtgcgtttgggcttgcgttcagcctctccctcccacgttggcaaaggagaaagccacacgccacgtttacttccgggcccaccaaaatgaagttgtgtccaatgtttgccaccggttcttgggcgaaaaaaaaggacgcgtgaggttgggagaccgcgttgtggagcgagtggcaacgccctccttcccgctgccgtcgtcgcctccttgccgacgagccgcctagcccgccatcgccgtggtaagctgacgagcccgccgtcgccgtccac

SEQ ID NO: 7511 - DNA, 3198 bp, Oryza sativa
  Clone ID: PAT_MRT4530_1409C.1
atggcgatggctcttgctagcttcctgctgctgctgctgtccgtcttcatgtccatcttcttgcacttcatggcagtgcgaggagcagacggagaagacgccgcagcgttgctcgctttcaaggccgtggcggtgggcaacggtggtggcaacggcgtgcttgcgtcgtggaacggcagcgccgggccgtgcagctgggagggcgtggcgtgtggccggcacgggcgggtggtggcgcttagcctgcccggccatgatctctcggggaccctgtcgccggccgtcggcaacctgacgtcgttgcggaaacttgacctgagttacaactggctgcacggtggcatccccgcgagcctcggtcagctgcaccgcctcagggaactcgacctaagcttcaacaccttctccggcgaggtccccagcaatctgacatcctgcaccagcttggaatacctggccctcggcagcaacaagctcgccgggcacataccttcggagctcggcaacacgctgacacagctccaggtgctaggcctcgacaacaacagcttcgtcggccattggccagcttcactggccaatctgacgtccctgggatacctcagcctcaggatgaacagtctcgagggcacaatacctcctgaattcggcagcaacatgccgcgcctttacttcctcgacatctgctccaacaacctgagtggtgcactcccgtcttccctgtacaatctgtcgtcgctaatggggtttgatgcaggaaacaacaagctggatggaagcattgctactgatatcgatgaaaagtttcctcatttacagtctttcgcagtgttcaacaaccagttcagcggggaaattccctcctcgttctccaatctcactaacctcacgagtctgcagctatcaatgaacggatttagtgggtttgtgccacataatctagggaggttgaatgctctgcagaatctgcaactaggtgttaatatgcttgaagcaggggacataaaggggtgggaatttgttgagtcattgacaaactgcagtaagctagagattttagttctcagtaacaacaatttcactgggcagttccctatttcgatcgcaaacctctcgaagactctccaaaaactttacttgggtggcagtaggatttctggaagcatcccctctgatttcggtaatttggttggtctaagatcattatacctgtttagtactgacatatcaggtgtaattccagagagcattgggaagctggaaaacttgactacgctatacctgaataacaatagcttgtctggccatgtaccgtcttctgtaggaaaccttaccaatctgatgaagctattcatgcaaggcaacaacttggaaggaccaatcccagcgaatcttggtaagctgaaaagcctgaatgttcttgatttatcaagaaatcacttcaatggttcgattccaaaggaaatattggagctgccttccatttcacagtacttgaatttatcatacaactccctctctggaccccttccttctgaagttgggagtttgactagcctcaacgagttgattctgtcaggaaaccaattgtctggccagataccaagtagtataaaaaattgcatagtgctcactgtacttttattggacagtaactcgttccaaggaactatacctgtgtttctgggggacattaaggggctccgtgtacttaacctaaccatgaacaagttttctggtgtgattcctgatgcccttggtagcatccacaacctgcaagagttgtatctagcgtataacaacttgtctgggcctatcccagcagtgctgcagaatttgacatcgttatcaatgctggatctatccttcaatgatctgcaaggtgaagtgccaaaagaaggtatttttaagaacttatcttacttgtctttagctggaaacagtgagctttgtgggggaatatctcatcttaacttacctccatgctccatgcatgctgttagaaagagaagcaaagggtggttaaggtctcttaaaatagctctggcatcaatagctgtggtcttgttcttagctctagttatggtgattattatgttaattcgtcgtagaaagcctgtacataggaagaagggccagtccctaaccccagttgtggaggaacaatttgaaagagtttcttaccaggaattgtcaaatggaaccaagggattttcacagaacagtttgcttggaaaaggaagctatggtgtagtctataaatgcactttgtttgatgaggaaattgttgtcgctgtaaaggtgtttaaccttgaacggtctggatctactagaagttttctggcagaatgcgacgcactgagaagtgtgcgccaccgttgtctcctaaagatcatcacttgctgttcaagcataaataaccaaggtcaagatttcaaggcactagtttttgagtttatgcccaatggcagcttaaatggttggcttcatccaaaatctgatatgcccattgctgacaatactttgagcctaactcaaaggctggacattgctgttgatattgtggatgctctggaatatcttcatatccactgccagccgccgatcgttcattgtgatctcaagccaagcaacatccttcttgcagaagacatgagtgcccgagttggagatttcggcatatcaagaatcctaactgaaagcgcgagcaaaacacagcaaaattcaagcaacacaatcggaataagaggttccattggctatgttgctccagagtatggggaaggctctgcggtctcaactcttggcgatgtttatagtctgggcatattgctgcttgagatgtttacaggaatgagcccaacagacgatatgttcagagattccttggacctgcacagtttctcagaggctgctcatcctgacagaatcctggagatagccgatccgacgctctgggtgcatgtagacgccgaggatagcatcacaagaagcagaatgcaagagtgtttgatttcagtcattggcctcggcttgtcctgctcaaagcatcaacccaaagagcgaatgccaatacaagatgcagccctgaagatgcatgcgatcagagacgacgcttacctgatgttttctggctctctttcagtggacatggaagaggagacgaaacaaattagcagcgatttgaagcaacagtga

SEQ ID NO: 7512 - DNA, 366 bp, Oryza sativa
  unsure (1)..(366): unsure at all n locations
  Clone ID: PAT_MRT4530_140C.1
gcagcggcgncgggctacggcgacgncggcgagnaccgccgcgnggggaaggcggngncccggaacccggncccgncgngccggaaccacancncgcgtttttgcgccgggggggggggccncatggtctcccgcaagctctctacacgcgagttcctggagccgngctgcccgnagctcgccgccgngccgatgcagngccggtgcgacgcgctgagcgtgctggtgcgcggcgtggtcacggaggagggcgaccgcgtctcccggatgatctccgagcacgcggcacccgggngcgactccccnaccatcgccgggatggcaagcgcgctnaccgactacggccggggcaacctgcaacacacg

SEQ ID NO: 7513 - DNA, 187 bp, Oryza sativa
  Clone ID: PAT_MRT4530_14100C.1
gggaacaaaacccatatttatgggggggcatccaggtgaacaaaacccagggctacaataaaaccaggttaacttctgggaaaaaagggagcaatggatcatgcaaagcaaactttggtgttgatgggtcccaatatttgtactccaaaaaaactcccatgggaacctttaatggggcattccaaaa

SEQ ID NO: 7514 - DNA, 1671 bp, Oryza sativa
  unsure (1)..(1671): unsure at all n locations
  Clone ID: PAT_MRT4530_14101C.1
atgctcagaccattccccgccaccgcccaccatcgctgcacacttctcctcctccttactgtaacactcctcccctcgctcgctgccgccgccgccgcccaccaccaccacctccacgaccacgccgcaggcgacggcgtcgtcatcagccaggcggattaccagggcctacaggccatcaagcacgacctcaccgacccctacgccttcctccgctcctggaacgacaccggcctcggcgcctgctccggcgcatgggtcggcatcaagtgcgtccagggcaaggtcgtcgccatcaccctcccatggcgcggcctcgccggcactctctccgagcgcatcggccagctcacccagctccgccgcctcagcctccacgacaacgccatctccggccccatccccacctccctcggcttcctccccgacctccgcggcgtctacctcttcaacaaccgcttctccggcgccgttcccgcttccattggcaactgcgtcgcgctccaggcgtttgatgccagcaacaacctcctcaccggcgccattcctccttccctcgccaactccaccaagctcatgcgcctcaacctcagccacaacaccatctccggcgacatcccatccgagctcgccgcctcgccctcgctcgtcttcctctccctctcgcacaacaagctgtccggccacatcccagacaccttcgctggctccagggcgccctcctcctcctcgctcaaggaatccatcaccgggacctacaacctcgccgtcctcgagctctcgcacaattcgctcgatggccagataccggattcactcgccggcctccagaagctgcaggtgatggacctctccggcaacaggctcaacggcaccatccccgacaggctcggctcgctcgccgacctcaagacgctcgacctctccggcaacgccctcaccggcgagatcccggccagcctgtccaacctcaccaccactctccaagcattcaatgtctccaacaacaaccttttcgggcaagtgccactcttgctcgcgcagaaattccggccttccctcttcgccggaaacatccagctttgcggctactttgtatccgtgccctgcccggagttgccgtcttcggggccaattgcgccagcatcaccaaaaaggtccgaaagcggcgggaagcagccgacgagcagcaaggcagccggtggcggcgccggaggcgcggcggggggcgggcgcggcgaaaaaccggggtcggggncggcgaaggtggagtcggggggagaggtgggagggaagctggtgcacttcgacgggccgatggcgttcacggcggacgacctgctgtgcgcgacggcggagataatggggaagagcacgtacgggacggtgtacaaggcgacgctggaggacggcagcctcgtggcggtgaagcggctgagggagaagatcaccaagggacacaaggacttcgagtcagaggcggcggtgctcggcaagatccgccaccccaacctgctgcctctcagggcctactacctcggacccaagggcgagaagctcctcgtcctcgacttcatgcccaatggcagcctctcccagttcctccacggtcagtactcactcactcactactcttcttcttgtgcatttgatcttgatactattaattag

SEQ ID NO: 7515 - DNA, 2379 bp, Oryza sativa
  Clone ID: PAT_MRT4530_14102C.1
atgctcatgctcggaccattccccgcccaccatcgctgcacactttttctcctcctcactgtcacactcctcccctcgctcgccgccgccgccgcggcgcaccaccaccacgtccacgccgcgggcgacggcgtcgtcatcagccaggccgactaccagggcctacaggccatcaagcacgacctctccgacccctacgccttcctccgctcctggaacgacaccggcctcggcgcctgctccggcgcatgggtcggcatcaagtgcgtccagggcaaggtcgtcgccatcaccctcccatggcgcggcctcgccggcaccctctccgagcgcatcggccagctcacccagctccgccgcctcagcctccacgacaacgccatctccggccccatcccaacctccctcggcttcctccccgacctccgcggcgtctacctcttcaacaaccgcttctccggcgccgtcccggcctccattggcaactgcgtcgcgctccaggcgttcgacgccagcaacaacctcctcaccggcgccattccgtcctcactcgccaactccaccaagctcatgcgcctcaacctcagccacaacaccatctccggcgacatcccacccgagctcgccgcctcgccctcgctcgtcttcctctccctctcgcacaacaagctgtccggccacatcccagacaccttcgccggctccaaggcgccctcctcctcctcgctcaaggaatccattaccgggacctacaacctcgccgtcctcgagctctcgcacaactcgctcgatggcccgataccggagtcgctctccgggctccagaagctgcaggtggtggacctcgctggcaacaggctcaacggcaccatccccaacaagctcggctcgctcgccgacctcaagacgctcgacctctccggcaacgccctcaccggcgagatcccggccagcctgtccaacctcactactagcctccaagcattcaacgtctccaacaacaacctctccggcgcagtgccagcctcgctcgcgcagaaattcgggccttccgccttcgccggcaacatccagctctgcggctactctgcttccgtgccctgccctacgtcgccgtctccatcaccatctgcgccggcatcacccgcgcagtcacgggaggcgacggggcgccaccggaagttcacgaccaaggagctcgcgctaatcatcgccggaatcgtggtcggcatcctgctcttcctggcgctctgctgcatgctgctctgtttcttgacgaagaagaggtccggaagcggcgggaagcagacgacgagcagcaaggcagccggtggtggcgccggagccgcggcggggggcgggcgaggggagaagccggggtcgggggcggcggaggtggagtccgggggagaggtgggagggaagctggtgcacttcgacgggccgatggcgttcacggcggacgacctgctgtgtgcgacggcggagataatggggaagagcacgtacgggacggtgtacaaggcgacgctggaggacggcagccttgtggcggtgaagcggctgagggagaagatcaccaagggacacaaggatttcgagtccgaggcggcggtgctgggcaagatccgccaccccaacctgctgccgctcagggcctactacctcggacccaagggcgagaagctcctcgtcctcgacttcatgcccaacggcagcctctcccagttcctccacgctcgcgcgcccaacactccgatcagctgggagacgcggatgacgatcgccaagggcacagcccgtggcctggctttcctccacgacgacatgaccatcgtccacggcaacctcaccgccagcaatgtcctcctcgacgaccactccaaccccaagatcgccgacttcggcctctcccgcctcatgaccactgccgccaactccaacgtcctcgccgccgccggcgccctcggctaccgcgcccccgagctgtccaagctaaagaaggccagtgccaagaccgacgtctacagcctcggcgtcatcatcctcgagctcctcaccggcaaatcccccgccgagaccaccaatggcatggacctgccgcagtgggtggcgtccattgtcaaggaggagtggaccagcgaggtgttcgacctcgagctcatgcgcgacggcgacaatgggcccgcgggcgacgagctcgtggacacgctgaagctggcgctgcactgcgtggaccagtcgccgtcggtgagacctgatgcccgggaggtgctccggcagctcgagcagatcaggccggggccggagggcggcgccgggccgagcgaagaaggtggcgcagggcatgtggctgctgcttctgcaggcaatgagtag

SEQ ID NO: 7516 - DNA, 550 bp, Oryza sativa
  Clone ID: PAT_MRT4530_14103C.1
tcgccaaagggcacatgacccaaggagaccaaatcagaattcagaaatggagcttcgtcaaatgatgcagcgataaatacttggtcagcgacaaacacgtacgtagctgcaggctgcatgatcagggaaatgtacaggatgaaaaaaacagttttgcttttcgttgcagctgctgcaaaaaggcatatgcaattggcatccattgcccatacgagtgtagctagctagctaagctaaatatttgtatgttcagtttcctcccctgttactggagagggcaatgcatcgaatcagcaaagcatattgtcaaatgacaaactgctgctgaacatgcaaaaggggcagcaacccttggaatatacgcagacttcctgaaacagtgactaatttctgtcatttggaatttcagttctgatctgaaactgggtactcattgcctatctctctctctctctcatgattcaatatttatgtagggtactcctatgatgtaatctgatcaggttacaaagcttgaagaaatcttgtttgagtgaaaaccaaccccccc

SEQ ID NO: 7517 - DNA, 285 bp, Oryza sativa
  Clone ID: PAT_MRT4530_14104C.1
atgcagggtatggtatcagcggaagcccggggaagactagtggaccgcggcgacggccttccaggatggaggcagacggcggctgtagcctcccaagattcacgatggacacgcctcccacatatggaggagaagggcagcggtggccgacggtgcctcctctcgctcggaggaagaatggaagaggattgcggcagatgggaaaaacgtaggaatcagatgaaaaagatagactcagggaaaattttccaagaggttgaagcttttgctataggaatttcatag

SEQ ID NO: 7518 - DNA, 420 bp, Oryza sativa
  Clone ID: PAT_MRT4530_14105C.1
atggatgtttgccagctgatcaatctgtacatggagctatgggacgacgacatgccggccggcatgctccggcgcgtcatctggcgcctagggatggccagcgccgccgtcgccgtcgcagcactcgagggcgcccaaggccgccgccgccgccgcgccggcagcagcggcgcaggaggggccgtcctactgccggcgctcgcgtcgttcgtgctgctgctgcacggcgtcgcaatggtgctcctcagcgtctgcggcgtgcgggcggcggcgcgaggcccaggtgatggtgctcgccggcgccgctgccgcctcgcgcgcgccgtcgcccgggcgtcgctgacgccgttcctgctgcttgtgctggccggactcctccagggagatggtgaagaagctgatcgctattactccacgtag

SEQ ID NO: 7519 - DNA, 396 bp, Oryza sativa
  Clone ID: PAT_MRT4530_14106C.1
accgctcgcctgaggtccgcgtaggcgctggcggtctccgcctccgatctccacagggcgggcggaggagaccgcataggtgggggggagatggcggcggcggaggggagcgaggcagccatcaaggatgctagctgaaaacctcttgcaggtgtggcataccgccgagtatcgccacacgaacagggtataggcgtctatcaacatctacatcacctcggctattattatagaaggtcactggtgagacaaataccaccaatacaagctggaccgatgtacatggtgtgaccatttaaaatgtaccacactcttgatgatgggaacagaaaagcagcttgttgcacggaccgaacctgacctattggcgagccttttatccacgaatctgatgct

SEQ ID NO: 7520 - DNA, 368 bp, Oryza sativa
  Clone ID: PAT_MRT4530_14107C.1
caaaaagggctttattaattaaactgccaacaaaggccaaaacattacgggtttaaagggaacaagcttgaagagacccctttggaaaaaaaggagttcccaaaacaggttaaatgaaatcattattgagggcaaagatggtctcaagcatatagtacccagctttgattgaaaaatggtttttggggcccactggggagtttaggggcccccagtgggcggggccatggccaagggctagggcgtgcacaaggtggccggccgggggaaaaccacaagggggggcctgggcgcccggggatcgacctagggctgcctgcggggggggaacatttcttgggccatgccaacaaaaaggcccttgacct

SEQ ID NO: 7521 - DNA, 254 bp, Oryza sativa
  Clone ID: PAT_MRT4530_14108C.1
tctaaccgccggcggatcgccctcgttagaacgaggggccgtgtaggcgctgagcgagacgaccagcttccttggctcggacgcttggcgggatgagattgggcgccgagtcggctagtccgggggccgcttcaccctgcgccgtaccggcacgagggcgccccagagcatctgggatggaccacgaccgtctcagtgccttgtgtctgtttctggagcagacgccatctctccctgactggagagattccggt

SEQ ID NO: 7522 - DNA, 1545 bp, Oryza sativa
  Clone ID: PAT_MRT4530_14109C.1
atggacgagccaaccgtggaggagccactgctcgccatccgacgcggcggagatggcgaggacgaagccatggcgtcgacggcggcggcggccgcggcggaggtgaagaggttgctgcgtctcgccgggcctctgatggccagcttcgtgctgcggaactcggtccagatggtgtccgtcatgttcgtcggccacctcggcgagctccagctcgccggctcctccctcgccgcgtcgctcgccaacgtcaccggcttcagctttctcttcggcatgtcgagcgcgctggacacgctgtgcgggcaggcgtacggcgcggggcagcaccggctgctcggcgtctacgcgcagcgcgccatgctggtgctcgcggcggccgccgtccccatcgcgctcgtctgggccagcgccggcgagatcctcctcctcttcgggcaggacccggccatcgccgccgaggccggcgcgtacgcgcggtggatgatcccgtcgctcgcggcctacgtgccgctcgcctgcgccctccggttcctgcaggcgcagggcatcgtcgtgccggtgatggcgagctccggcgtggcggcggtcggccacgtcgccgtgtgctgggcgctggtgcacaaggccggcatggggagcaagggcgccgcgctgagcggcgccgtcacgtactggaccaacctcgccgtcctcgctctctacgtgcggctgtccggcgcctgcgagacgacgtggaccgggttctccatagacgccttccgcgagctccgccggttcaccgagctcgccgtgccgtccgccatgatggtctgcttggagtggtggtcgtttgagatacttgtgctgctctcgggcattctgccgaatcctcagcttgaaacttctgttctgtcaatctgcttgagcacttcttctctcctgttcatggtgccacgtggcattggctcatctttaagcacgcgcgtctcgaacgaactaggtggcgggcatcctcgagcagcaaggatggcagcgcgagtcgccatagccatgaccgtgcttgtatgcctcgtgctagtgatagccatgatttttctgcgcaatgtctggggaaatgcctatagcagcgaggaggaagtggtggcatatattgcaagtatgctccccgtccttgcggtctccttcttcatagatggcatcaatggtgctctttcaggagttttgacaggatgtggtaagcagaacattggcgctcatgtgaatcttgctgcgttttacttggttggtattccgacggctgtgctgcttgcatttgtcctccatctcaatggagagggtctttggcttggccttgtgtgtggcagtatcagtaaagtagggatgctcctcttcatcacactgcgtacagattggggaaaagaagtgcgaaaaccttcaccctacaaacacttcggctatcatggcaaaagaaagggtcttcagttcaagtcttccaactcgatgaagaattcgagaaatgttggtgtagtattctccaatgaagatgtattcaacgtggttctttaa

SEQ ID NO: 7523 - DNA, 387 bp, Oryza sativa
  Clone ID: PAT_MRT4530_1410C.1
ttcaacccccattcccacgcctcgccctcccctgctccacctcctccggccaggcgaagcacggcggcggcgatggaggaggacttcgcgcgggcggtggaggacggcctcaagctgtccaagcgcctcgtcctccccggcggcgcgccctcgccccgccccgtccccgggatggaccgggggctgctgcccgacgccgccgacgcctcctcgctgctgccgtccgcgcccatggcgtacgccgtcgtcgtcgacccggccgccgtctacagcctcgacgtgcccagctaccagccccacgtttacggtcggctcgacccccccgcgctcatcccgtttcacatgcgcgagggtcgccctctccgtctactgcgcccgcccccggtt

SEQ ID NO: 7524 - DNA, 344 bp, Oryza sativa
  Clone ID: PAT_MRT4530_14110C.1
gcggccacgcatccgcccacgcgtagcaaggacgcgtgggtctcgaactggatgcgggaggaatctagtttccttttcttacggcggctgagcccgcgcgtgctgactcttgttcaacgtcggaaggcgcagccgcatgacgcaggatgaaactagaaaagcattgcaaaatgccctgtgctggaagaagacagggcttacaaaatggcttatgcaaattgaaagaaggcaggaaatactggctgcttcagccggaggtggaggatggtctggaggaggtggtggctcacgaggatcatcattggacgatcctgggatgcatcaaaacaaactctttttacgaa

SEQ ID NO: 7525 - DNA, 466 bp, Oryza sativa
  Clone ID: PAT_MRT4530_14111C.1
gaatcatgaataacaatgtatggggagcttatatatatgacttgacatgtgagcgagccgctgatgtccaaaccaaaccagcgggcaaagcttctgagaacattaaagagatctgtaacagatagactccatcaattgtattactgaatagactgagcagacaaggtatcacaagtactgaatggtagaagaggcatctagcaccattaacagttcgtcatcatggaaccaacatgtggtctgcattgaacacctaccattgtggtaagccctaacataatgagaatcgtcataggggtgctagtcaggggccgaactatgcagcagcgctaaaagaggactgcagacctgacttgctggcactggagcgcaccaaaaagcatacagtctatcgggggatgtatgaacagcaccaagctgttcaccttaatggccagcatatccatgcatcaaaactgcatcttat

SEQ ID NO: 7526 - DNA, 483 bp, Oryza sativa
  Clone ID: PAT_MRT4530_14112C.1
cccacgcgtccgcccacgcgtccgcccacgcgtgcggcaaattcatcacatctgttcttgagataaatagaagtttacttatcttctcatccaagagaaaagtttacttcagtttgcagaagctagtttgtttttctcctaatggaatggaaaagactatcccatctgaattttcattttcactggaacagatagttgatgtgcacaatgcttagtcatgtctatatgtgcatatcttgtctaggaagagcatgcaaattgacttatagttatttcttcctctctgctgcatgtttgctgctgattgagatcaatgctgcttggttcatagtaatatgctccagaagtgggacaaacttagagaacatctatgtgttacctgaaaattgcattgtaaatgctgagttggaaatcctagcatgattcacttgaccttcttattgttttggcatgaccaatatttgtcaaaaattgagatgaaat

SEQ ID NO: 7527 - DNA, 402 bp, Oryza sativa
  Clone ID: PAT_MRT4530_14113C.1
atgttctctatctttgccactttcgaggacctcgcgtcagcgcctgtggatgggaaagctggagaggacgggataaaggcgccaccgcctcccgccgacgcggctctcagcgcccgcaccgtcgtcgttgccgttgtcgggtccgcatcgtcatcgtcaccggcaggcgtctccgagctcgcgcctcctcccgccggcggccgcctcctcccgctggccacctcctcccgccagccgccgcctcccgtcgacgcggctattgcctcccgcatcgtcgtcgtcgtcgggttcgcatcgtcgtcgtcgccagttcgcatcgtcgtctccgccaacgtctccgagctcgtcgctatcgtccctcttcccgttgccgcgccagcgccggccactgcgcccgtataa

SEQ ID NO: 7528 - DNA, 156 bp, Oryza sativa
  Clone ID: PAT_MRT4530_14114C.1
acacctagacgagcatgacgatgcacgcctcgtacgctggttccttatagcggccgccctcctttttttttttttttttgacaattccttttccaacaacttcaatagcttaggatgtcatagcatcgcaaaacagccaatgataatcatgtgcta

SEQ ID NO: 7529 - DNA, 1120 bp, Oryza sativa
  Clone ID: PAT_MRT4530_14115C.1
tcaggccttgccgatctgctcgcgggtggtcttgcactgggaggcgaggttgtggagtccatcgattttgaggtagttggaggccatgatgaccttgacgagggagtcgtcgtcctcggccagctcgtcgatgaaggccttgtcccagttcttgagctcctctttctgctcgtcggtgtcggacttctcgtcggcgtgcttgtcgcagtactcgaccaccttcttgagggtcttgtagctgacgtccgggagcgggatggcctcgtcgccgcggccgtcatcgatgatgttcccgatggtcttggacagcctcgccgacgcctccttcaccttgaccacctcgccgtcggagctctcgagggtgatcatcctagcgctctccgcctccagcgagaccttctccaaatcatcggacaacgccttctccgccgcgtcccaccccgcctcctccaacgcctccgtcaccgccttctccaccgcctcctctagcaacttatccgccgcctccgccaccgcggcctctccctcctcctccatcatctccaccttctccaaagcatcgtacaccgccttctgcaccgcctccaccaccgtctcggcctctctctcgtcctccacctgatccacctccatcggcatcaccgccttccccttctcctccgccatcgcctccgccgcctctgccgggcacgcgcgtcatcgccgcctccgcgggcacgcgtggctccgcccacctcccttccccgcgcacccacgccatgcgtgccggccgccggcctgcacgccactgcccgctaactgacgaagagagaggcggccgcttggcgcggcttccccccctccctctcggcggccaggatgcaatccgaccgcctcgccattgtcgccttttccggcgcctcctgccgctgcgttggatgacgcgccagggccagcgctccgcccgcctgccagatcgtcgaccgcctcgtcgactgcgccgccgccgcccccttcgcctcgccgctccgacggcgcccccacctccaccgccggccagctccttcgcggctgctgcctcccgcccaccctccatcccaccggacaccggcgcccagccgcccctcctctgtgagagaga

SEQ ID NO: 7530 - DNA, 2605 bp, Oryza sativa
  Clone ID: PAT_MRT4530_14116C.1
tatatctaaagcttcttcgcttcctggtccgcgattccgggcggcgaggcattctcctctttttctttttttttcactctcgcggccaatccctgaatccgctggcccgcgtcgaaacctaggggcgcggtggcgggatagccaacgttcaaatccaaatgggggcggcgccgtcgacgccgaggctgggcgcggtggcgggggccgcggcgtcgcctggggcggcggagcagatgttcgcggcgctggtcggcgggaaggcgtacccgatctcctccgagttctggaggcagctgctcgagctgcccctcacgcagcagtggccgcgggaccgcgtcctgcaggcgtgtcacgcgttcgcccagaacaactaccacacaaagcatctcgcaaagattttgatccatttggtttggtgcttgcaagagtgcatggcagagtcttctcacgcggcgtataggaaggctatcaatgctgcatatatatcatccatatttctcaaattcattattgaaaatgcaaagactgataattggcaagagctaagtcttgaaattgacaaggatgagaaggggctggaaaattttccttctgaacaaagcgtggaatattttctgatgagaggtgttctgaactacattggtagtgtagatgtaagtctggagtcatgctacctgcaccatgaacttctaaacttgatgctagtacttatgtcaactcaattgtgttctggaccatctcctgaaccaaaagatgtgcatcctttcattgatgcggctatgcttcaggacagttccatagtgtcctcggtagttcaaaagttgctgctaaattttgtaaaacgaccacggattcctttaaacagttcacaccctgctttctctgatgatggtggacctggtgttttgcagcgagttggttcagttgctgcaaactttgtactactgccatattatactttcaactaccttgtgagctcaaacgctgaaggcgcatcaagtcaattggcagacaacagtttacttgttctgcttattctgatccactaccggaagtgcattacgatgagcgaatcctttccaagcagtaatgtctacacaagcgatttaaataccaatgtcaaggatgcaccggcttttcatgataatccatattacaaggccttaagcaatgccaaagacagtcaatatgatcgtgctgatgttgaaggaaatgctcaaaatgggctagttgtcaggttgtcttttgcatcgctatttgacgctcttggcacatgcttaaaagatgagagctcggttctactgctctattctttggtccatgggaactgtgactttcaggaatatgttctggttcgaacagacctggatactttgctgatgcctatcttggaaatgctctacaatgcatcaagaaagacctccaatcagatatacatgctattgatagttcttcttatactcagtcaagattcaaccttcaatgctagtgtacacaaattggtgcttccgagcgtcccttggtaccatgagcgccttatgcatcaaacttctttgggatctttgatggttgttatactaatccgaaccatcaaatacaacctctccaaactgcgagatgtctaccttcatacaaactgccttgcaattctagcaaatatggcccctcatgtgcataggctgagtgcatatgcatctcaaaggctggttagcctctttgacatgctctctcgcaagtataccaaattagccgagttaaaaaatgacaaagctatcaaagttatatctgatcagattgaagcagacaacatctcagatgatacgtccacagaacttcacatctataccgacttcttaagaattgttctagaaatcatcaatgcaattcttacatatgcattgcctagaaatcctgaggtcgtgtatgctatcttgcatcgacaagaggtatttcagccattcaaaaaccatccccgcttcaatgaattgcttgagaatatttacacagtgttggatttcttcaatagtcgaatggacatgcagcagttagatggagaatggtctgtagataaggttcttgaggttattaacaaaaactgccgttcatggcgtggagaaggaatgaagatgtttacccagttacggtttacatatgagcaagaaagtcatcctgaggagttttttatcccatatgcatggcgcgttgtcctatcacgaggattctctttcaatcctggtgcaataaatctgttccctgtggagattcatgttgatgatgaaccatccggtgaacaaaaggtctaagaataatcttgaatgttgagttctgactacagcaggatgacatgttccatccaccgaggcaaatagatattgtacataggaggcatataccagacgatcgacatgtattcttattcatttgtgtatatttccgtttcctcataatgtaataccagaggtcagcgggaggagagagcggtatttaggtggcagagaactatgtagggtacaacgaacaattctttcataagttaatctttgtatttttttttcaaaaaaaaaaaaaaaaaaaaaaaaaaaaaaaaaaaaaaaaggggggaggg

SEQ ID NO: 7531 - DNA, 1329 bp, Oryza sativa
  Clone ID: PAT_MRT4530_14117C.1
atggcggcgcccaagccactgtccccgcgcctcgccgtcccgctcgccattgctctcctcctcgccctcggcctcgtcgccgacttcctctggtcatcatcttcctcctctggcacctccggccgcggccagctcgcctccgcttccaggacggcaacggcgaagaagagcggtagggcgcgcgggaagaagccggcggcggagggctacctcaatgcgacgtacgccgacataccggcgccgcggtgggactgggaggagatgccggcggcgcccgtgccccgcctcgacggctactccgtccagatcggcgacctgctctacgtcttcgcagggtacgagaacctcgaccatgtgcattctcatgttgatgtgtacaatttcacttccaacacatggacggggaggtttgatatgcccaaggagatggcaaattcacatctaggaatagcaacagatgggaggtacatttacgcgctgaccgggcaattcggtccccagtgccgatcacctataaaccgcaacttcgttgtagacacagtgacaaaagagtggcatgaactgccccctttgccagttcctaggtatgcacccgctactcaactttggcgtggacggctccatgtgatgggtggtggaaaagaagatcgccatgaacctggattagagcactggagcttagctgtcaaggatggcaaagcattggagaatgagtggcgaactgagatagccataccccgtggtggacctcatagggcatgcattgttgctaatgataaactctttgtcattggcggtcaagagggagacttcatggcaaaaccaggctcgccgatatttaaatgtgtacggaggcatgaggttgtgtacggtgatgtgtatatgctagatgatggaaataaatggaagcaactatctccactgccaaagccaaattcccacatagagtgtgcatgggttatagttaataactctgtaataattgttggtggaactacggaaaagcatcctattaccaaaaagatgattcttgtcggtgaagttttccggttcgatttggatacactgacatggtcagtcattggccgcatgcctttccgaatcaagacggccctagctggttactgggatggttggctctatttcacttctgggcagcgagatagggggcctgataatcctgctccaaagaaagttgttggttgcacgtggagaacaaaactacacctttgcacaatcattttgccacttcttgctgccttatgtaagatagtcaccttgttggtcgtaccatggactgtatctgcagagttcgaactgaagtttctg

SEQ ID NO: 7532 - DNA, 542 bp, Oryza sativa
  Clone ID: PAT_MRT4530_14118C.1
actggaccgatccagaccagtcacctgagaaggaaaatgctgcatttcaacaggcaatgatgcttgctggaagtgaatttatggagtggaaacttcatctgtttgagcttgaagaggagctgaagattgatcccctcacgaagtatgtgttgtaccaggatgagaggagcaaaagttggagagtacaagctgttggcgttgctccggatagatttgagagccgaaagcctctgccggaaaagtggaggggcttgagagatgatgaactgtcaaacgatattggcattccaggatgtgtctttgttcatatgagcggcttcattggcggcaataagaccctccaggtctccaaggaagaacaagatccgatcggatatctgccgctgctcgtcctcgctactctgcgcaggagcgtccttgctatcgcagctcacatgctgtctcgaccccaagtacctctggatctcaccctggtaaatcaggtagtaatcgcttccttctctgataatcctgacacccctggaaagatcaatgaggcgtaa

SEQ ID NO: 7533 - DNA, 213 bp, Oryza sativa
  Clone ID: PAT_MRT4530_14119C.1
atggcgttgaaagctgtcgtgacgtcattttttatggtttcccagcatgctttgaagaaacacccggcggatccagcggtgggtgctcttgcgagcacatccggcagtagcaagggctctagcaggcggatccagcggtgggtgctctcgcaggccgatccagtggcggcaagggctctcacggcggtggcggcgggtgccatcgtgggctga

SEQ ID NO: 7534 - DNA, 330 bp, Oryza sativa
  Clone ID: PAT_MRT4530_1411C.1
atgacgcgtataccgaacgcgagggacggcggcgatccgcttgacacagaagatggattctggagcagcggcgaccagcgaagcaaagatccgatcgaggtggcggcggcgcgcggtctcctcctcgtcctcctcggcaatggtcgttttagatttctctactcttctctaaatacaaagtactataccgttttgcggattgaaaggttgttgtatattaatattaccgaaaggttaattcaagttataaatgtagctctgtatgtactgaaatgcctggtttttgtgctaagtttaagttcatcaggagttcaagctattgacgagtaa

SEQ ID NO: 7535 - DNA, 1444 bp, Oryza sativa
  Clone ID: PAT_MRT4530_14120C.1
tccgacgagttcccggactaggatcgcacttttttccgaatatttatttgcacgcgcacgcgcaccttgtagtatgctcgccgcctggaggctgtcgcagcgagccgtcacgttcattccccgcgtgcgatcccaaaccctaaaccctctccccatggccgccgccgcctcgcccaagcgcttgagggtctactcgtccgtctcgggcgacggccgctccgcgaacggcgcggggagcggcaagcgcgtggggacccacaacggcagcttccactgcgacgaggcgctcgggtgctacctcatccgcctcacctcccagttcgccggcgccgacgtcgtccgcacccgcgacccccagatcctcgatactctggatgctgtgcttgatgttggtggtgtctatgatcccagccggcatcgctacgatcatcaccagaagggctttaatgaggtctttggacatggctttaacacaaaacttagcagtgccgggcttgtttacaagcactttggtaaggagataattgcaaaggagcttgaagttagtgaagaccatgaagatgttcatcggttgtatcttgcaatatataaaagctttgttgaggcgcttgatgcagtcgacaacggaatcaatcaatatgacacagaccaacccccaaagtatgtgaacaacacacacttgtcttcacgcgttggggcgtcttaatccagactggaccgatccagaccagtcacctgagaaggaaaatgctgcatttcaacaggcaatgatgcttgctggaagtgaatttatggagagtgttcgctttcatgttaagtcatggttacctgcgagatctattgtcttggagtgtttgttgtcaagaggaaaggttgatccaagtgaagaaattatggttttggatagattctgcccatggaaacttcatctgtttgagcttgaagaggagctgaagattgatcccctcacgaagtatgtgttgtaccaggatgagaggagcaaaagttggagagtacaagctgttggcgttgctccggatagatttgagagccgaaagcctctgccggaaaagtggaggggcttgagagatgatgaactgtcaaacgatattggcattccaggatgtgtctttgttcatatgagcggcttcattggcggcaataagacgtatgagggagcgttggaaatggcaagagctgctatcaagtgttgactcaacgttcgacggaggcttcaatcagtaacgcactgtcacccatgagctgcagtaacacagttaaccagttgaacttcatgttattattgactcgtaattgacatttgagtactcatgttccttgcgtaaaacatccttagctgacaggagaggccagttgcctttttaatctcgaacgacgagtttatgattacattttataaagattagaaaagatgatgggacat

SEQ ID NO: 7536 - DNA, 103 bp, Oryza sativa
  Clone ID: PAT_MRT4530_14121C.1
atggaagtagacgaattcgatgataccgacgagatcgtagtcgatatattcgacgagatctcccggcgacttggctccgcatacttcggcttcgtaaactatg

SEQ ID NO: 7537 - DNA, 488 bp, Oryza sativa
  Clone ID: PAT_MRT4530_14122C.1
ggccgccccttttttttttttttttttggaaataccatttatttgggaaatttggtcacgaccaaacagtaaattatcgtctcaaaccttacatttcacactgaacccggagaggcagagaattctctactgtttctaacttcacaagctaaaggaacatcaggaaataaaagtcatccgttcacgtgcttcagactaacatcttatcgcacatcggtcctctgtactgctcaaccaaataatgaccgacccttgtttcgttcaagccgagcctccctctctctctttttgcactccttatagtcgtcgaactgctgctggcacttgctcttgtcttggttggcctccaaacacttgagggaggcggtgtactgggggaagcagtcggagtcggcgatcctggcggcgctggggtacggcggggacgccgccgccggcgacgacgcgcggtgggtggggggcgccgtggctgccttcgccgtcgccat

SEQ ID NO: 7538 - DNA, 276 bp, Oryza sativa
  Clone ID: PAT_MRT4530_14123C.1
atgcgcgataccattcttcaaatcaactatctaccagacaaggatacgtacccggacaaggaggacttagtcaaatcaaatcaactatctactacgtacccggacaaggaggacttagtcaaatcatctatctactacgtacccggacaaggaggacttactcacacaagccccagccatgcgcgataccattctgtaacgtcccgcctaggaggacttactcacacaagccccagccatgcgcgataccattctgtaacgtcccgcctctcctag

SEQ ID NO: 7539 - DNA, 168 bp, Oryza sativa
  Clone ID: PAT_MRT4530_14124C.1
atgggggcacataacctgcatcttttatatcggtgtctcctgcaaccgccgccgccgccgccggtcaagccgggggagctcacgcccaaacctccgtttcacatgcacgaaggacgcagcggctgcctcaccaagcggcagtggggctcgtccatccattcgtggggt

SEQ ID NO: 7540 - DNA, 339 bp, Oryza sativa
  Clone ID: PAT_MRT4530_14125C.1
atgaccaagttggccacacacaaagcaagtccattcatcctgattaggattgttgttgttcttcttctgcttcttgaagttggtgtaccgaaacttctccaagatggacttagtttcgcaataatgcacccggccacaaatttgtcgggcgtctacgaaggcacgcagcacgcgagcgaagaggaagataagccgtcgcggacgaacagggagcagtcgcgcaaagcgcttcccaaaaaccttattgccaccttctcccggtgcaggacgtcgaaggcagaggttccggagacctactctcctgatcgcaggtgcacgccggcgagcgggatggagtaa

SEQ ID NO: 7541 - DNA, 505 bp, Oryza sativa
  Clone ID: PAT_MRT4530_14126C.1
cgagttcaaggaggatgtggcatggcaagttatgtattaatgaggaatagttcgttagtttccttttatctttaggaaagtgtgtttagtgtcctgtaaggactagtatctccccatgggtataaatatgtacatctgaggtcattgtaaaccatctcacgatcaatacaaatcggtgcatcgccaccttttaccttttctactttttatttatcacggcgaacttggcaactgacgcggggctgcatgggtcttcgatctccggcgaaggggtaagtccaatgttctgctggcccaggcaattgtactggctacaatagtgtcgttcaaggctgcatcagtacattcgacctctaggattgctctggtttggttgatatatttgcttgcctatttatcatatgtctttgttaatctagtcttagaatctcaatttagctctatcggttgtctctcgctttagggtttctgctgatatcgactaaattgttttactggattagat

SEQ ID NO: 7542 - DNA, 375 bp, Oryza sativa
  Clone ID: PAT_MRT4530_14127C.1
tcgtccacgcattcgcatcaaacaaaagaggaatataaacctatacactccatagtgattggctgatagatcatcaatggctagaaaggtcgtcttgttcactatggcgctcatggcagccatggtggccatctacgctactcacttgaacgagtggcagatgaggctaatgcacaggcagtgccaacatgaggtgctggataggctgatggacgcgcaccgacaggtgctggaccgggagctgaccggccgtgagaggtttcaggcgatgtttcgccggctggtcgcgctgggtctgcggatgcaccgctgccagcaactgctggacgtgagacgcgagtgccgatgagcagccatccgccgcatggtgatgag

SEQ ID NO: 7543 - DNA, 1578 bp, Oryza sativa
  unsure (1)..(1578): unsure at all n locations
  Clone ID: PAT_MRT4530_14128C.1
cggcgcgattcctgagcttcnctgtgcggcgcgtgggctaccgcgggaggattcttcttcatcgggcctgctttggcgctcctncggtggctcgaccgggctctgctcctgacctgcgtcttcatcttccggggcgagctcccaatcctgccgctgtcgatcttccccgggacgccatccatngacgctgcgctcgctgctgtccatgatgacgccgtcgacacccgcgcccccgacgccgtccaggccgccatacagcgccgcatcgccgggctgcttaagaaggcctcggagaacctccacaccgtgcgcgtcattgtcccggtgcccgtggcgaaggggttctatgaccgggacatagacaccatgaaacacgcggcgaggatagagaaattcctcaggggacctggcggagagggggttgagatggtgaggacatcggtgcgcatgacgcgggcaatgtacgcgcagctcgtgcagcagaactttcaggcaccgaggggttaccccatgccgaggagggaggaggggccggagaagtggatggaggcagagttggggatgaaaattgcttgtgggtttgagatgatgtatcaggagaggcggcgggagggggaggaagggaaggggagcacatgggaggtttacaggaagagcttggaggcgacagggtgcttcaatggtctgcttcctgggtcaaaagagtacaagagggttatggaggatgcaatgcagtattacaaaagctcgagtttgttttcacgaacaagggagatactaagtgctcctgtgcgtcgaattgatgaaatccttgccatgccatactcggctgaggaatttgaaggcagtgaccttcctccgagcgacgatgactcttggttgtataatggggaggatgagttagctgcggaactctgtgcaaggcagcaggaaatggaagagtatgaaactgcaaaacaatacagaaaaagtcaaaggaaaaatgtctcaggcagttctagctcgcagtcaaacgagtttaatcttggagagattacagagtccatgcaagaatttgttcgcaaaatgtcaagctttgagggagctgaagttcctgcaaacaggaaagacatggaatcagtggatctggatgtcaaccagttcttcaaggccatggaatctgtgctaggtcgttcaaaagatgaacctggcaatgaagccgggtttgatggaaaatcttcatcatctgacatagaccttgaagacgattctgattatgggagtgatttcggcgaagaatctggtgagaagggtatggataatgctttcatggaatcatattctgatgcactgaataaagaactcagtatgaccactatagagaaaagtttcgctcgtgcaccgcaccctgataccagcaatgagggtccatcaggtgctgcagatactgatggggagatgaccccagttgatgtggacctgaaccttgttgagagcttccttaactcttactcctctcaacagggtctcccaggcccagcttccaatctgctgggacttatgggtgtaaaagtacctcctgatggtaaaaagccgtga

SEQ ID NO: 7544 - DNA, 204 bp, Oryza sativa
  Clone ID: PAT_MRT4530_14129C.1
atggataggcaaaggatagaggagtttcaccgccagctcgctgctcccagatatcgctctactgcgcacccggacagggagaacttcagtgtcttgagggctgtcaccacctctacacccacctcacacctactgtgggatgcggagcaaacactggaaatcaactacctagacaccacggagagcggagcactaccgaactga

SEQ ID NO: 7545 - DNA, 444 bp, Oryza sativa
  Clone ID: PAT_MRT4530_1412C.1
tttcgaaaatattaggaaaaaattcaaaattttgataaaatttggactaaagtccatcaccggtccctaaatttgtaccgctgtgtcatttcggtccttaaactcgcaaatctaccgttcaggtcctcaaacttgttcgactgtgtcatcccagtccctaaacttgcagatcactcgtttagttccttcaacttattcagttgtgtcaccccggtctctaaacttggatttgaatatcaatctgggtcaaataggacgggaccaggctgacacaactgaacaagttggaggacctaaatgagtgacatgcaagtttagagaccgagataacacaatcgaacaagtttgaggacctgaacggtcaatttgcgagtttaggcaccgggataatacagcggtacaagtttagagaccgtgatggactttactcttaaattttcaagt

SEQ ID NO: 7546 - DNA, 2460 bp, Oryza sativa
  Clone ID: PAT_MRT4530_14130C.1
atggcgacctccgcctccgcctccacctccagccccttcccgttccccgcccgccgcccgccggacgacaccctcttctacgccgtctactcgctccccctccccaccgccctcccgccgccggacctccacgccgcgctccggtccctccacctctccctctcctcccacctcgcccccttcctcgcctcccacctcttccaccgcgacgccttcgcgctcaccatcccgccgcccgaccacaccgctgccacctccccctgcgcgctctgcgcctccccccccgtcccgcacctccacggcgcgctccgcttcggcgactccctcgccgacgagtggctcggtgtctccctcctcttcgagctcacccgcgcgttcccgagcctcgccgtgcgcgcgtgggactccgacggggagttcctcctcatcgaggccgccttcgcgctcccgcggtggctcgacccggacaccgccccgaaccgcgtcttcatcttccgcggcgagctccacatcctgccgccgtcgctcttccccgggacgccctccctcgacgccgcgctcgccgccgtccatgatgacgccgtcgacacccgcgcccccgacgccgtccaggccgccatacagcgccgcatcgccgggctgcctgagaaggcctcggagaacctccacaccgtgcgcgtcattgtcccggtgcccgtggcgaaggtgctgaaggaggagccttgcttgatcgcccgcgccgtcgaggggttctatgaccgggacatagacaccatgaaacacgcggcgaggatagagaaattcctcaggggacctggcggagagggggttgagatggtgaggacatcggtgcgcatgacgcgggcaatgtacgcgcagctcgtgcagcagaactttcaggcaccgaggggttaccccatgccgaggagggaggaggggccggagaagtggatggaggcagaagttggggatgaaaattgcttgtgggtttgagatgatgtatcaggagaggcggcgggagggggaggaagggaaggggagcacatgggaggtttacaggaagagcttggaggcgacagggtgcttcaatggtctgcttcctgggtcaaaagagtacaagagggttatggaggatgcaatgcagtattacaaaagctcgagtttgttttcacgaacaagggagatactaagtgctcctgtgcgtcgaattgatgaaatccttgccatgccatactcggctgaggaatttgaaggcagtgaccttcctccgagcgacgatgactcttggttgtataatggggaggatgagttagctgcggaactctgtgcaaggcagcaggaaatggaagagtatgaaactgcaaaacaatacagaaaaagtcaaaggaaaaatgtctcaggcagttctagctcgcagtcaaacgagtttaatcttggagagattacagagtccatgcaagaatttgttcgcaaaatgtcaagctttgagggagctgaagttcctgcaaacaggaaagacatggaatcagtggatctggatgtcaaccagttcttcaaggccatggaatctgtgctaggtcgttcaaaagatgaacctggcaatgaagccgggtttgatggaaaatcttcatcatctgacatagaccttgaagacgattctgattatgggagtgatttcggcgaagaatctggtgagaagggtatggataatgctttcatggaatcatattctgatgcactgaataaagaactcagtatgaccactatagagaaaagtttcgctcgtgcaccgcaccctgataccagcaatgagggtccatcaggtgctgcagatactgatggggagatgaccccagttgatgtggacctgaaccttgttgagagcttccttaactcttactcctctcaacagggtctcccaggcccagcttccaatctgctgggacttatgggtgtaaaagtacctcctgatggtaaaaagccgtgatctttttgtttgtacccatgcacatcaaatttctggaaccatagcaagaacatacatatgatatttattgcaaaacataggagatcatggtccaagtagttttcttgtatattcaaacctcaaagaaaggaactggaagtaggacttgtgactttgtgagagctcaagcggccagcttggtctctcaaccggcatcatttggataagtaaaattttggcctgacaagcatgttccgttcctgtattccctgtactgctccggtatcattggaagacgtagggctcactcaacacaggccatgggtgtgggacaactatgtactatgagtctatgagacaactatagtcaaagcagctagcatttatatgtggtagtagctaatactgttgtattatgcaattctgtaacaatgtcttttgagatctgacatgctatagcaagcagttgtttatgcaaaaaaaaaaaaaaaaaa

SEQ ID NO: 7547 - DNA, 464 bp, Oryza sativa
  Clone ID: PAT_MRT4530_14131C.1
ttgtgtgggtgcagttgtttgggttcttgaacatcgaataaatgacgaattccgtggctcaccgcgagaacaaataattactattttctggtatggagctgatttgaacattttgtatcatctgcccacttgtcaatcaatctacagatattaagatacaaaaaaaccttttttgcaatacattgcacatagctagcaccttaaaaatcctgtttctatatttctacacagccaagtcctccaatttgcatgtgtaaatgaggtattgatgagcaatgcacctaaaccttgttttacgtattctctgcatatgcagaatctattgcatatgatagtatgatgcattacttgcacattgcttgcttgatggtgtgcatctttgctaccaaatttgtgaccttaatctcaatttttatattctacaggttcagcttttcaaccttgttttttgcacacagtgagta

SEQ ID NO: 7548 - DNA, 555 bp, Oryza sativa
  Clone ID: PAT_MRT4530_14132C.1
tcactctcgttctctctctcccagtctctcactctcgttctttctcccagtctttctccttctctctccacccgcttctctagtttcgccgaccagatcaaccatggagccattatcgagtggccgggggcggtggatcgggtacgtcgccatgtccaccgacgagatgacgtggcggctcgggcgttgcgaggtggtcgtcttgctgtagtcggtgcgcctcaacccgtgcgatctgcaccctaacgtcaaggtggattcttggttcctcagcctgtacacctccgccgtcggcgcctctcgcgcggatccgtcgtcggctgcgacgggaggggtggatctggcgacctcttcccctcctgcatggatcccgtcatctctccgctcccctcttgtgcggatccgccatccgcggcgacgtgagggtgaatccagcgacctctgtcgtctctccaccctccgctcgtgctgatccgccgccggtgatgatgggagggacacaggtggggtggcagactggcagatggggcgacgacctcgatgatggcgacacat

SEQ ID NO: 7549 - DNA, 4983 bp, Oryza sativa
  Clone ID: PAT_MRT4530_14133C.1
atgggtgcctgctgctgctgcttcccggtctacaaacccgcgagggagaacccgatgcggtcgaccagagagtcactcatccagcacaagccgaggcctaccacgccgtaccatccaccaccacccccgtttatcacctacactgacaaggtcgatttccctttctcattgtcgggcatgaacgctgtcgagcgcttcaagactgggttcgagaatttcaggaatactatatacgagtatttttctgatgccctgagagttcgtcgcaagaggccggagctgtttgagcggctcaagactggccagtcaccaaagaatcaactcgatgaaatcgcgaagaacctcacctccatggcggcgcaaatctccgatctcgccaggaagatgagcaccttggagcccctcgtgccgctcgcggcaaaactcgacaagctgcctgatcgcgtcacgcaggtgcaggcgtccgccttcgagtactcggagcaagtccgcgctctcaacctcgccgtcgagcgcgtcgaggcttcccagcgcgcggccacgacgaacccttctggcttggtctcacgtcagccacgcgacaacacaccgccacaagatgacgctgacgcacgctcgcgacgcgaccaacacggcgacgacaccgcgatcgacaacagcttccttcctcgcgccaaactcgagttcccgacgtacgacggcaagggcgacccgctgccatggctgaaccgctgcgagaccttccgcggacagaaaacgccggagacacgcaaggtgtggtatgcctcattgcatctaatcggggacgcccagttgtggtattacaggattgagctcaattctggcgaaccgtcgtggcggaggttcgtccagttggtgcacactcgtttcgggccacccatgacggacagcccgctaggcgagctcacggccctgcgtcgcactggcacggtggagaactacgtcaacagtttcctcgccttggcgtgccgcgacgtcgagctatccgagtcccagcaggttcagctcttcacggctggcctcgtcaacccgctcaagactgatgtcgccctctgccgcccgcgatcgctggacgacgccattatgctggcacgcgcgtacgagcagcgcgccacccttggcccgactgatccatccgcgccgcgcacgggacgagtgccgcggccttcactgccggcgtcgtcggccgcatccgcatctgcatcgaccacttcggctgatgttgccgcatcgaccgctgctggcaagcagcccctggtgtcggctctgccccgcaagcgactttctccagccgagatggcccaacgacgctccgaagggctatgctacaattgcgacgagaagtacgtcgcaggccaccggtgcaagaagtcgttcgtgatcgaggttatcagtttcccggaagacaccggggacgaggaggactccacgccagaagcacacgccatcaccctcgacgagccgagcatcttcctccacgccctggctggtatctctgctcctaagttcaatactatcaaggtgtgggctcgtctcggctcgcaggaactcgtcgccctccttgactccggctcaacacacaacttcatcaacgatgccatcgcgcaccaggctagcgtccctctacagcgccgccccggcctcagcgtagccgtggccaatggagatcgcgtgccgtcaccgggcaggtgcccgccacagcgcgtctccatcggctcgcacgagttcgacatcgacttctatgcactcccgcttggcggctacgacattgtgctaggtgcacagtggctcggcaccctcggaccgacgctatgggatttttctcgacaatccctcgccttcggacccgcccacgaccgcgtcacgtggacaagtatcgacgccgcaccggcgcccgcccttgctgccgccatcgacggtcagccgggcgacctcatgaccgatctgctcgacgtcttgaaagacctcttcaccgagccgcacggactaccgccagaacgccatctctgccaccgcatacgactggaggcaggggtatcggctgttgcggtgcgcccgtatcggtacgcgcacatccagaaagatgagctcgagcgacagtgcgacgatatgctccgccacggcgtcatccggcccagctcgtcggcattctcgtccccggctttgctgatcaagaagtgcgacggctcctggcgcttctgcgtcgactaccgcgccctcaacgacaagaccatcaaggataagttcccgatcccggtcgccgaggaactcttcgacgagctgcgcggcgccaaattcttcaccaagttggatatgcgttccggctaccaccaagtgctgatgcatccggacgacgtgcacaagacggcgttccgcacccaccaaggcctctttgagttcttggtgatgcccttcggactcacgaacgcgccggcgacattccaagccttgatgaacgacgtgctgcttccgttcctccgccggttcgtgctcgtcttctttgatgatattctaatatacagctcgtcttggtcggagcacctccgccatgtacgcacggtgttgcaaacgctgcaagatcattgcctccacctcaagcgctccaagtgtgagttcggcctcacctccgtcgcatacctggggcatgtcatctccggggacggtgtggcgatggaccgtagcaaggtccaggctgtgctggactggccggtgcccaagacggtgcgcgctgttcggggcttcttgggcctcgccggctactaccgccgcttcatccgcgacttcggcgctatcgccgcgccactgacggcgctcctccgtaaagaggggttccgttggtccgacgaggcggcagcggcgttccgcaagctgcaacacgctttgacggcggcgccagtccttcaacttccggatttcaaccgcgacttcatcgtcgaatgcgacgcgtcgggtacgggccttggcgccgtgctccaccagggcggcggtccagtcgcgttcttcagcatgcccatcgccccccgtcacgccaagctggccgcctacgagcgcgaattgatcggcctcgtcaaggcggtccgtcactggcgaccgtacctctggggccgccgcttcatcattcgcacggaccattatagcttgcggttcctgctcgaccaacgcctctcgaccattccacagcatcattgggcgagcaagctgctgggattcgattttgccgtcgagtacaagcctggaacggccaatgtcgtcgccgacgccctatctcgccgcgacgaacacttggctgaagcgtttgttctatcggcgccgcacttctcgctgctcgacgacgttcgccgcgaggttgcctctactccatccctggcaagcctccgcgacgacatcattcgcggcgctaaacccccgccgtgggcattcaaagatggactgatcgtactcaaggatcgggtgtttatcccggagtcgtcaccactgctacccgcggtcctggagttggcgcacggccacggccacgaaggaacccagaagaccatgttcaggctccgcgccgatttccatgtgccacgcgatcgcgtgctcgtgcaagatttcgtgcgcgcctgcctcacatgccaacggaacaagacagaacatcttcagcccgccggtcttctccagtccctcccggtgccgtccgcggtgtgggctgacatcgctatggacttcgttgagggccttcctcgcgtccatggcaagacggtgatcctcacggtggtggacaggttctccaagttcgctcatttcatcccgctgtcacatccatacacggcaaccacggtggcggcagcattcttcggcgacatcgtccgtttacacggtgtgccgtcctccatcgtcagcgatcgggatcccgtcttcaccagcaagttttggacggagttgtttcgcctcgccggggttcagctgaatctgacttcagcgtttcatccacagtctgacggccagtccgaggtcaccaacaaaatcattgcaatgtatttgcgctgtctcacaggagatcgtcctcgtcaatggttgaggtggcttccgtgggcggagtattgctacaacacgtcatatcaggcttcgctgcggacgacgcctttccatgtagtctatggccgctcaccgccgagtctgcgttcttatgagccggggagtacatgcttgccagccgttcagcgctcgatgcaagatcgggatcagtttttggtagccatccgtgatcggctggagcaggcacagcaggtgtacaagcaggcctatgacaagaagcatcgggagttgaattttgatgtgggcgattgggtttggctgcgccttctgcatcggccgatggcgtcgctcgacacgaggggccgtggcaagctggggcctaagttctatggtccctaccagatcgtcgcttgcatcgggtcggtcgcttatcgtcttcgccttccgccaggagctcgtctgcacgacgttttccatgtgggactgcttaaaccgtttcggggtgagccgccaagcactctgcctccgttgccgccgacgcagcatggtcaagtctgtttggaaccacagtcagtctcccgcagtcgtttggctcgaggagtccgtcaagtcttggttcagtggaagaacaagccggcggcagacgcatcgtggttgtcgctggatgaattccgtgcattatatccggatttccagctcgaggacgagctgcttctcgagggagggagagattacatggttttctcgtgtgctgactcacgtgtgtgcccaacactgaccttcggtctacaacctggtgaggccttcactgtccgtaatattgccagcatggttccagcctatgacaagagagggcagtgcagcattgggtcagccattgagtatgctgtggttgtcctcaaggtcacatcttccttgcgaataattaatgtccttctaatctaa

SEQ ID NO: 7550 - DNA, 285 bp, Oryza sativa
  Clone ID: PAT_MRT4530_14134C.1
atgacggttgtgacggttggaattgtcggtaataccctctaaccgtcattggggagccatctcagccgtccaggagaaccctggatcaaacggagctatggggggttcggtcgaaacaccatgggctggcccaacccagcccatctttggctggcggcctcctttgttgtcctcctccgtagacttgtgaattttggcccaatgtgtcgtgttatttttgagttcttggcccattcatacataagtctggttctcgacatcgtccgattgatttatcgtctgagt

SEQ ID NO: 7551 - DNA, 685 bp, Oryza sativa
  Clone ID: PAT_MRT4530_14136C.1
cctacagtaatcactgatgaggactttgcccccaggtttcagccacttgaagaaacttctgaacaaagcaggtttatcagtgattactgtaggaatcctgggaaaccatcagaagaatttgctgcttacattaagcagagaggctatgacctccacgatgtgaagacttacggaaagatgcttgaggatgctggtttccatcatgtcattgctgaagaccgcacggaccagttcctgcgtgttcttcaaagggagcttgctgaagttgagaagaacaaagaagccttcatggcagacttcacccaggaggactacgatgacattgtgaacggctggaacgcgaagctgaagcggagctctgccggtgagcagaggtgggggctgttcattgcaaccaaatgattcagaagcagagagggttcagaataaaacgggtgctgctgttgttggctgtgttaactagtactcctactagatctgttgttgcagatttatttgtgcgccccaattggtagtttgtttgtgtgtgatgtagtattccagttttagaggacggccaatgttccatgtgacgtgatgtacgttaaactcagtctgtttaaagtatgtattatcgtgcgtatttggtatggaactgtgttattgtttgcagataaataaacacagatgtgttcctcttttgcac

SEQ ID NO: 7552 - DNA, 1087 bp, Oryza sativa
  Clone ID: PAT_MRT4530_14137C.1
cactccactccactctccgttgctcgcgcggttggacgttgcgttttttcccctcgaatcgcggggtgggaatccgccggttgatgcagcagagtgggcctcagcgcacaaccgccgctcccgcggcttctcccgatcccgccgcgccgtcgagggcgcctaaaccacacgcctttttttttttcccttaaaaacgaatagatctctctcaatttcctgaaacttataataatttcaaaaacgccctagacgaggacgaggagacgatcgagatggacgccgtcgcggcgaatggtaagcgcgcgcgagcggatgagagatccgaatgtttttgtgcttttgtgtttgtgtttttgttgtggaggtggagggggattgggggtgtgttgatgatgatggggggtaaatggttttggttggatggatgcgttgcagggatcggggaggtggagaggaaggcgcagcggagctactgggaggagcactccaaggacctcaccgtcgaggccatgatgctcgactcccgcgccgccgacctcgacaaggaggagcgccccgaggaattcaggatactccagtcgtttagctccccaatgggctaattgctatttagagtcctgtctgtactcccttcttacaaagggaaatcagtactggagcttggtgctggaataggacgctttactgtgggaactggcgcaaagaagctggcgcatgttttagccctagacttcattgaaagtgtgattaagaagaatgagaacataaatgggcatcacaagaacataacctttatgtgcgctgatgtcacgtctccggacctgacgatcgaagataactctattgatctcatattctcaaactggctactaatgtacctttcagatgaggaggtcgagaagctagtaggaagaatggtgaaatggctgaaggtaggtggccatatattctttagggagtcatgctttcaccaatctggagattccaaaaggaaggtgaatccaacacattaccgggagccaaggttctatacaaagatatttaaagaatgccattcctatgataaagatgggggtttctttgattc

SEQ ID NO: 7553 - DNA, 351 bp, Oryza sativa
  Clone ID: PAT_MRT4530_14138C.1
atggctaaacccctcctcccagctaccgctgcggcagcagcagctcgcctcccctcccgcctcgccataggcgcggccccacctctccgcgtcctccccttcttcctctacccgccgccgccgagccctgtcatcagcaagggcagggatgtcgaggacgccaccgtcggctgccccgtctgcggcgtgttcatgcaggacgccgaccccaacctgcccggcttcttcaagaacccctcccgcctctctgacgatgagatgggggaagactggtcgcctcttgccgccgagcttgatggatttattggaaatgacgaggggaatgatgtgccgtcagaatctgatctttag

SEQ ID NO: 7554 - DNA, 4386 bp, Oryza sativa
  Clone ID: PAT_MRT4530_14139C.1
atggatatagaaggaaagttcgatgtactcctgaagaccatagctgagaatgagaagaagaggatggcggcggaagatcggacccgagaagatctgatggaactcaaggcgatggtggaggggcgccttccccaggtagagaagcgggtggaggatctgaactctgccctgggaaagctgaactccaaggtcgagcatttggagaagcagctgccgcgcgtgatgaacacgaacgaagaggtggcggctgcgtccgcagggttcaggactccggcttctgcccagggtacgcatgaatctcctcctgactccgctgctcctttcagctttgattcgtctgcgcaacacagtactttctctgcaatgtccactggagtttgtggtagtgttcctccgatgacttgtccgcagttcaacggtgataatccccagatgtggcgagcaaattgtgaagtttattttgacatctatggagttttaccgcagaattgggtaaaagtggctactctgaatttttgtggtaatgcggcattctggcttcaatctgtgaggaatcaactgattggtattacttggtctgatttgtgcgagaagttactggcttatgagcaagctgttccgccgatttacttcgttacaaaattcatggaaggtcttagagatgatattagatccatggttctgatgcaaaggcctcaagacttggacactgcgtgttctttagctctacttcaggaagaaactgctgctgaatcaaaaccaaatagtttcaagagatctgatagtggaacttatttgaaatccccacccagaagtgctactcctcccatttctcctaactcatacagatccagtcccagccaatcccctgaagacaagagaaacattgaatcacctagagtgagagaagataggatatcagccctgaaagcttacagaagatctaagggattgtgttttacctgtggagagagatggagtagagatcacaagtgtgctactacaatacagttacatgtggttgaggaactattggaagcaattcaggctgatcctgagattatttcaaatcaaagcagtgttcctgagggagatgaagatacacttatgtccatatcttcacaagcattacatggttctgaatcttctaagtctatcaagttaagaggatgggtgcaaaacagagaacttttaatgcttgtggattctggcagcacacactcttttattgatgagcaaaaaggtatggctaaaactgattcaatagaatgtatggtgcaactcattcaaactgctgaacaagaaactagtgaagtgcctgctgaggttcagcccctgctacaagaatttcaagacctcttcactgaacccactggcttacctcctaaaagaacttgtgaccatcacataccacttattccaggagctaaaccagtgaacttaagaccatacaggtacaaacctgcacttaaaaatgagattgaacgacaggtggcggagatgctgaaatcaggagtgatccaacctagtcagagccccttttcatcacctgctctcttagttaagaagaaagatggctcctggcgcttatgcattgactacaggcagctgaatgctgtcacagtgaagagtaaataccctgtcccaattattgaggaattactggatgaactggctggctccaaatggttttccaaattggacttaagagcagggtatcatcagataaggatggctgagggggaagaatttaaaacagcgtttcaaacacactcaggtcattatgaatttaaagtcatgtcatttggactaacaggagctcctgccacatttttgggtgcaatgaatacaaccttggccactgtattgaggaaatttgtgctggtattctttgatgacatcctcatctacagtccaaccctcacagcacatctggagcatttgagacaagtacttcagctgctatctgaacacaactggaaggtgaaattgtccaaatgttcttttgcacaacaagagatatcctatctaggtcacatcattggttctgagggggtttccactgatcctaagaagatacaagatgtggttaactgggctgtacccaatactgtcaaaaaactaaggggatttctggggttagcaggatactacagaaaatttgtgaagggatttggagagattagcaaatccctcactcaattgctaaggaagggggttccatttcagtggactcaggacactgacaatgctttccaacatctcaagaaggctctggtatctgctcctgttctagctctccctgactttacaaaacagtttaccctggaaacagatgccagtgagtttggcattggtgctgttctatcacaggacaatcatcctatagcatttctcagcagggctctgggtcccaagtctaaggggttatctacttatgagaaggaatatatggccatactgctagctgtggaccactggagaccttatttgcagcatgcagaatttctcattctcacagatcatcatagcctcaagcacttgtctgagcaaagattacacacaccttggcaacaaaaagcttataccaagctgttgggactgcagtacaaaatatgttacaggaaaggaattcacaactcggctgctgatgccctttctcaaaaggaagacactgttaaagctgaactagttgctatatctgaaggagtaccactttggatgcaggatgtcattcaaagttatgagactgattccaactccacacaattactagcagaactgtctatcaatcccaatgccagacctcattttacactgaagcaaggcatattaatgtacaagggcaggatctgggttggccagaatggtgacctccaatccaaaattattgatgctctacactctgcacccattggtggtcactcaggattccctgttacttacagaagaattaaagcgctttttgcttgggctggcatgaaaagaatgatacagaccagagtgaacacctgtcaggtatgcattcaggccaaaccagacagagccaaatacccaggtttgctacaacccctgcctgttcctgcagcagcttggcatactatctctatggatttcattgagggtttacccaggtcccatcattttaattgcatcctagtggtggtcgacaagttttctaaatatgctcacttcgttcctctttcacacccattttctgccgcaactgttgctcttgaattcttgaaacatgtttacaagttgcatgggttacccaacattatcatttcagatagagatcgagtctttaccagtaacttctgggagcaactttttgcgaggtctggaacaaaactgcatatgagctccgcgtatcatcctcaatcagatggccaaacagaaagggtgaaccaatgccttgaaatttatctgagatgctttgtccatgccactccgactaagtggtcccaatggttatacttggcagaattctggtataacacttcttatcattccacattgaacaagtccccatttgaagtcctgtatggctataaacctagtcactttggcatcagcctcaatgactgtgccataccagatgtgtctcaatggttgcagcagcgcaaatttatgcaacacctgcttcaacaacatctgaacagagctcagcaacaaatgaaacacttggcagataagaagaggagtttcagggaatttcaagttggtgattgggtttacctcaaacttcaaccttatgtccaaacatcagtttctactagagccaaccacaagttatcttttcgttattttggaccttttcaaatctctgccagagtgggctcagtagcttataaactgcaactacctgcttcctgtcacatacatccagtattccatgtctcacaattgaaagcagcccagggattctctcatccagtgcactctaatcaacctcctgatctgaatcattttcagattcctcaccagtttattgattatagagtgactaaaagaggtaacactcccattactcaattgctaactcaatggacaggttgtgatgcttctgcagctacatgggaggacatggaggacttgcagtcaagatttcctcaggcaccggcttgggggcaagccggtttccaagaatgggggcttgtcaggcctccatctccaccaagagcaagagaagatacagaagagatgatacaagaaggagcagaagaggaagaggtgctggagcctgacgacaaggaagcagatgcccaggaacaaggaggaaaaccagacttcaagaccaagaagaagcaagtaccagtccagcttgggccaagagcaaggaggcccaatccacgctacaagggtgaccaatgggtccagtaa

SEQ ID NO: 7555 - DNA, 746 bp, Oryza sativa
  Clone ID: PAT_MRT4530_1413C.1
ccggccgggtcactcttctcttctcttctagcaagccggccggtggctggggacgaggccgccggggcgaggtgagagagtaggaggcggcgggcgatgaggcggtggctgcgatagcagagtggccacggcgaatccaaggcggcggcggcgaagcggagaggccacggcgaatctgaggtggcggtggctgcgatggcggagaggccgcggcgaatccgaggcggcagcgccgtgctcgctctcgtcgtcctcctccccatcctcgcgccgccagtccccgtcgccacctgccgcctctgcaacaaagccgtcgcccaccgctactgcctctagtctgacgatgacaccttcgtctgtgccgcctgcgttgcggccaagcatgactggcgcttcccgtacacgccgccgccaaccaccaccaccggcgacgtcagcgacgccccactcgacatacgcgcgagccaacgtattcatctgagaagaagattgcttggtttgcacctttgtgcatgccattttgaattgtatgatgttgcttgttatactgtaccatttaccagtgaacaatgtattgatctgctggtgaacaatgtattagaaaaattatgaaccctgaaatagagttgctgtgaggaatttgcttggccaaatgatcagggacccggatgtatgatctagattcataattcttattgtgatgttctcatatgttagatgatcatgataaccagtatattcatctc

SEQ ID NO: 7556 - DNA, 747 bp, Oryza sativa
  Clone ID: PAT_MRT4530_14140C.1
atgcgccgacagttgccgacgatcgctgctgtccttaacgcccggagcagcctccgccaccgcccgccgccatccttccagatgcgccaagctccgtctgcccccgccgccctcgtcctccccgcgcacacgccaccgagagggaggggggaagccgcggcgagctccgtccgcccgcacgccgctgagagggaggggggagggggaagccgcgtcctcgtcctccccgcgcgcatgccactgagccgagcggccgcctcctcatcccccgccgccgccgccgccagtgctccgtgtcccctgccgccgctgacccgtgagatggctaccaccgctcaggagaatggtctcctcgtcaaggtcaagcgcaaccatcgtcgctgcctccagctcgcccctacctgtgcaactctgggccacccatttttgcgactgccagaccactgtttcatagccctctacgttgttgccagcttcgtcaacggtgaagaaaaccggacccacagtgcagcattacccaagcgtgtggacacgggtggccgaggcggatccggcgaccgcgccggggacgccgccgccgtgcgcctcgccgtcgaccgcgccgctcgcttctcctcccgcgcggactcgggaacggtgggagcggcgggagtggacgatgcggcgccgacgggcggccggaggcgggagcagacgagcggccggcggcgggcgatagacgagcggagcgtagatgatccattttga

SEQ ID NO: 7557 - DNA, 3553 bp, Oryza sativa
  Clone ID: PAT_MRT4530_14141C.1
atggaatccctcctcccgcgcctggcctccctccgccactacctgcagttccacgcgcgcctcctcacctcgggccacctcggcgcccacccgggcctccgcgcccgcttcctcgaccgcctcgcgctctcgccgcaccccgccgcgctcccccacgcgctgctcctcctccgctccctccctaccccggccaccaacgacctcaacgccgcgctcagggggctcgccgcctcgccgcacccggcccgctcgctcctcctcctcgcgggccgcctcctccccgccctgctccctcgccccgacgcgctctcgctctccttcgcgctcaaggcgtccgcccgctgctccgacgcgcacaccacgattggcttgttaaaagatgggatgtatgtgcacgagtttgctaaaagatttggactggatcgcaatgttcgggtctgcaattcactaattgacatgtactccaagtgtggctcgctgtcaagggccctggatgtgttccattccatcaagccggaagaccagacgcttgtgtcctacaatgctgcaattcaggcacattccatgcatgggcatgggggtgatgcactgagattgtttgatgaaatgcccacacgcattgagccagatggagtgacttaccttgctgtgttgtgcgggtgcaaccattctggccttgtggatgatgggctcagggtattcaactcgatgcgagttgctccaaatatgaagcactatggaacaattgtggaccttcttggccgtgcaggccgtctcactgaggcatatgacaccgtcatttctatgccatttccagctgatattgtcctttggcagacattgttgggtgcagccaagatgcatggggttgttgagcttgcggagttggctgccaataaacttgctgagcttggttctaatgtcgatggtgactatgtgctcctatcgaatgtttatgcatccaaggctcggtggatggatgttggtcgagtacgtgataccatgcgaagcaacgatgtgcgaaaagttcctggcttcagctacacagaaatagatggagtaatgcataagtttattaatggtgacaaagagcacccgaggtggcaagagatatacagagcactggaggacattgtatcaagaattagtgagctaggatatgagccagagacaagcaatgtactgcatgacattggggaggaggaaaaacagtatgcattgtgttatcatagtgagaagctggccattgcatttgggttgattgcaacaccacctggggagactcttcgggtgatcaaaaatctccgaatatgtggggactgtcatgtggtggcaaagctcatctctaaagcttatggtcgtgttattgtcattcgggacagggcgagattccatcgatttgaagatgggcagtgttcctgcagggattactgtggagtttgggctatctggttctgtgtgaaattattgggttttcaaaaacatttcattgagcgatgtcatgtagcttcctcacaaggatttgtcacttttgcaacagtggaaggccacgacgcagactttgtcttctacacgcggcaagagatacaggatgtggacggagaaaaagatgctggacgcgcaggtgagacaggcatgatatcctacaaaattgctgctcatgctgctgatttggcaaagtgccatccgtatgcacaagcatgggacgatacactaagcaaggcaagatttgagtttagatggttggatcaatttgctctatctctggatcctgtgaccgctatgtctttccatgatgaaacattaccatcggagggtgccaaagtggcacatttctgctcaatgtgtggcccaaagttttgttcgatgaaaatcacagaggatattagaaaatatgctgatgaacatggttacgggacagtggaggaagcggtgatacaaggaatgaatgctatgagtgctgagttttcagctgcaaggaaaacaatcagtggggagcaacatggtgaagctggaggggagatatatgttccagaaagctatacagctcgcaaataagatcgtcttggtgtccatctactccgggtggagcgtttatcagcagcactcctcaccatcctatgttaggaggtggtaagcagtataagtgccttgaataaagctggtgttgcttagctcaatttgttaattctgtcgtggcttgtaataaaattaaactctatatgtgatccttccgtgtcatattttctactctttgcatcactgtgggttgttagtaatgaaagttgcaccaggggtgcctgtattctcaacgatctgaaggcctcttggcctggattgttgtgaattgggctgagaaagtccctttgaacctgaacaggataatgcctgcgaagggagtgtgcatttctacttttatgtttccagggaactctcaacacaacccctttttggtgggagatcgagctatccaatatgttcctgaacgtgtgagctcagcagctggatatacctgtttcttacaactgaggtaacatggtaataatacttcatttggtaagtggcatgctgacatttctccaacaggagaggatttctgcagataccacttcgtaatgtcccataactgatttagtcatacatttattatccgtgtaaatttgcaaagcgttggccatgtcctatgcaattgattttaaaccatctatctgcacatatctaattaaagtataaaacaatttataaactctacataatggacattttagctgcatgccacttgtcaattgagcacacaatatactgactaaattcaatttaacttgatcatgattcatgtggaaggtgtttattaggaattaatttattgatatggccagagacttgtttatttttagctatttatttgtctttcccatagaaatgatcaaattttgtacttgcaccttgtgtaagtataatagaattatttagtctgttttggagcattcattaatgcaatgatgctcagccgctcagatctttgcgtagcattatccaagaaaacaagtctttttgtatcccctagataatttgaaagcacccatacatgcacaatagcatgtgaaaaagaactttagctaggttctgttgaccgattatgttgtaggataggaatcatctgcctgtagaacataatttgggcattatcttctgatgttataatcatgtttttctcagcaaactattactccgcactccattttgtgtttgcgatgtggaattattttacctgtgatccaatcccattatttgactgacgtgaaacgttaagtgaaatgacgtgtggacaaagttgctcgtggctggagtctttatgctcgtggttaacaatttggagatgaattttgctctgattgtgctcctgcaatgtgtttttaattttcatcataacggatcttgacactattttctatcagattgttacctgttgttcattccgagttcagtactactatacaatgtccgatcaagttcagatattattatgagtaaagtccatcaccggtccctc

SEQ ID NO: 7558 - DNA, 290 bp, Oryza sativa
  unsure (1)..(290): unsure at all n locations
  Clone ID: PAT_MRT4530_14142C.1
gaagaagcggaaggcgaaagagccgtcgccatcgtcctcctcctcatccgaggaggaggagaggagcagcacgagctccgacgagccggcgcccgccgcgaagaaggcgaagaaggagaagacgaacgataacgtggtggtggaggaggaggaggaggaccacgacgaaggggagctcaccgtcagcggcgacgaggatcccgccgaccccaacgcgctcgccaacttcaggatctnggagtcgctcaaggagaagctcaagtccaaggggatcaaggcgctgttcccca

SEQ ID NO: 7559 - DNA, 2399 bp, Oryza sativa
  Clone ID: PAT_MRT4530_14143C.1
cagttccacgcgcgcctcctcacctcgggccacctcggcgcccacccgggcctccgcgcccgcttcctcgacgcgcctcgcgctctcgccgcaccccgccgcgctcccccacgcgctgctcctcctccgctccctccctaccccggccaccaacgacctcaacgccgcgctcagggggctcgccgcctcgccgcacccggcccgctcgctcctcctcctcgcgggccgcctcctccccgccctgctccctcgccccgacgcgctctcgctctccttcgcgctcaaggcgtccgcccgctgctccgacgcgcacaccacggtgcagctccacgcgctcgtcctccgcctcggcgtcgccgccgacgtccggctgctaaccacgctgcttgactcgtacgccaagtgtggagatctcgcgtccgcgcggaaggtgtttgatgaaatgaccgtgcgggacgtggccacatggaactcgctgctggcggggctagcgcaaggcacggagcctaaccttgctctcgcgctgttccacaggctggctaacagcttccaggagttgccgtcgagggaggaacccaatgaggtgactattgttgcggcgctttccgcgtgtgcgcagattggcttgttaaaagatgggatgtatgtgcacgagtttgctaaaagatttggactggatcgcaatgttcgggtctgcaattcactaattgacatgtactccaagtgtggctcgctgtcaagggccctggatgtgttccattccatcaagccggaagaccagacgcttgtgtcctacaatgctgcaattcaggcacattccatgcatgggcatgggggtgatgcactgagattgtttgatgaaatgcccacacgcattgagccagatggagtgacttaccttgctgtgttgtgcgggtgcaaccattctggccttgtggatgatgggctcagggtattcaactcgatgcgagttgctccaaatatgaagcactatggaacaattgtggaccttcttggccgtgcaggccgtctcactgaggcatatgacaccgtcatttctatgccatttccagctgatattgtcctttggcagacattgttgggtgcagccaagatgcatggggttgttgagcttgcggagttggctgccaataaacttgctgagcttggttctaatgtcgatggtgactatgtgctcctatcgaatgtttatgcatccaaggctcggtggatggatgttggtcgagtacgtgataccatgcgaagcaacgatgtgcgaaaagttcctggcttcagctacacagaaatagatggagtaatgcataagtttattaatggtgacaaagagcacccgaggtggcaagagatatacagagcactggaggacattgtatcaagaattagtgagctaggatatgagccagagacaagcaatgtactgcatgacattggggaggaggaaaaacagtatgcattgtgttatcatagtgagaagctggccattgcatttgggttgattgcaacaccacctggggagactcttcgggtgatcaaaaatctccgaatatgtggggactgtcatgtggtggcaaagctcatctctaaagcttatggtcgtgttattgtcattcgggacagggcgagattccatcgatttgaagatgggcagtgttcctgcagggattactgtggagtttgggctatctggttctgtgtgaaattattgggttttcaaaaacatttcattgagcgatgtcatgtagcttcctcacaaggatttgtcacttttgcaacagtggaaggccacgacgcagactttgtcttctacacgcggcaagagatacaggatgtggacggagaaaaagatgctggacgcgcaggaggatattagaaaatatgctgatgaacatggttacgggacagtggaggaagcggtgatacaaggaatgaatgctatgagtgctgagttttcagctgcaaggaaaacaatcagtggggagcaacatggtgaagctggaggggagatatatgttccagaaagctatacagctcgcaaataagatcgtcttggtgtccatctactccgggtggagcgtttatcagcagcactcctcaccatcctatgttaggaggtggggtgcctgtattctcaacgatctgaaggcctcttggcctggattgttgtgaattgggctgagaaagtccctttgaacctgaacaggataatgcctgcgaagggagtgtgcatttctacttttatgtttccagggaactctcaacacaacccctttttggtgggagatcgagctatccaatatgttcctgaacgtgtgagctcagcagctggatatacctgtttcttacaactgaggtaacatggtaataatacttcatttgat

SEQ ID NO: 7560 - DNA, 1155 bp, Oryza sativa
  unsure (1)..(1155): unsure at all n locations
  Clone ID: PAT_MRT4530_14144C.1
agccaagatgcatggggttgttgagcttgcggagttggctgccataaacttgctgagcttggttctaatgtcgatggtgactatgtgctcctatcgaatgtttatgcatccaaggctcggtggatggatgttggtcgagtacgtgataccatgcgaagcaacgatgtgcgaaaagttcctggcttcagctacacagaaatagatggagtaatgcataagtttattaatggtgacaaagagcacccgaggtggcaagagatatacagagcactggaggacattgtatcaagaattagtgagctaggatatgagccagagacaagcaatgtactgcatgacattggggaggaggaaaaacagtatgcattgtgttatcatagtgagaagctggccattgcatttgggttgattgcaacaccacctggggagactcttcgggtgatcaaaaatctccgaatatgtggggactgtcatgtggtggcaaagctcatctctaaagcttatggtcgtgttattgtcattcgggacagggcgagattccatcgatttgaagatgggcagtgtccctgcagggattactggtaaatagtggcatgctggatcatttaaaggataaatttggcatgagctcgtggagatgaggtcaaaaaggatgatantacatgtctccgatccagcatatcgatttgtatggatactggaacatattcttgaaccatgcatatcacttctgacacttcacacaatgggtcaaacatcaaaaggttgttcgagatataatccagggctccaggcttgctgttgcagatacattcaatttagtccccattgaaattaatcttgtaagttagggtgtgggtggtttgaaaatcctccacttagccttcacagagaatgatcttgagaatgaaataccaaatacagtatacacggtttgaggtttccggatggtttctgctgccactggacctcacaaccctacaaaggtttataatcaccaagagtccaggacacaactggatagtcacattgccgtatgttacaactagcattcagctggtaatggtatggtactaatgaaaaactgacatcaggataggagcatgctatttttcctttagggagacaatcatatttttcatatctacggagcga

SEQ ID NO: 7561 - DNA, 705 bp, Oryza sativa
  Clone ID: PAT_MRT4530_14145C.1
cggacgcgtgggcggacgcgtgggcggacgcgtgggcaaaatttctgctcatgctgctgatttggcaaagggccatccctatgcacaagcatgggacgatacactaagcaaggcaagatttgagtttagatggttggatcaatttgctctatctctggatcctgtgaccgctatgtctttccatgatgaaacattaccatcggagggtgccaaagtggcacatttctgctcaatgtgtggcccaaagttttgttcgatgaaaatcacagaggatattagaaaatatgctgatgaacatggttacgggacagtggaggaagcggtgatacaaggaatgaatgctatgagtgctgagttttcagctgcaaggaaaacaatcagtggggagcaacatggtgaagctggaggggagatatatgttccagaaagctatacagctcgcaaataagatcgtcttggtgtccatctactccgggtggagcgtttatcagcagcactcctcaccatcctatgttaggaggtggggtgcctgtattctcaacgatctgaaggcctcttggcctggattgttgggaattgggctgagaaagttcctttgaacctgaacaggataatgcctgcgaagggagtgtgcatttctacttttatgttttcagggaactctaacacaaccccttttttggtggagatcgagctatccaatat

SEQ ID NO: 7562 - DNA, 2290 bp, Oryza sativa
  Clone ID: PAT_MRT4530_14146C.1
ctaagcccgatccgccctagcacgatcccctcccccctccccgtctccgatccccctcctccacctcagatctccggcgagccgagcgaatcggccgccgccccgaggaaatggctgccctgcaaccctcattctcttcagcaatggctatgaaaagtctgaagttacccaaaactgcagttttacctggatttggtggtattgcacgtcctcaagatgtgcaggacaggagcgctaacttcacttgttcaaggcctagagcagcttcagtgactgaccagtcaacagcagagccagcaaaacccaggcaaaacaagcacactgttgatccttctgctccagaatttctgccactcccatcatttgaagaatgctttccaaggagcacaaaagaatccagagaaattgtgcacgaggaatctggccatgtcctcaagatcccatttaggagaatccatttgaccggagatgagaagcattttgacacatacgacaccagtggtccacaaaacattagtccaaggattggacttccaaagataaggaaggaatggattgacaggagggagaagttaggtggtcctcgatacacacaaatgtattacgctaagcagggaatcataacagaggagatgttgtactgtgccacacgtgagaaccttagtcctgaatttgtccggtcagaggttgcccgtggacgagctataattccttccaacaagaggcacctggaattggaacccatgattgttggacgaaacttccttgtaaaagtgaatgcaaacattgggaattctgctgttgtgagctccatcgaggaggaagtacacaagctccagtgggctacaatgtggggagctgatactgtcatggacctttcaacagggcgtcatatccatgagacccgggaatggatccttcgtaattcttcagtccctattgggacggtgcctatttaccaagcacttgagaaagttaatggtattgctgaaaatctaagctgggaagtctttagagatactttaatcgaacaagctgagcagggtgttgattacttcacaatccatgctggcgtgcttcttcgttacattcctcttacggcaaagagaatgaccggcatagtttcacgtggtggctctatccatgcaaaatggtgcctaacatatcataaggagaactttgcctatgagcactgggatgaaattcttgatatttgcaatcagtatgatgtggcattatccattggcgatggtttgagaccaggttctatttatgatgcaaatgatagtgctcagtttgcagaattgctgactcaaggggaactcacacgccgagcttgggcaaaagatgtgcaggtaatgaatgaaggcccagggcacattccgatgcataaaattcctgaaaacatggagaagcaactggagtggtgcaatgaagcacctttctacacactggggccactgacaactgatattgcacctggttatgatcacatcacctccgccattggtgctgccaacattggggctcttggcactgcacttctctgttatgtaacaccaaaggagcaccttggattgcctaaccgtgatgatgttaagacaggcgtgatatcctacaaaatttctgctcatgctgctgatttggcaaagggccatccctatgcacaagcatgggacgatacactaagcaaggcaagatttgagtttagatggttggatcaatttgctctatctctggatcctgtgaccgctatgtctttccatgatgaaacattaccatcggagggtgccaaagtggcacatttctgctcaatgtgtggcccaaagttttgttcgatgaaaatcacagaggatattagaaaatatgctgatgaacatggttacgggacagtggaggaagcggtgatacaaggaatgaatgctatgagtgctgagttttcagctgcaaggaaaacagtcagtggggagcaacatggtgaagctggaggggagatatatgttccagaaagctatacagctcgcaaataagaatacaatctccgtgcagatcgtcttggtgtccatctactccgggtggagcgtttatcagcagcactcctcaccatcctatgttaggaggtggtaagcagtataagtgccttgaataaagctggtgttgcttagctcaatttgttaattctgtcgtggcttgtaataaaattaaactctatatgtgatccttccgtgtcatatttactaaaaaaaaaaaaaaaaaaaaaaaaaaacctgcagcccgggggatccactag

SEQ ID NO: 7563 - DNA, 582 bp, Oryza sativa
  Clone ID: PAT_MRT4530_14147C.1
gcgcgtgcgctggccacgccgcctccggcgacctctcctctcgcatccgccatggcggagccgagagctagatgccgagctccccagagcagcactagccccacctggccgcggcgggtggaggcgctgacccatatcctgacccacccctcccactccccgtcgctccactcgcagctcttcctcgcgtcccgcgtgccgtgcccgccaccgggctccacctacccgccgttcctctgccccggcgccggcgacggcgctggcctcctccggtgggcgctcgcctccgtgttcctcccgcgcgccgccaggctatgcctcccgccgtcgtcgtggcggtcccggtgccccttccagctcccgccgccggtcgtgccctccgccgccatcgagccggcgccggagcggtggggcgaggcggagctccggggttacgcgcggcggcagcgggcgcagaggggccccatgagggcgcggccgccgcactccatcgccggggcggtgctcaccatcgtgcccaacgtcgtcatcgtcgcggcggtcatccgcgagctgttctgggtccggcctaaccgcatctga

SEQ ID NO: 7564 - DNA, 307 bp, Oryza sativa
  Clone ID: PAT_MRT4530_14148C.1
gtatcaccgagcgccttttcggcgacgccgaaggtggaactgtgcgcacgcgaggcaaagcatcggagcgggcaagggggaaaggggtgggagaaatccgtgtgcgcgagcgccaccactcccttcacgccgccttgtctcccttctcccacctcgacaccgtcgtcaggctgcgaggtgacaggttgcagcgagtggcggggcgggcggaggcggggctgcggcgagcggcggggcgggcaccgtcttcacctgccatagcagtgctcctccccgtgctcctcgcctggttgcctgtgctcgaggg

SEQ ID NO: 7565 - DNA, 2139 bp, Oryza sativa
  Clone ID: PAT_MRT4530_14149C.1
atgttcggcatctacagcggcatgttccggcgacgccggtcaaactccatgtcctccatcgcccgcatcaacggggtcccacccgccaccgccgagcacgagcacgaggccgaggccaaggcggcctccgcgccggcgaaccaggcgcaccggaagggcggcggcgtccacgacgactcgtccctcgcgcaccgcccggccaagccgctcccagggacgaacaacggcgcgcagcgtgcccatgcaccggcaagcgacagggccgtacacgcgacgaaggcggcgaacggcggggcgaggaatgcggcgtcggcggcaccggccgcggagtacaccgggatggcagcggagctcgacaagatgatcctcgatcaccagagggtcaagggcaccacgcagctggtgcgcgcaacctccggcaacatgatgctccaccgcaacctcggcaacctcaatgccggcgtccccggcgcgtcggcgcggagctcgctggaacgcaaccccgccaacaagccggcgaacgagcggaaggccaccaacgggtacgcgttctccggcctcgggaacatcgtcaaggagccgagggcgccgccggcgtcgtccgagctgtgccgcgcgctgtcgcaccggacggaccccgagaagctcaaggagatgggcaacgaggagtaccgggaggggcattacgcggaggcggtggcgctctacgaccaggccatcatggtggatccaacgcggccggcgtactggagcaacaaggccgccgcgctcgccgcgctcggccgcctcatcgaggccgtcggcgactgcagggaggctgtccggatcgcccgtcgtacggccgcgcgcaccaccgcctcggcgggctgtatctcaggagaacctgacaaggcaatccaccacttcaagcaatcggcgaacgactcgacgggcgcggacgtgtcgcgcgcacagtcggtcaagagccgcgtcgccaagtgcggcgacgcgcgcaagctgaggaactggatcacggtgctgcaggaatcgcaggccgccgtcgccgacggcgccgactgcgccccacaggtcatggcgttgcaagccgaggccctggtgaagctgagccggcacgacgaggccgacgctgtgctgggcggcgcgccgcggttcggcgtcgacgaatcgaccaagttcttcggcaccgtcgcccatgcctacgtcctcatgatccgtgctcaggtcgacatggctgctgggaggtttgaggacgcggtggcgacggcgcagacggcgtgccagctcgacccgagcaaccgggagatcgcgaacgtgcaccggcgggccaaggtggtggcgtcggcgaggctgcgcgggaacgacctcttcaaggcgtccaggttcgccgaggcgtgcgccgcctactgcgagggcctcgacagggagaccggcaacgccgtgctgctctgcaaccgcgccgcgtgccacgcgaggctcgcgcggtacgagaaggccgtcgaggactgcaacggcgcgctcgccatgcggccggcgtacagcaaggcgcgcctcaggagggccgactgcaacgtcaagctggagagatgggaagcgtcgttgcgagattaccaggtgctgatccaagaactcccggagaacgaggacatgaagaaggcgctgtccgaggtcgaagccaagctccggagccagaggaatgggggcattgcaagcagatcacaacagtgacgccgggcttctttaatctgtcggctacccgaaatcaactgcaagatctgaagaggacaagactttggacaaaacaatgcagcacgcaccattgcgcggtttgttagtgtcaagtcagtatgattctttttttgtgcactatacgccaaattacaagagaattgagagtaatgaaactgtacataatacttgctgcaccgagaagtatagctagttaatttgaatgtgggttggcagtgatagcaaccatgaaagtttctgaagatttaagtttgcctcacacaaaaaacatactgggttgtactttgtactacaaaactaatatccatcccaaacagaaaatgagtgagtatccatttgagcatggctccaaaaaaaaaaaaaaaaaaaaaaaaaaaaaaaaaaaaaaaaaaa

SEQ ID NO: 7566 - DNA, 286 bp, Oryza sativa
  unsure (1)..(286): unsure at all n locations
  Clone ID: PAT_MRT4530_1414C.1
atcaaaagnnngcgggggatcatgagttcaccgtttcttacttccaaagagcatagctcacgacgagaaacacaccacagaagggttgctcccaaagttggggaagccagcaaaggagcaaacatttcccatcctgggggggggggagaagccgagggtactagtataaaacaaccaggcctttaagcaggagcatcgacattttgagctttatttgccctttcatgtccgcccgagtggcgaccacgctctccacccaggtgcctcccgccgctgttatgctgtc

SEQ ID NO: 7567 - DNA, 427 bp, Oryza sativa
  unsure (1)..(427): unsure at all n locations
  Clone ID: PAT_MRT4530_14150C.1
atggccgtcgagcttggccctgagctccttggcgccctggcgaactctggcaactcggcctccccgacctcgcccacgtcgacgtcccaccagaaccgcccctcggccttcgcctgcaagatcttcgccgtgatgccgcgcatccgcgccttctccgccgcgacctccgccctggtctcccccaccgcctacctcagcatctcgaggtcgacgtccttgcctaacccgccgctgtggacgggtgcgggctcagcatcctccccggggacggggccgtaggagaggaggacggcgtcgacggatgggtcaccgaaggcgtaggcaaggttggtctcggagaagacgacgacggcgatgctcgcgccggcgagcagggcgagctccgacgccttcttgannnnnngccccgccgcttggtgaaggtgac

SEQ ID NO: 7568 - DNA, 897 bp, Oryza sativa
  Clone ID: PAT_MRT4530_14151C.1
atggctaaaaagttttcaaacaaacctcacatcttcaatggagttaatttttattattggaagaaaaagatagaatcttacattacatctcaaggctatgatatttggttgaaagttgctattacttatgagattcttgctcaaaaaattgttgttcaaaaaactgattttgaaaataattgcaaaacacacaatataattctcaattcgatttctcgctccgattttgatcgtttttcgcatcttgctatagctactgagatttggaaaactttgaatgattttcgtactggatcttcaaacatcaaggagttgcgaaaagatgttttcaaaaatgactacatcaaatttgagatgaatcctggtgaatctttggatgactatttgggacgtctcgataaaatcttgagtaatcttagatctgttgatgcttcttatgatgttaattattctcaatctgaggttactcatcactttatgaatggtcttgatatgaaaatttcggatgttaaagtgacttctattcaggaatcggttgacatgaacaccttgactttggatattgtttacaccaaattaaaaatatatgagatgaatattcttttcaaaagaactgattctaaatctactgctttggtgtattcatctggatcttctttggatactactcttatgtctgttatttttgcttttaatgccttgtccaatgatcaactagaagaaatcagagaggaggacttggttttggttgcttgcaaattcaggagaagaggacaaccaaaccacatttgttctcaatgttccaagcttggaagaggtacaaaggaggaagatcaagatgaatccaagaacgcctagcaaaataagaagcaattctcaaatccacgaaggaaacat

SEQ ID NO: 7569 - DNA, 1713 bp, Oryza sativa
  Clone ID: PAT_MRT4530_14152C.1
atggcgagctataattgttggacctcgcacggagagctaggggttcaaatggaagaagatgaagcagaagatgagaacattccggactgggctcaatacggtggatttgaaggaaatacaaagggcgaggtggacggggctgttgaagataatgacgctgcagatgatcttggtcagatgccgcaggatgttaaggaggactgcgaaagggcacaaaaagttgggtaccactatggaattcttgcactggaaggaaaaaatggtgcgcgggcgcaccacgtggacggccacgtggcggccacggcagcaaggcaaggcgaggtggcgccgacgtggcgccatgagggcaccaacacgggcagcacaggagaggcgccatgcggacggcccggatcgatcggggcgatagatcggacggccacgggcaggcgcggcgtggcaaggggaggcggcagccggctgcccggtatagccggcaacggcgcgggcgcggagcgcggcggcggcgacccggccggacggccaccgacggcagcggcgcgtcgcgagcaggcccgggaggaggccgttgaaggggaggaagagggagaaggaggggagtgctcgttgaggggccgacggcggggagagcacggcggcgagcggtcgggaggcgccggcgaagctcggtggaggggggtggcgacgctccggcgacggcggcgctcgggaaggagcggacgagcggcagcggcgcgggatcacggatgttcggcgggttttcggcgacgggaagtggtggccaaggtacggtgggacgcagcgatgccgttggaggcggtagcacggctaggcgaggcttcacccgccggcgggaagctgatggaggcggcgtgggcggcgaggactcgggttgacggtggaattggcgtttcgggggtggagatgggaaaagaagcggtggccgatgtgcggggaggggaggaaggaccggtggccgagtttgccctttatgcggcgaagctggcggtgacggcggagcagtgcggcggtggccctagtgacaggaaacggcggccggagttcgccggagagtggcggcgatggggagcagcgtggagagcgcggaagagggcgcgaggagctcgggaaaatggggaaaaagggagagggaggtgcggtgagcatttttataggggaggggaggcaggatcgtggccgattggggtggcaaccggcaaggtggtggcggcggcaccgggggtggtggcggctggcccaaagcaacttggtaatgacattgatgtgtacctaagaccactggtcgacgatctgaaactgttgtggaagaaagaaggcgtccctatgtgggacgaggacaaacaggaacaatttaacctacgagccctgctgttcgtaaccatcaacgattggcctgcacttagcaacctatctggacagtcaaacaaggggtacaacgctagcacccactgtatggaagacactgaaagtacgtatctgacgcactgcaagaaggttgtgtacatgagccatcatcgatttcttgttgcaaaccaccctgtccggaagaaaggcaagcattttgaacagaaggcggaccaccgtgtatataggaagtcgaaagatacacttgaagcacataatgatctcaaacatatgaaccagcgcgacgacctccacccggaaccaacggatcaggaagccagtacttga

SEQ ID NO: 7570 - DNA, 219 bp, Oryza sativa
  Clone ID: PAT_MRT4530_14153C.1
atggctcacctcaccccagggctcgtgtgggccgtcaacgtgttcccccggcgtcaccatctggcgagcaccggatgctccctcagcggcagtggcaacacggtctttgcccaggccagctccaagtccggcgactgcggcggcaggctgaattgcaccgtccctggcaccccgccggacggccggctctggagcagggccataagggcgatggcctag

SEQ ID NO: 7571 - DNA, 936 bp, Oryza sativa
  Clone ID: PAT_MRT4530_14154C.1
atggaggcgctcgtcggccagtattctccgtgtcttgccaaagttccccttaaatacctcgggaatgccagaactcctcttgctgctgttaacattacgttcagagcatatgaggatataagttcatggaacaggcccaatgtgacctgggcagcccacggttggtgggccgggctacgcactctaataagtggtatcagagcccaaggatctaaaattatggctccggttgggcctgtggtggagcaggctcaatgtgacctaggtggcccacggttagtgggccgggctgcgcactctaacgatttgtggaatgatgacaaagattgggatgttcaaaaactcaattccctgtttgagcaggaagtagttcacaaaattttacaggtccacatttctcaaggaagcacagaagacaaactctgttggaaatactcaaaaaaggtgaatgcaatacaaaaaagcgcttacaaggaattcattaaaagagaggagcacaggtactctcagtttggaaagatagaaatttgcctcctaaggatcaagagcagtcagagctggagcatagaagaatggacagcattcccaatggaaacaggtaccacttttctaacggataactccaccattgctgatactgcaaaaaggagaaattttctagaggagccaggtcactggagtttaaggcctttgtggacccaaattatctcttccacttcaattgatcttatacaggttcgatgggttccaagagaagttaacaagatggccgacaaattagcgaaggaagccaagtccggtaccaggaggaactttatccaaaattgtcaaaacattgagcattctgcttatcctcatagaagtttttatgctagacttctgaatgataacttcagatctcttaactgtacgatcaactatgtactctgtttttaa

SEQ ID NO: 7572 - DNA, 1011 bp, Oryza sativa
  Clone ID: PAT_MRT4530_14155C.1
gggcttaccgaaaccaaggacataggcaaaggcgtaggctggaggcaagtggcgaaggtcgaagttatcaattcgacaacacttgctttgcaatttctgtgcactttgaaagaaatacaagatgggatttcttttcgctttttccataagaaatatacactttcatgggaaggattatgtacacttcttggttttcacgattcctgtaaaatcgatctccagaaaggaatttctaggttcgagaaaaataggttttgggaagacatttctaatgctccaatttgcaagaaaactaggacgaatgataaccataatcctacacttaggcttatgcataaatggattgctataactttgtttcctagaggtgatctacgacccattagaggggatgaattaattgtcatgtttgtcatggttaggaagatcaaagttgctgctgtgaaatgtatgataaggcaaaggctagaaagtataagattttctactcctgtggagtgcacttccttgattactcggataacaaagggactaggggttattaacaatgattagattgcttatgtcttagccgcttgtccctgtatagatgagaattatctagtgcaagggaacattcttaaacatggagtagatggatctttgatttacttcttccccggttgtacatatgaaatcttgttgcctaatgcgggatattatttgaacaactaccatgaactaaccattcccttgcataccatagaagaatctcgtgcaggtggaacatacagggagacacgcaacatggcaagtaatgaacgagaaggttcatcatcctcaacacccgtgaaatgtatgaggcaagttgggagccaactggggatgcacctggatggacccaagctccacgccacagcatcggagtctcaagctgcgcaagcggtagtgaggaccggtggcgggtgcctcatgacatacagtggggaggctagagccatcagtcccccgtaccaagtggtatgcctccat

SEQ ID NO: 7573 - DNA, 135 bp, Oryza sativa
  Clone ID: PAT_MRT4530_14156C.1
atgtcggagggccgcatgggcaaagatgaagaggcaaaagcctcggcacagaggcacgggtttcgccaaggtaccgaacctcatcgccaggaggcccagcggaccgccgagccctcgggagacttcagcaaatag

SEQ ID NO: 7574 - DNA, 2544 bp, Oryza sativa
  Clone ID: PAT_MRT4530_14157C.1
atggggacctcatcgggagccaacttccaccagcagcaaccgcccccgccgacgtcctccgccgcggccgcggcaggagcagcggcggtggcgcaggggatgctgccgccgcggaggcccacggggctgcagacctcgctgtcgctagcctcctcggagcaggtcggctcgccggagatgcaggagccgggttcgaattccgaccaggggcacgactccgccaccgagagcgctagctccagggagacgtggcccgccgagcccaaccacggtagtgcggccgccgtcgtggccgcctccaccgccgctagcggcggcggtggtgttgttggtggaattggtgttggtgtgaggatcgtggacaaggagaaggaggtggggaatggtatccccaagctgcaggtgatccgcgggtcatcccgccttgatcggatgtcgctgcgggaggttgcccgggagagggtcgatctagttgctgagaaaatgaaggtgatgccggaggagcacttggaggacatgaagaacgagctcaggtcgattctggagggcacgggtggttctcaccatatcgaggagttcctgtatctccagaagtttgtgcagagtaggggcgatctcacccagaccatgctctcgatggcgcatcatgtgcagctcgagatcctcgtcgcgatcaagactggaatccaggcgttcttgcaccccagcgttaccattcctcagaaccgcctggtggaggtcttcttgtacaagaggtgccggaacatcgcttgccagagtgccctccctgcggaggagtgtagatgcaatgtttgttctaacaggaatgggttctgtaacctctgcatgtgtgtgatctgcaacaagtttgatttcgaggtcaacacatgccgctggattgggtgtgatttctgctctcactggactcacacggactgcgcgattcgtgatggccagattgggatgggtcaatccattaagagtggtactggtcatgctgaaatgctttttaggtgccaggcttgccagaaaacatcggagctgttaggttgggttaaggatgtcttccaacaatgtgctcctggttgggacagggatgctttgttacgtgagcttgagtttgtctgcaagatattccgtttaagtgaagactcaaaagggaggaagttgttcaggaaatgtgcagatctgattgaaaggttacggaatagccccgcggatgctatcaatcctcggatgatactgcaggtgctccaagagctcgagttggattcccccaagagcacagaaaatgaagaaatagggcgcttgatcactcctcaggaggcctgtaatcgtattgcagaggttgtccatgaagccgttaaaaagatggagcttgttgctgaagagaaaatgcgactctacaaaaaggctcgcattgctgtggaggcctgtgaccgggagcttgacgagaaggccagagagcttcaggagctgaaggccgagaggctgcgcaagaagcagcaggtggatgagctagagagcattgtccggttgaagcaggccgaggccgagatgttccagctgaaggcaaacgaggcccgtcaggaggctgacaggctccagagcatcgcgcttgccaaatctgagagggccgagcaggactacgccagcctatacctgaagcgccgcctggaggaagctgaagcagagaagcagttcctcttcgagaaaataaagtaccaggagacccagaggcccatgcaggcgagcggcagcggcgccggcgattcatcgcagacgcccatgctctccaagattcacgacctcctcaagaacgtccgcagcataccgccgaagacggaggggcatcaatgaaaacaaagagcagcagagctgcatacgattcaggttggtgaatcttaggtgtccttgtgctgatgtactcctacgctgatttccttcggtgtaaattgttagcaaaagtcgttgtaacaatattattggagctaacggtgtgccatcgtaggatcccatatatacttagcttcggtgtttgcagttgagcatggatgagaaatagctgaagcacccatgtactctggcacccccgcttacacgtacgcctcccgcgcgtgtccgtgtgctgtcgtggcggataaacaatttcacacaggaaacagctagggccgggggcccgccgcccgcgggttccactcgctctagggaaagctggtacgcccgctggcacccggccggcagctcccgcctcgacccccccgtccgcttcggcgtctctcgttagcgaaagccggtgcgcctgcaggttccgggccggcggtgccccggccgaccctcccgtccgctccggtgcttcggggttgcacatggcgctgggacgagattttgcgggcgcaccctgtgccctcgtagggcccaatatgtacttctgcctcggttgtcccctttcagcagggacgacacatttctgaccaccctgcgatctaacaatgtcagaaatgggtcatacatgatagatcgaataatttggtataatttgtg

SEQ ID NO: 7575 - DNA, 1249 bp, Oryza sativa
  Clone ID: PAT_MRT4530_14158C.1
ccggccggggtgtaaaaaaaaagaaaagaaacctagctccgcctccgccgccgccgccgccgccgccgccgcaactcgagcggcgaatcggcgatgccacccaaactgaggtcgtcgaagggggtggcgccatccccttccaccggcgagggtggagaaagccacacatcgaaaaagaatcccgctccggctacggctcccaccgccggaagtgttactcgatctagagcgagggatactactgagcgcgctagagctagtggcgggggcacggcactggatccgaagaagagaaagaggacagaagagtcagcggcgtcatcagcagcggcggcaggtccggttccgaagaagatgaccaccgccggtagtacgaccttggcctcccggccgctccctcttcgctacccgccttatcccaccttaccaccggggactcgtcctaccagcagacaatatttggatcccgtccttgacagaaaatatttggattccgttcttgagtgggccaaggagcgccgccggatcgccaaactctccaagaaagctcaatgtaaagatatccccactctcaggcattcgcccatggatcccatcactgcagatgccgtcgtcacatcacaagacaaggccatggtgctgcgtgtggctcgctccgttgtcagtgtttcatccacaatgcctgatgggggtggattgatttcccggtgcactggcgtcgtaatcggttgggatggggctaacaaacgtgccaagatcctcactgctgcttctgttgtttgtgacttccatggtgaattgcataacccagcactcaagctatccgtcagtatgccaaataagacaacaacagaaggaaggttgttgttctacaatgtgcactatggtattgctcttttggaagtcatgggagactacaagttggaggtcccttcttttggatcgggcacaaactacggtcaggtcatatttgcattgggtaggggtgaaaacatgtctttaatggttagccatggaacaatttcatggacagattaccctgtgttattgaggaaccacaatatgtttctgagctgtgatattcctgagggtggttcaggagggccggtggttgaccatggtggcaatatgattgggattgcatttgtagaaaatccgggtccggtctttatctctatcaagacaatcatgacttgcatggagatgtgggatcagtttagcccgtgtgctcgccccttgcttggcatgc

SEQ ID NO: 7576 - DNA, 684 bp, Oryza sativa
  Clone ID: PAT_MRT4530_14159C.1
atggccggcgatggcaccggagacgacgacgacgtgcatgcacgggtgaagtacaagggcgtggcgaggacggcggacgggcggtggcgagggttcatcaccaacaagttcgggaggcggtacggcgtcggcgaccacggcacgccggaggaggcggcgctggcgcacgaccgcgccatcctcgccatcctgggcgcgcacgcttcgccggcggcgctcaacttccgcgccgcgttcagcgacacggagctccggttcctccgcgggccgcacgcgccgtcgcgccgcgccgcgggcgtcgtcgccgcggtcatgcgcggcgccgcgttcgacgccgcgctcgagcggttcgcggcgcgcgcctacgacgcgcacaccgacccggagctcgcgctcgacgtcgccgcgttccgcctcgccacccgcgacgccggcacgccgctggcgcagccggacgccgagagggcggcgttcgtggcggcggcgaggaacaaggtgcacgacgcggcgtggctgaggagctacctgcggcggcggcggctggtcggcgcgacgttcgaggacgagaacaggtggccgcccgtggtgccgccggcggtggccgacgtcggcgacggcttcgccggcaacgagctggtgtacctcccctatggcagctgccatgtggacgagatgatgatctga

SEQ ID NO: 7577 - DNA, 465 bp, Oryza sativa
  unsure (1)..(465): unsure at all n locations
  Clone ID: PAT_MRT4530_1415C.1
caactcgaaatgcaagcgctacttccacaaccgcctgaagcctgccaagcttacctggacagctatgtacaggaagcagcacaagaaggtgcaacattttcatcagattcattcatatattggcattctctgcccatgcaatcaacaaattcccctatttctgtgcttacgtaatataaataacatgtttattttgatggtttgcatgaatttatttagtgtggcaagcacagtgtctagagttccataaacaacacgattgttccaagtggaaatgtgaagtttgattctgtatatcataatgtctttttgctggacacaatttcttgggtagcaagcctgtatattgcacgtcattgcaattgtgaatatcttatggatacatgcatatgtngtatccttgagccacatgatatgcagttatccaagtacatctatccaccctttgttcatgtgtatgctcat

SEQ ID NO: 7578 - DNA, 525 bp, Oryza sativa
  Clone ID: PAT_MRT4530_14160C.1
atgacgacgacggtgacgagcaacaaagagatggtggtggcggcggcggcgagcggcggcgggaggagatgtgtggaggacgacgcgtgcaggatctgcggatggcgatcacacaacgagagcttctgcgtcttcaactacatggacggctatttctcatctcgtagctgcagggagcagtgcaagccggggtggcaccggcacgccgccgccgccgccgacgacttcgacgccgacgagtggcggcgttgcttcgtccgcgtcaccaacgtggcggcgggcgtcgaggggcatagcctccggtggctcttccagcggttcgggcccgtacgcgcgtgctccctgtccagggaaggccagcccgccggcgacggcgacggcggcgggctggcgtttgtgacgttctacagcggcggcgacgcggaggcggcggtggaagggctgaatggccatctcgccggcgaccgtaggctgcgagtcgacttggcgtaccctcgcgtcgtggtgctcagtcatcatgcatga

SEQ ID NO: 7579 - DNA, 346 bp, Oryza sativa
  unsure (1)..(346): unsure at all n locations
  Clone ID: PAT_MRT4530_14161C.1
gtnaactccccctccctgaaatntggtcagcaaaaaggtacnctatggctctcntaattgaagcccaaaanaaccacttcccangaaggtcgcccccggcgaagaagaacggcggntgcaantncggcaccanctgctcctgcaccgactgcaagtgcggcaagtgaaatcacnaacaaccnaacactcgccgccggcgagtcacctaccttaattagtccncaatanaaaccacccncntnagtgtggtttgtgtgtgtctgantaatggcngaaattaaacccctgttgttntccattaattaagcanctggtcgcttccgcnactntgcgtnttttcaacgtt

SEQ ID NO: 7580 - DNA, 591 bp, Oryza sativa
  Clone ID: PAT_MRT4530_14162C.1
atggagatctccggcgggaacaacgacggcttgctgagcggcggcggctcgtcgaacacgagcggcagccacgatcccggccggcaggtgggctcccgtcatcgtccccgtccaccgcgtcggcagcgcatccacggcggcggcgggaagggtggggggtgcggctcctgtggcgagccccatcaggttccccctgccctgacgacctgctctggcccaggagagccgcacgccaagatcggcgtcgtggggcgcaaccagctctgtcgtcgtcgtccccgtcgtcgttcctgcgtggagcgaccatccggcaaccctcggccgcctccagcgttttcaactttaaatttggagttaattttgagggttttttatcgaatgcgacccattgggttcggactcgggctcgacatgattttggccggctgcggcgtcgatcgtccatcatcgcccatgccgtcgcgcgtgcagacggggcagggcttggctggcgtcgtcctcggccagctgcttgcgacctggaacccaattcaccggcagtggagcagcatatcaacctcctcaccagatgcaatccggatgcttaattag

SEQ ID NO: 7581 - DNA, 1209 bp, Oryza sativa
  Clone ID: PAT_MRT4530_14163C.1
ccttggcccaatgggggaatggtggtggcccttgcaaccccttggtggcttggcgcgccccggccctgccaaacccggggggcccccccccaaccccaacccccccccccccccccctgcctggccatgcctggcccgaattaccgcttcccgcgccgcccgttgcgtcgccatttggccgcccgccccttccccgtgccctttttaaacccgggcccttcccttttccatcccccacccctcccccccctttcccctccctttcctccttttccacggattgccgccattgtgccgccgcgcccccgccctcgggcggccgggccgtcgccccggggccccccccccctgcggttgcccccttttacccccgttgcccccccctccgttgccgccccccccctcggttagcccccccccccccccccccccctccgtgcgtgctgtcgccaccgccgcctcggctcccgcgctcgtgcccaatgccacctccacaccggctcccacgcgccggcactcgcgcgtcgccgccaccccagctctcacgcgccgctccatacacccctcgccacccgctgccgcggaggatcccgtcgacctccgcaagctccgccctcccattctctcctccaaccccctctccactcccccctcccctcgtcacgcctcgacatcaccagccgccgcgtcctcaacttccggttggtcaagccgccactgccactctgccggtctactccgcccgccgggctccgctcctcctccagccacctccgctgtcaaatcccccgagtttgtagcccccacacccccacgtccctcagcaaccgccgcccccactcgtctctccccccacgcgcgcgcgcgaagcatcagcatcagcagcgacgagtgtcagtgagagcgcgcaaccgcctcgcctcgccgccgcgcgcgcccgcgatgtccacggcgacgacaaggctcggcgtccgccgcccgacacccgccccggtgttcgacttcgaccgcctcctcctcggcagccgccaccaccaccaccacaaccaggccccccggcgccgccaggatgaacagcaccgccgagatgctccaggccgccgcccgccacgtccgccgagaactccgtaggtggagaatggagtagtatcattcttgtataattttctgaattggcatgctcaggataaaagaggtttggaattttat

SEQ ID NO: 7582 - DNA, 161 bp, Oryza sativa
  Clone ID: PAT_MRT4530_14164C.1
cgcatgtcacaacgctgtcgagatgtgttataggaatataggggccctatacccatggttggtgtagacgcggtgtgacgcgaggataattatgggttcgaatgttcccgcgagaagggagacctgagagaacgcgctcactcaccactatcccaggagag

SEQ ID NO: 7583 - DNA, 459 bp, Oryza sativa
  Clone ID: PAT_MRT4530_14165C.1
atggcaagggaggcaaccaaggccctgcaagagaagcagaactatccatcattgtccgacaacggtggctctagtggcggcggaatcgcagatcagaagagttacctcacgatcggatacatcagtcgaggcagcggggaggaggaggaggagcgagcgaggaagacggccgcggcggtggggaagaagcaggacccggtggcggccccggcgaggacatggaggagcggcggcagcggggaggagctcctgcgaggatgcggggaggaggagcgagcaagcgaggagaagcgcagtcttcgcggccacgggtggaggagtagcgaaatcttcgcgcgtggaatcctcggctgtgaaatcgtgcggtggagaaaacttgcgcgcggatggactgttcagattaatccggatgatttggcctgtagcattggagggggcaactcctcctttttatattaa

SEQ ID NO: 7584 - DNA, 783 bp, Oryza sativa
  Clone ID: PAT_MRT4530_14166C.1
atgtgggtcccacatctcctctccaagggaggctgccgccggcggcaaatgtcgagccggcgagcctggccaagctccaccgctgccgctgcactgatgcacacgcgctcgaccggatttgggagcgtcccactgccacgacagcggaggtggctggaggaggagcggagcccggcgggcggagtagaccggcagagtggcagtggcggcttgaccaaccggaagttgaggacgcggcggctggtgatgtcgaggcgtgacgaggggaggggggagtggagagggggttggaggagagaatgggaggcgctcgccctcaatctcgacggtgccgtcggcggtgagcacagagtccacgcaggcagtcgggtcacgacgccatcgactgtggtggtggtggtggtggttgtcatcgtcatcgacggtgtcgcgacgctgtcgtggctatggcttcactcgctgccatcgccatccccatcgtccaggaacctcgcgctgcagaagactgacatgacgaggaagctgtgtgcgagcgcgacgcggagcttgcggaggtcgacgggatcctccgcggcagcgggtggcgaggggtgtatggagcggcgcgtgagagctggggtggcggcgacgcgcgagtgccggcgcgtgggagccggtgtggaggtggcattgggcacgagcgcgggagcttcgcgtcagtggccatggctcccgggctcatcggcagcgagtgaagccgtagccataaccaccggcggggcgaagcgggagaggaagtggtag

SEQ ID NO: 7585 - DNA, 160 bp, Oryza sativa
  Clone ID: PAT_MRT4530_14167C.1
aagagtacataaactaaataaatagtttcgatgggatgatcgatatgtgtgcatgatgcgtaactaattgacaaacacaaacatctaattataacgcggtgtaaaatcgattttttaaattatgtgtttcccagaaacccccctctcaactgtgggaaca

SEQ ID NO: 7586 - DNA, 1218 bp, Oryza sativa
  Clone ID: PAT_MRT4530_14168C.1
ggggggaaagctgagcgattgtggaagagtttataacagacatcaccgtcgaggattagttctgacccgcataaagccctttgaaagtgggccgtagggcgatttcccctaacccaaaaagccaaagattcgccgtgacgggcgctatggaggcgcggttcactttactgcgtaaggtctgctcccgccttatctgccgcgacttggtggaggaattctgcatgcttcgcatctttcccctctcccagtcgtagcaaatcgcagttgagcaaggcaaagaggttgatgggttgccaaagttggttctccctgaagggacgaacgtgttaacccttgaccaggctgacgccgaagcctgtatgatgatcggcgacgtgtcggtcgtcgagtatagacagctgctaacagaacaagcggatggccgtgccaaccgggtttactacggcgaactgcctactcgggcgaacccctacaaagcccacgaccatgcaggacctgggtgaaacctaacgcgcatactagtgaagcttgcgcccaggaaactaatggttcctgtttcgtccgatttcgacgccgacgacgaggactacgtcaaagaggaaggggaggaagaagatgaggttgacgtcccaaaggcacgggatgaggcggtcgaaaaccgcgtatacacccctgggtatgctcctacttcaagcacgggtcacaatgacaccggagtggagtcgaacagctgcggactccggttaaaagacaaggatggggcgaaagctctaattgctatttcggcacgcatagaggctaagggaggtacggtcaaaaggagtttcatgagagaaagagttgtccgtgtacaattgcgcacaacatacgacgcggatgcttacaagactacgcttgggctgctgatcgagagacctaacttaaattcagtgcgcgtgcgttcactgtgcgctcttagagcaggaaaccattgccggccactgtgcttaatgatatcggcaaccgaccgtggacagtggtgtgaggatttggggcctttccactgtctcagggaatatattccccgttctcgagaggtacggggaagggggcgggaataactcatttaaaggcgagaattctgttttcccaccacctagtgtgccaggccgataagagaactgtgccgaaaggcttccctttatagagggggtggcgccccaaagagtgggggaaacc

SEQ ID NO: 7587 - DNA, 345 bp, Oryza sativa
  Clone ID: PAT_MRT4530_14169C.1
atgataccgacgaggtcataatcgaacatgttcgattagatctcccggcgacttggctcctgtaggcttcaactttgtcggctgtggtggatgtgttggctatgaaatttgatgccttaggtcctcccgggggatcccttttatatcgcaggtcaaccggtctccaagtaggactcggagacatcggacccggcacgatacaatgacgacccagttctgtccgagtaggactccttccatctaagaactccatgatgaatttccttaacgtatgccgaaaacgtccgtatacgcgcgagtataccatatcgatatgtgacgtatatcgaagggtagagggtatac

SEQ ID NO: 7588 - DNA, 317 bp, Oryza sativa
  Clone ID: PAT_MRT4530_1416C.1
aagtcccggccatcgtcgttgatgtcgctttgcttatcgaggacggtggtcgtagcagtgggagtcgtggtcgacgatgaggcgtggcgcggcggtggcacgttcccgtcactggctgcgccccctcgatcggttagggtttgtggggtggagtggcggcagcgatgaacctcgtgtcttgtgccgtcccgtcctccacccctctttatatggcacagtgtgacgggggcccaccagccattgggctgggcacccccgatcagggcgcaggtcaaggccctcttgagccattgggctcaagggaagggagatctatc

SEQ ID NO: 7589 - DNA, 348 bp, Oryza sativa
  Clone ID: PAT_MRT4530_14170C.1
atgataccgacgagatcataatcgaacatgttcgattagatctcccggcgacttggctcctgtaggcttcaactccgtagcctgtggtggatgtgttggctataaaattcgatgccttaggtcctcccgggggttccttttatatcgcaggtcaactggtcttcaagtaggactcggagacatcggacccgacacgatacaatgacgacccagttccgtacgagtaggactccttccatctgtgaactccgtgatgaatttccttaacgtatgccgaaaacgtccgtatacgcgcaagtataccatatcgatatgtgacatatatcgaagggtagagggtatacctta

SEQ ID NO: 7590 - DNA, 492 bp, Oryza sativa
  Clone ID: PAT_MRT4530_14171C.1
ataagacaaatggtcaaccgtgtgaatataagttaatggcgtcatttattaaaaacataggtagtataaattgtttctgtgaaaaaaaaagaaatactacggtggtcatgtatgtaacatatgggcaacttcgtattaatgtttagggtataccctctacccttcgatatacgtcacatatcgatatggtatacttgcgcgtatacggacgttttcggcatacgttaaggaaattcatcatggagttcacagatggaaggagtcctactcggacagaactgggtcgtcattgtatcgtgccgggtccgatgtctccgagtcctacttggagaccagttgacctgcgatataaaagggaccccccgggaggacctaaggcatcgaatctcatagccaacacatccaccacagcctacggagttgaagcctacaggagccaagtcgccgggagatctaatcgaacctgttcgattacaatctcgtcggtatcat

SEQ ID NO: 7591 - DNA, 673 bp, Oryza sativa
  Clone ID: PAT_MRT4530_14172C.1
gtccggcaagcttcaacgatcagcgtacgtacgtagcacgagctagcgagccgtcgacgccgacgagttctcgatcgatctccatcgccggagattatatcgaacaatggcgatgtcgtcgtctcccgcctcgccgccgccatccttcctgatcggcggcgcccaggcccagctcctgcgccaccgggaggaaatgctgcttgttcttccctcccctccctccggccggcagctgccatcggaggaggaagaagcagcaccatgcgccgtcaatggccggagtacgatccttgccgccgccgatgattccaagccaacgcggcctggagcgccggcggagggctccggcggcaacggcggagcaatccacaccgctgcttcttcctgatccatcgcatcgtctcgtctctgctgttgatggtagagactagagagctatctatcttggaagagatgataactcaataattaactggcatgatccattggaggagagggatcaacagctaaataattaagcatatttgagatacattagacagaaattcagaaaaagattctgaattctacaatcggaagagaaataaagctgaaactatattggtgtagcttccacggcctggtgaatgttgatatgtttctgtgcattttcttttacaaaaaaaaaaaaaaa

SEQ ID NO: 7592 - DNA, 2162 bp, Oryza sativa
  Clone ID: PAT_MRT4530_14173C.1
cgttaccgatcgtttttttatataagttaataaaatacataattgtcaaaataaattatcatattacaacaaccttacagaccaaatcaggacatgaaagtccgaatcatttgataattacaatgtccaacatctttaggatgcttaaagagcacattgaagacaacacaccaaacgaacagacaaagggccaaactatactggactgaacccaccatctagctagttatagaacattacatgcccagatgttaaagatactactagagaaacaagttgggccaactaattagagatcagatagtgctactgataactcttccacagttcataaagcatagatttctactcacaagaacatttaatagatggttttataatggcacactttacacaaccatcgaatttacttctcagagcaggaaagcaaattcagttccatcaattttcttgaaacaaatcttcaaattattttcaccattagtcaaaagattccagcatcaccttcataaccttgtatattgttcaaaggaagtaactgccaaaagaatcatctaccatagaaactttaggatgggccttttagctactacataaccatctccatcttaactgataaattagctttccggaagtaaacaagttaacatcaaaattctgtgagaactatgaccatgtttaaatgttctgacaagattgactgatccatgaaccatagcaggatttgacttaacagcaaagtaacaagcagataaatttcctccaaataacatcattcacttgttagttttgatgagaaaagaagtagcaccagtcttgaatggaatggagaaaccatcttatacaccaatgtctaatcctagccatgaccaattcataccacaggcttcagtttctctggtttcaatatgccaaaaaatgttcataatgcagattaagtggtcggacaatcgcttctaatggaagcaaaccaactacacaatattaacatattgaaaattcaattaattgcaattagtcataaccctaaaccaaagcattaaggttcctacaaactaacaccagtgaacatgaaaataacgggatttgtacctcaaactgaacaggtcaagcagcaagtaatctgtagttcctgtactacgataaaaataatccacagggaaggcagtcaaaaagagctccttaaatcctcgtgaaagaaatccagaagttaaactttaactaagaactgacacagaagaacaatactgaagaatcttccaacaccctagtttaactcaaactttagcactctttcttgctggaatttaacaaattaacagcggtgatttgaaagctctgagcaaacctaagaaagccaccacgatcatgtttaaatgttctgatatgacttgaccttatatcataaaaaataccagatctgaaggaaaaattgtatataattgtaagctgccgaattgtctcgaactaccaagcatcacaaatgcacaaacttgaaaggaacagaacaataatcaacaataatcttaggccagtgagcaatcctaaccattgaccatttcagagcacaaacttcattttatctatcatacccaaaatatccacggtacagcttaattaagctgacaatccatctcaccgaacagaaagtgaagcaaaccaaccgacctcgcaatcagtattgccagaacaacaaatcacgattagccataaaccaatcgaaagaagggccgttgagagaactaacgcaacagcaagagacgaatcgccgaaactagacccccaaaaccgaacggatcaagcagtcaccgaaactagaaaccggaccgaaccgatcaaagcaccacctgatgatcaaatcaacaaaagggcagcgaaccaggtgagatcgaaaccgatggatcccttacctaccgacttaccagcccagcccacccgcggcggagggggaaaggggaaggaagaaataacccgcgcgagaagaggaaggaagccatcgatgacgccatggccccgtgtccaacgacgaaaaagcagcgaggatcgggctgcatttatagaggagcggagaaggagaaccacacgaggaggaaaccgagtcggtgggctggggcccggttgcgagcaggaatcggtggtcgcccgcctattcttcctcgtgc

SEQ ID NO: 7593 - DNA, 486 bp, Oryza sativa
  unsure (1)..(486): unsure at all n locations
  Clone ID: PAT_MRT4530_14174C.1
cacgcgacgaccaagtggaggaccgccgcgcgcgccggcgatcgactgctcgatcgccatggatgctccagttattacactcctcgtcttcctcgtcgccgtcgctgcggcaactgcgncggcggagatccncggctggagcacccgcacaagggcgacgggtcgctgagcctcctcnccgtcggcgactgggggcgcccgccggcgcgtacaacccagtcgatggtccccgcgccaggtaatcgattgattttgattgattagttgccggtgatgatttcgttttgctaaatgtggctagttaattattaatggcctaattactgaaatacctgtaatcaatgtggttaaggtagaagaaatccagaaaacgaggagttgttttggaggctatgtggaattgtaaattaagctcatgtttagtgctctcttgtttttttaaggaagaaaacagagtgtagtatctaaaaaaaaaaaaaaaaaaaa

SEQ ID NO: 7594 - DNA, 551 bp, Oryza sativa
  Clone ID: PAT_MRT4530_14175C.1
cccacgcgtccgcagaatccaaccattataaccacccaatatcgaatccgggaccgggaaataagcagcagggggaataacataggatatagtgatagcgcacacacactatatcatagcactactctcttcttctgtaggagagagcacacattttcaagaaatgccttgagcttcttccatctatttctctgttatggcactggtggtcatagttgttgtgcagcctccttgcccttcattatgctctttgtcgctacttccgttgctccttacgttctcgttccctattatcatatatttctcctcgtgctgcttcgttctttctctctcccttccattccttccttatccttctctcaccttctccttccttttttgtccttccttctttcttcttcttcttccttttcctttttctctctttttcttccctcttttctcttttcttcttctctttccttctctccctttcttctactttcctttctttctccattcctctctctttcttctttcttcctccttctatctttttttcccccttttct

SEQ ID NO: 7595 - DNA, 496 bp, Oryza sativa
  Clone ID: PAT_MRT4530_14176C.1
gaactagtggatccccgggctgcaggcagaaggtggagaagatcgccccggtctacaacctcgtcaccaagccctccgtctacggcgccaaccggagggcgacgacggtgaaggcgaggccggcgaccactgccgtcgccgccggcttcgccgggagcagcaacagtaggcagccggcgccggcgccggcgagctggccgcatggatcagtggtcaccaaggagttcatcagcaagtacatcgaggacaagaagaggcagtttaatcaaggagacgaatgagcagtaaactcagattaatattatcagttgatcgatcagtgcaatattatcatgtaatatttagtataaatacagctacatatctacataagaagatgctctacttattagttattatgtgttaattagaaatgcatatatgtaagtattccatgagagtagaactcatgaatatgtatatctagcttccagatggagttgtttataaagtatat

SEQ ID NO: 7596 - DNA, 450 bp, Oryza sativa
  Clone ID: PAT_MRT4530_14177C.1
atgatgaagaagtgcccgtcggagctgcagctggaggcgttcatccgggaggaggccggcgccggcgaccgcaagcccggcgtgttatctcccggcgacggcgcgcagtccagccagcagttcaatacagcggtcacggacaacaggatcctcaaatcggatgtagaggccttaagagtcaaggtcaagatggctgaagacatggtcgcgagggccgcgatgtcgtgtggcctgggccagctcgggctggcgccattgctcagctccaggaagatgtgccaagctttggatatgctcagtttaccacggaacgatgcctgtggtttcaaaggcttgaacctgggtcgacaggttcagaactcaccggttcaaagcgctgcaagcctagagagcctggacaaccggatatccagcgaggtgaccagctgctcggctgatgtgtggccttaa

SEQ ID NO: 7597 - DNA, 729 bp, Oryza sativa
  Clone ID: PAT_MRT4530_14178C.1
atgatgaagaagtgcccgtcggagctgcagctggaggcgttcatccgggaggaggccggcgccggcgaccgcaagcccggcgtgttatctcccggcgacggcgcgcatgaccccaaaccaaccacctcagcgaaccacgcgcctgaaagcgactcggactccgattgcgattcgctgttagaagcagagaggagtccacgcctgcgtggcacgaaatccacagaaacaaagcgaataagaaggatggtgtccaacagggagtccgctcgacgatccaggaggagaaagcaggcacagttatctgaactcgaatcacagcaatccatctatgatcaggtcgagcaactcaaaggcgaaaactcatccctcttcaagcagctcacagagtccagccagcagttcaatacagcggtcacggacaacaggatcctcaaatcggatgtagaggccttaagagtcaaggtcaagatggctgaagacatggtcgcgagggccgcgatgtcgtgtggcctgggccagctcgggctggcgccattgctcagctccaggaagatgtgccaagctttggatatgctcagtttaccacggaacgatgcctgtggtttcaaaggcttgaacctgggtcgacaggttcagaactcaccggttcaaagcgctgcaagcctagagagcctggacaaccggatatccagcgaggtgaccagctgctcggctgatgtgtggccttaa

SEQ ID NO: 7598 - DNA, 2410 bp, Oryza sativa
  Clone ID: PAT_MRT4530_14179C.1
gtcggaggaaggcgatgatgaagaagtgcccgtcggagctgcagctggaggcgttcatccgggaggaggccggcgccggcgaccgcaagcccggcgtgttatctcccggcgacggcgcgcgtaagtccggcctgttctctcccggcgacggcgagatgtccgtgttggatcagagtacactggacggaagcggcggcggccaccagctgtggtggccggagagcgtccgtacgccgccgcgcgccgccgccgccttctcggccacggccgacgagcggacgccggcgtccatctccgatgaccccaaaccaaccacctcagcgaaccacgcgcctgaaagcgactcggactccgattgcgattcgctgttagaagcagagaggagtccacgcctgcgtggcacgaaatccacagaaacaaagcgaataagaaggatggtgtccaacagggagtccgctcgacgatccaggaggagaaagcaggcacagttatctgaactcgaatcacaggtcgagcaactcaaaggcgaaaactcatccctcttcaagcagctcacagagtccagccagcagttcaatacagcggtcacggacaacaggatcctcaaatcggatgtagaggccttaagagtcaaggtcaagatggctgaagacatggtcgcgagggccgcgatgtcgtgtggcctgggccagctcgggctggcgccattgctcagctccaggaagatgtgccaagctttggatatgctcagtttaccacggaacgatgcctgtggtttcaaaggcttgaacctgggtcgacaggttcagaactcaccggttcaaagcgctgcaagcctagagagcctggacaaccggatatccagcgaggtgaccagctgctcggctgatgtgtggccttaagacacttcatccgtgttcgagagagcttgagattctaagaagcagccggtgagaatctgaaaaggctagttgttcagtttcctatttttagtttatgtttgaattctctggctactaatgctcaaaatctgggagagaatctaaatcgtttgggacagataaaaaattatgcgagaaggtgtagctgacagaaaccttcccaaacaaatctccatcagaacctatatgtaaagtaatacggtatcctctgttactaggtgcatgtgcataactgacaagctgctaagtactaggtactacagtctgaggcaagtatttctggtgttttggtgctgaagaactatgttttagtgcgtttgatctgcggcaatcaaggccatctgatcgaaatttgattggtataaatctgatcgaaatttgattggtataagtataatagtttgattttgatcaactctagtcgtcagcgcctttggtgtatacgctctgtaacatctgttacgaattgatctgttcagtatacttcaacagtcctgcattggttcagttcttggcgtagctctggtgcttctggtgcgcatagcatcggtgtgaaatgtgccacttttcatggcagttgtaatagtaaacgactgcaaaattacggtgtactataattcctaaacaaatatgtgacaattacgatgaaaattatcactaagatgttattaccattatttttcgtacacaaatctcttaatttttacaaaatttgttactagcatgtgaactctctaatcccacactatccttattctttttcaagaaaagtacggttggtggtggggatggttgacatatggatcctctggcctcacatgtcctttccctgaaagttggtgatgggatggtgacagattaaccactcaccatcaccattgtttttttctttaaggaatatagattgaatacataagatttaagatttatggggaaaagtatagttcgccaatcttcaagatggttgtgtacaactgattttccaaagttttagtatgccccgaaccaatgaaattcgttcatctttttttagcatgtcggaaatgatgtgaaaattgcacttacacttgaggttttcttgtggatacaaattgctcaacaaaccatattaagacctgaaactataacatcaatcattagtacatcttttaggttattcaaaagcctgaacaaactgcatagtatccccaaatcccatttgccccatccgcaaaacaaaatgagcggcaatggataaatggaaacgaagctagctgcgaaaggagttaaattaagctccccatttaataattgaccaaggttccaacctacgtccaacaacaaattttatataatactcccccaatcccagtgtattccaaaggatttcaaataaatgtccccttagttcccaaaaaaaaaaaaaaaaaaaaaaaaaaaaaaaaaaaaaaaaaaaaaaaaaaaaaaaaaaaaaaaaaaaaaaaaaaaaa

SEQ ID NO: 7599 - DNA, 2298 bp, Oryza sativa
  Clone ID: PAT_MRT4530_1417C.1
atgcaggagccgcagcggattcaccgcgacgccggcggctatcccgctgccgccgccgagaccgaccccctcctcgcgcacccgccgccgccgcgctcgccggcggagatagaggacgaggagatagaggacgaggagatcgaggccgcctccgccgcctgctgccgcatctgcctcgagtccgagaccgagcccggtgatgagctgatttctccttgtatgtgcaaagggacgcagcagttcgtgcatcgctactgccttgatcattggaggtctgttaaggtcattgctgctatcggtgcgactcgaccgtcgaacgcggccgcgccgccaccgccgccgccgcccgccgtcgccgtcgtgagcgccgccaaagcgatgcgccttgcctcccgcgcctctctacgccgcgccgccgccatgtccgcttactacaacgcccgaggatccgctcgcccgcgacgaggctactactccgggcgacccacgccgcctccccaccaccaccacgacgccggcgccgagctcgtcagcggcgactcccaccacagcgcggtgcgtgcctccaacgattcgctccgccgcggcggcggccgcgggcctcctccgtcgctgtacggatacgcgccgcctcagccgccgccggcgctatacggggccgtgccgtacaactacggccacccgcagcagccgggcccgccctacggggccgtgccgtacaactacgggcccccgccgccgcagccacaggatcctcagtacggatacgcgaccccgaatccgtatgtccaggggcatccgcagccgtactggcgtgggccaacaaatgcagggttccggccgccgtacgccggcttcaggcctggtgcgccgcagcaatcaccaaggctagcggagtaccgccgacggtggcgattcacgcagcatcggccaccacgccaagccgagaggtttaaggttctatcatacaatatactagctgattatctggcccaggagcaccagtttctttatgagcgcataccatctttcatcatggattggaactggcggaaggaaaagttagtgttcgagtttggtttgtggtctccagatattttatgtcttcagttgcgctatcaagaggatatcgagttcaataagattgatctccgtgataatgttgcacagatttgtgttttagagtcggtgattccaggaaatgtgcaaactgagtctaggctttcaaaatcgcattcatgttcaaatgagcttggaaattgttcttgtgcttttgaggatgatggggcatccaatgaagttttgtgctcagatgtgaatgcagatccttccatctttaaagagttttctggtgttaatgaatttttacttgaagatgaagaccagctgcaaacaacctcagatggttcaccatctgcccagcaagtgattacttctgataaaagatattacgattatgatccatacaggtggacaccagatgaaattaaagctgctactgggaatgaagattgcaccttcgtggaacataatttgaaagtccgaagtgtctacacagatgtggaggattttgaagggacaaaagatgccaacaaggagcctctagtaacaagttacaacagaaaatttatgggaacagtggactacatatgggcttccgaagatctgcagactgttcaagtgctagataccttcccaaaagaaattctgaaacaaacaattgggttccctaccaaggtatcaccaagtgcatcccgcattcacgcgcccctcctgcctaacccaccaccgctttgctcctcctccacgcttcgtccgccgccgccgccgccgccgccgtcgccgtcgccggcgaagatgatgtctggcggtggctactccgccctcgacgaccccaaggcctccggatccgtcccggcggcgacggggccagatccgccgaccatcaagttcgccgactccaacctccagatcttcccgccgtccgaggccaagggcaagatctccggcgcctaccgcccgcccaccgacgcggatgacacgttctcttcctccaagtccgggggcggcggccgaggcggcggcggcggcggcgctgggtcggacgacgccgggcagggcgggtggttccggatgttctccgtcgcggcgtacaagccctacttcgacgtggacacctccgacgtggtggagaggatctgggagtccgtcttccccttccgcggcaccttcaccgagaagacctccgagaaccccgacctgtatgcctctccatcgcctaactcctccttaccttag

SEQ ID NO: 7600 - DNA, 360 bp, Oryza sativa
  Clone ID: PAT_MRT4530_14180C.1
agacagtgcattctcttatcatagacgacaagtaacacaagttacatctcagtagcttgcccaaaagctcccaaagctgatcatgaatagtgtaaacaaccaagggttcccctacttgatttaatcttaatatggtcagaaggatatctaattgccataaacggacagtggtttaccttaagtttgtacagaaaaagcatgactatatacatgctctagttactgaagactaacattttaatactagtgtcggattcccgttttctatacaaaatgcatcacccggatgagacaacactttcatctagcagacaaacctgaatataaacaagttttaatggaagaaaagctaactgattt

SEQ ID NO: 7601 - DNA, 593 bp, Oryza sativa
  Clone ID: PAT_MRT4530_14181C.1
tccgcaaaaaaaaaaaagaaacataaaaaagaaaaaacaacaacaaaaaaaagaaaagaacataacaaaaaaatgacaagacctacaccccaaagcttacctgacccctctccattactggaaaacctgcttgggattggcgtcgccactatttacgaagcgaagtgtttacccacccgggggggggggggggggaggcacaggtgcccatcaaagcaaatctgcttgggcgtgtaatcatcaacccaagtagtggaaaacccatggggcacccaaactgatctgctccctggatatatcccctcttgtcccatgtgggtgcatataccagagggggcccgccccgttcgcccttcccaaaagttgcccaccctaaaggggaatggggcccccccctttaggggccctttaagcccggggggtgggggggttcccccccgggggcccgttccttttgccggcccctaaggcccccttcctttggttttttgcccgtcctttttccccctcttgcccggttttcccctttgggttctaaattggggcctccttttggggttccgtttttgggtttttgggccctttccccccaa

SEQ ID NO: 7602 - DNA, 411 bp, Oryza sativa
  Clone ID: PAT_MRT4530_14182C.1
atggcagctggcacgacaggtttcccgactggaaagcggcgcagtgagcgcaacgcaaattaatgtgagttaggtcactcattgaggcaccccaggcattgtacacatttatgcttccggctcgtatgttgtgctggaattgtgaccaggatatacagttgtcacacaggaatacaagctatgacccatgattacgcacaagctctaatagcagacgtcactatagggaaatgctgggtacgcactgcaggtaaccaggtgccaggaattgcccgggtcagacccacggatccagttttttgttgtttaaagatgtaatgtccaaagttcagcacaacattatgtactattaactgtcgtttatgtggaagtccgcaactagtttggttttgcctccaaaaaaaaaaaaaa

SEQ ID NO: 7603 - DNA, 416 bp, Oryza sativa
  Clone ID: PAT_MRT4530_14183C.1
gttcttactaggattcaaccgcgactacaagcgcaccggcattacctacatcgacggcaatggcgactggcacaagctgagcaagggcgcgccagagcagatcatcgagctctgctacatggccgtcgacgcagtgaatgaaggttcacgccctgatctacaggtacgctagatcgggggctccggtcgctcggattgtcctaccagacaggtgccggagaagagcaaggacagcagcagcgacaccgaggcagaatcatcgggctggtgccgttgttcgacccgtcgaggcacgacagcacggagaccatccggccgacgctacacatgaggatcaacgtcaagatgatcaccgaggaccagctcgccatcgtcaaggagacgatgcggctgctcaggatgggcaccaacatgta

SEQ ID NO: 7604 - DNA, 304 bp, Oryza sativa
  Clone ID: PAT_MRT4530_14184C.1
gggacccaaacaaaaaacccttctttattaaaacccaaaacattctttaaaagagtagtaaaaaaagaccatagagcagcagcagattaaagccttgaaattttcaaagcagccaagagaagaaaaaaggtgaagactttttggggccaaccacagtttaggtcaaagctcactttcccatgggggggggttcgttcaatcctggaacatgggcccggggggggggcaggggatctgccatggccggagcaacgggtcgctgggggggcactcccccgggatgtccagggggacccccctaaac

SEQ ID NO: 7605 - DNA, 164 bp, Oryza sativa
  Clone ID: PAT_MRT4530_14185C.1
cacgctctgccggggctgcccatggaggtgaacatgcgccttacgagggggatggggggcgtcccgccgatgttcctcgccggggacgaactgcccgtgatggggaatacgtcgcacccggtggaccgttgcgggtgggaaggacaacgacgggtcggtctact

SEQ ID NO: 7606 - DNA, 748 bp, Oryza sativa
  Clone ID: PAT_MRT4530_14186C.1
gtgatgaaagagatacaagctgaactagatgcaaagaagctagagtctgcagtactttcaggaggagcttgaaagattgaaggcgcaggcacaagaatctgatgcgaaagtggaaaaacaagctgaggagattgagagcctgaggaagatggcagcagatactcagagcctccttcgacaaatgatagcatttggacagggtcagatcagtcctccctaagctagttgtatgctcaggaatgaggtggatgagcttggaatttgatggctggtgttagtgtagttgaacttggtggtgtatgtggctgctattgtatggtgtatgttgctgctagaacttggtgctagctgctggttgcttgcaagttggcgcttttggtggccggagttttttttttcgttggttgctggaacataggattttttggcactagttgttggctgctgcaggatgcagtccagaagtgtagtgggtgcttggtggaatttttttgctggctattggcaagatgcaggctgagacttagtagtggctgctaggtggaattttttggtgccggaacttggcactacctgtagtaactttggtagtcggctgggacttgtgtagttcaatggtggatggatcattttgtattcatgttctgtgcttttgtatggaacatgttggaaactatattctggaacttgcttttgtatgggctggaaaattaattatggctggaatgtgattataatataattatgc

SEQ ID NO: 7607 - DNA, 138 bp, Oryza sativa
  Clone ID: PAT_MRT4530_14187C.1
atgggaaacaagaaagcaaggctcaaaagtgaatctcaacaagagcaagccaagggcacaagaatatccaatgtgaccagcagccctcacaaaagcaaaaacatcgttctggatgttttcggaaaagtccgaaaatag

SEQ ID NO: 7608 - DNA, 1584 bp, Oryza sativa
  Clone ID: PAT_MRT4530_14188C.1
atgaattctgaagaaaacctgaagaaaccaggggagagcaaaggctccgtgccaacgtgcccgcggggaaatgcctcagccctcagccatagaccttacctcatggccgtcgtagcccctccttcccttgcccttccccaacctcctcagaacccaacccctaaacctcgccgccggccgccgcgagacgtcgcctcatggacgtccgccatcgcgcgcccggcgaagcagggcgacctccccgcggcggccgctgcgctctccgccatgctctcctcccccgcggcgcccgtccccaacgacgtcacccttctcaccgtcctctccgcctgcgccgactccccgtcctccccgctcgcccgccgcctcgcgctctccgtccacgcccgcgtgctcaagctcttcccctcccacctcctcctctccacctgcctcgtgcgcttctacttcgcgtcccgcttgccccacctcgccctccagctgttcgacgccatgcccgtgaggtccgccgtcacctacaacacggtgatctccggcctcatgcggaacggcctcgtcgccgccgcgttcgaggtgttcgacggaatgccggcgccggataaggtctcctggacggctctcatcgacgggtgcgtcaagaacgggcgccacgacgaggccatcgactgcttccgcgccatgcttctggacggtgtcgagccggactacgtcacgctgatagccgtcatctccgcgtgcgccgaggtcggcgcgctggggctcgggatgtgggtgcaccggctcgtggtccggcaggggctggagcgcaacgtcaggatagccaactcgctcatcgacatgtacgcgcggtgcgggcaggtggagctcgcgcggcaggtgttcagcggaatgaggaagcggacggtggtctcctggaactcgatgatcgttgggttcgccgccaacggccggtgcgcggacgccgtcgagcacttcgaggcgatgcggagggaggggttcaagccggacgccgtgacgttcaccggcgtgctcacggcgtgcagccacggcggcctcaccgacgaggggctaagatactacgacctgatgagggcggagtacggcatcgcggcgcggatggagcactacggctgcgtggtcgacctgctcggccggtcggggcagctcgaggaggcgatgcgggtggtgaccaccatgccgatgcggccaaacgaggtggtgctcggcgccctcctcgccggctgccggatgcacggggacgtcggcatggccgagcagctgatgcagcacctgctcgagctggaccccggcggcgacgccaactacgtgctgctgtcgaacatctacgccgccgtcggcaagtgggacggcgccgggaaggtccggagcctgatgaaggcgcgggggctgaggaagaggccgggctacagcgccgtggagatcgacggcgacgtgcacgagttcgtctccggcgatcggtcgcatccacaggcggaggagatatctcagatgcttgggttgctcatgcatgagatggcagggcatgattatgaccatgtaatcgattgcttggatgggggatga

SEQ ID NO: 7609 - DNA, 1295 bp, Oryza sativa
  Clone ID: PAT_MRT4530_14189C.1
tttgcctgttcctctgggcggtcggggtcattctctgttctcacatggcatccaactccatacggtccggctcgatcaccctcctttgcagcgtcagccgaccgacccgcgcctaccgcctcacgggctccggccacatgtcacttgttacgcagcgcggcgagccattttctcgcttgcgggtgcgtatcggccgtcccccctgcctgctctgtatgtccctcgcctcccctcagagggcggtgccggcgcgtggcgttgcggtccgcgggggctcattgctggatttgctttggttgttcttgctgcttttcataatccccaagcctcttcagccatcgcaaaccgagatcacatccagcttcagctgcaatttgaaactgctcctttgctagcttcactggatcctgctgtatgggcctttttcgcatctttccagttgatggactcttacctgagttgaacctggtaataacctcaggcacttcagcaccttttaatagaagtgatccatatgcaattgcagctccagagtgtcccttttctgatgctctgtggaaacaccacattgctgaagctatatccctcttaacacagtctccagttaaatatacagcacctagaagatacaaagcaccagggtgcaactggtcaacagctttctcaatgtaataaaaagcctgttggtcagagtgaacgtagtcattctcaattctcaaatggcatccaagttcatactgtgcatctggatcacccatgtttgcagcttcaaccaacagagcagcaccactcaaaacaacaatagaagcagtgactaagctagcttttgcaatgtgcttgcaggttcttggaataagaatgaataggaaataagaaaatgaccacgatgcaaaagctccaggaacatgatacttgaaatgcatcttggcaagccataatctcgcatgagtgttcatattgtcgatctccagagccagctcaaaattttcctttgcacccctgagaagtgggatcaggcgcttgtcgttgcggtcggcgtagtcgatgacgcgatcaacctcctgcagggcgctccaccccttggccaccaactccatcgccttcttgttccggtcatggatccacctctgcggattcagcgcgtgggcgagctggttggcgagcctggaatgggaggacgacgcggcggcggcggccgccacccgccgagccgacgccgcgagcatcgcggcggtgcccctccccttcctccgcaaaccccggctgagctgcgccgccgtaggtttgcctcgtgc

SEQ ID NO: 7610 - DNA, 3071 bp, Oryza sativa
  Clone ID: PAT_MRT4530_1418C.1
atgcaggagccgcagcggattcaccgcgacgccggcggctatcccgctgccgccgccgagaccgaccccctcctcgcgcacccgccgccgccgcgctcgccggcggagatagaggacgaggagatagaggacgaggagatcgaggccgcctccgccgcctgctgccgcatctgcctcgagtccgagaccgagcccggtgatgagctgatttctccttgtatgtgcaaagggacgcagcagttcgtgcatcgctactgccttgatcattggaggtctgttaaggaatatgtggtggaggaccttcgcgggtgttatacaccaccaaagatggatccagagcaagagcagcgtctgaggactttgcagctcatgactatttacgtcatcagcacgcgggcctcaaacccccacagcgactcgaccgtcgaacgcggccgcgccgccaccgccgccgccgcccgccgtcgccgtcgtgagcgccgccaaagcgatgcgccttgcctcccgcgcctcttacgccgcgccgccgccatgtccgcttactacaacgcccgaggatccgctcgcccgcgacgaggctactactccgggcgacccacgccgcctccccaccaccaccacgacgccggcgccgagctcgtcagcggcgactcccaccacagcgcggtgcgtgcctccaacgattcgctccgccgcggcggcggccgcgggcctcctccgtcgctgtacggatacgcgccgcctcagccgccgccggcgctatacggggccgtgccgtacaactacggccacccgcagcagccgggcccgccctacggggccgtgccgtacaactacgggcccccgccgccgcagccacaggatcctcagtacggatacgcgaccccgaatccgtatgtccaggggcatccgcagccgtactggcgtgggccaacaaatgcagggttccggccgccgtacgccggcttcaggcctggtgcgccgcagcaatcaccaaggctagcggagtaccgccgacggtggcgattcacgcagcatcggccaccacgccaagccgagaggtttaaggttctatcatacaatatactagctgattatctggcccaggagcaccagtttctttatgagcgcataccatctttcatcatggattggaactggcggaaggaaaagttagtgttcgagtttggtttgtggtctccagatattttatgtcttcagttgcgctatcaagaggatatcgagttcaataagattgatctccgtgataatgttgcacagatttgtgttttagagtcggtgattccaggaaatgtgcaaactgagtctaggctttcaaaatcgcattcatgttcaaatgagcttggaaattgttcttgtgcttttgaggatgatggggcatccaatgaagttttgtgctcagatgtgaatgcagatccttccatctttaaagagttttctggtgttaatgaatttttacttgaagatgaagaccagctgcaaacaacctcagatggttcaccatctgcccagcaagtgattacttctgataaaagatattacgattatgatccatacaggtggacaccagatgaaattaaagctgctactgggaatgaagattgcaccttcgtggaacataatttgaaagtccgaagtgtctacacagatgtggaggattttgaagggacaaaagatgccaacaaggagcctctagtaacaagttacaacagaaaatttatgggaacagtggactacatatgggcttccgaagatctgcagactgttcaagtgctagataccttcccaaaagaaattctgaaacaaacaattgggttccctaccaaggtatcaccaagtgcatcccgcattcacgcgcccctcctgcctaacccaccaccgctttgctcctcctccacgcttcgtccgccgccgccgccgccgccgccgtcgccgtcgccggcgaagatgatgtctggcggtggctactccgccctcgacgaccccaaggcctccggatccgtcccggcggcgacggggccagatccgccgaccatcaagttcgccgactccaacctccagatcttcccgccgtccgaggccaagggcaagatctccggcgcctaccgcccgcccaccgacgcggatgacacgttctcttcctccaagtccgggggcggcggccgaggcggcggcggcggcggcgctgggtcggacgacgccgggcagggcgggtggttccggatgttctccgtcgcggcgtacaagccctacttcgacgtggacacctccgacgtggtggagaggatctgggagtccgtcttccccttccgcggcaccttcaccgagaagacctccgagaaccccgacctatatgggccattctggacatgcaccaccctgattttcgttgctgcatccattgccacatttgtcacctacctatcccacaaatggcataagaaggagtggaactatgatattaacctggttacatggtctgctggcttattctatggctacgtgacatttgttccccttggtctatatgtcatccttaagtacttctcagcacctgctggactagtgcaactatggtgcctctatggatactctttattcatcttcattccagcatcgctcctgtctattgtgccaatagaaatattcaggtgggtgattgctggtgtcgcggggtttatgtctgctaccttcgttgctatgaatctgcgcgctcacattgtaaattctggagagcgatggttcttgatcgttgcagggatattcttgttgcagttgggattggctgttttgctgaaactctatttcttcacgataactgtatagggaactgccatacttgcttgtattagtcaggattggatacacggtttttcaggccgaattactcccggattcgttgatgtaattttccaagtatacatccatcttacatgtgacattgtgacaaggaaaggccgcttcgttagcgtacgagacgtattacaatggcaagacttgtccatggattatttcgagattaaggcttaaagaatccccttttgtagtcc

SEQ ID NO: 7611 - DNA, 484 bp, Oryza sativa
  Clone ID: PAT_MRT4530_14190C.1
gcaaaaaagaaaaatgaaaaatccggtcccgaccacctgtgcaagatttttcacaaaagtggggaaaaaaaattattgggcccacgggtgtttaattaaacaaaaaaaaaggccttgggtatttactgtggtcaaaaaccaagtgttttcgggagggcaccccatgggcccttaaaactaaattgggaatttggggggggagaacctggctgacctttttgcgagggaccaccccgaaggggggggggggaccaatcccgggccctcccgggtttaacccggtttgggggaaaggggaacctccccgggggggggcccaaacttttgagggttaatttccacccggtggaagggtttgtctttgtaaaccccgcgggggctttcccttcttgtgtgggggcaatgttttcgggggggggggggggccccacggggtttggggtttcccccagggggggattttttttttccttgcccctttttt

SEQ ID NO: 7612 - DNA, 357 bp, Oryza sativa
  Clone ID: PAT_MRT4530_14191C.1
ctcagtaaaagaataacactcaacaccttatacaatttatatatattctagagactgaaacactacacagtaatatgtcttaacagacattaattctaaatctgagaattgaacacattctaattatatgtaactgaataactattcggtgcacctaccctctatatatatgaccgcgtatacacactcgcactatgttgtagacactcgtattgtgagactccattgttgcttatctgaactctaaaactttacataggataaccctgcaggccagtcttactaagttatcactaacttgcctgactaggctcacaccttgaatatgaattgtgccctagcagatgcaccaattta

SEQ ID NO: 7613 - DNA, 1002 bp, Oryza sativa
  Clone ID: PAT_MRT4530_14192C.1
atggggatggagttgctccaacaattgcagcctgtcaatgggctatgggaggacgatggtgaggtgcgactgcaaccggcagaaagggatcatgctcatgaaaaaagagggagcagatggggaaaggaaggccattggcagccctgtgcagctctctgtcaagcttctctacctggctccgctcctgccaaagtgatgggcaactgcatcctgagcaccaatgtccagcgtgtagctcttgctgcttcctctaaccttgctctcgttctggctctagcatctaactatatagctaatacactgtactacaatccttcattgacattgggaacattgcataagcttggagttgctactgaaatcttcaatctttggtttggcatgttacagcaagtaaagaaaagtggcataagggcaaactttaagagagaacatgataagaaggtttgttgcttgggattgacttcactaattagccttccagctaatcacattccaccagaagctcttgagcgcattttcaaagcaacactagagcttcttgtttcttacaaggatcaagttgcagaatctaaatgggaaaatgaggctgcagctgaagatttggatggatttgatggtgatgaagaagatgaggatattgagtctgataaggagatgggatatgatgatgaggatggggatgaagtatctagtgtcaatcttcagaaactaagagaggcaagaggtttccagccgcactatgatgacgacgatgatgattctgatgatgactttagcgatgatgaggagttgcaatcgccaattgatgaggtggacccattcatcttctttgttgataccatccaaggtatgcaagcatctgatccagccaggttccagagcctgatgcagactctagatttccgctaccaggcactcgcgaatggcttagctcaacatgccgaggaaagaaaagttgaaattgagaaagagaagttggaaaaggcgaatgcgcagtga

SEQ ID NO: 7614 - DNA, 205 bp, Oryza sativa
  Clone ID: PAT_MRT4530_14193C.1
tcgaccacgcgtccgaaacgacacacagcaaaatgagctaaacgtatacctgtctgtcaggaatggctacaatgcctaatatcagagctggtcaagcactcaggcggtggtagcggcggacggtaggtccatcgacgggacctactacgtgttggtgctggtagggtcttcttctgtattctgttgtgctcttcttcaacttttt

SEQ ID NO: 7615 - DNA, 393 bp, Oryza sativa
  Clone ID: PAT_MRT4530_14194C.1
atggagaagaagacggcgcagcggcggattctcctctccactcctgcttttttttttcttttcgtcacgccattatttcctcacccttaccaagcacgctacgctatcccaaccaataatgaccttccacgacacggtagcgacacctacccgtcactgacatgtagggacacacctccgcgatgctgggacatggacccacctgtccgcgacactggaggcgttccgcttgttatacctggttccagccttgtggacggaatattcgtgggattacggcgggttttccgaggattttggatgggcgaacaatattcgtgctatacgctggctgacatgttggatagagcgatggccgttgccggtgctcgttttacatgcggaagggattag

SEQ ID NO: 7616 - DNA, 205 bp, Oryza sativa
  Clone ID: PAT_MRT4530_14195C.1
tttttcatatttaacacaaatatcgctggcatcagcttaggaattacagagacggatgaacagaacatagaggtgtacagagcgcgacgacatcactgctgtagacgtctgagcttactgatgtgcactactctgactagcgctgactgacgctctgcgctgctagttgcagtatgctgcagatcgtagtagcagtagacgtgac

SEQ ID NO: 7617 - DNA, 132 bp, Oryza sativa
  Clone ID: PAT_MRT4530_14196C.1
atgcccaagaccaaattatctttaggtagggccggtttgaccgccatgtatgggccgatcaaaccgtggcctaagggctggtcagaccggtggcaatgtggtcagtctgatcggcagagatcgcaagcatag

SEQ ID NO: 7618 - DNA, 533 bp, Oryza sativa
  Clone ID: PAT_MRT4530_14197C.1
attcgtttataaactttgaccattcattttcatagaaaaagaaatatatctcgatattgagcaccaccttggggagcgagaacgcccatcacaacgtgtggtaggagcgcgcgtcggggcggaggaacaacgccgagtgtagtagcagcagccacgagatccacggcgcgaagagatagttcatggcgatgtgttgcctgaactcgatcggcgcgcacggcggggaatcggaggaggcacagcgccgcctagagcgcgcacagtggcaccagcttgagcagcgccagcgacaagagcagcacaaacgccgtgaacggcagcgacctcgcactaccaggcctagcgcccgctggtccgtcgacaagtcgctcagcgtctgccacaacagctcctaccccgacagcgccaggggtccacgtaccatgcggagttgcgggacagtgcaaggacatcgggacacgatgctctaccatgcggcgctgccggcgcacgtagtgaccaaggggtccacgtacacgagcactatcatcaca

SEQ ID NO: 7619 - DNA, 2145 bp, Oryza sativa
  Clone ID: PAT_MRT4530_14198C.1
atattccctctcttcctccgcttattaaaaggcggcctccttccccgtggtacccgcacgaggagtcaagcggaggaagagagagagagaatcaaggcagtagtcgtcttcctctcctctcgccgccgcatccgaccggagaaagatcccttctttccctcctccaagcccgcctcgccaggatggagtcctcggcggagacctcggcggcggcggcgcccaatggcggcgcggcggcggcggagcagcagcagcggcgtcggctgccggacttccagcagtcggtgaggctcaagtacgtgaagctggggtaccactacctcatctcccacggcatgtacctgctgctgtcgccgctgatggcgctggtggccgtgcagctctccaccgtgtccccgggcgacatcgccgacctgtgggagcagctccgcttcaacctcctctccgtcgtcgcctgctccaccctcctcgtcttcctctccaccctctacttcctcacccgcccccgccccgtctacctcctcgacttcgcctgctacaagcccgacccccagcgcaagtgcacccgcgagaccttcatgcgctgctccagcctcaccggctccttcaccgacgccaacctcgacttccagcgcaagatcctcgagcgctccggcctcggcgaggacacctacctccctcccgccgtgctgcgcgtcccgcccaacccgtgcatggacgaggcccgcaaggaggcccgcaccgtcatgttcggcgccattgaccagcttcttgagaagacgggtgtgaagcccaaggacattggtgtggttgtcgtcaattgcagcttgttcaacccgacgccgtcgctgtccgccatggttgtgaaccactacaagctgagggggaatgtcatcagctacaacctcggcgggatggggtgcagtgccggcttgctgtccgtcgatctcgccaaggacttgctgcaggtgcacccaaactcgtacgcgctggtggtcagcatggagaacatcacgctcaattggtactttggcaacaaccggtcgatgctcgtgtcgaattgcctgttccggatgggcggcgccgccatcctgctgtcgaacaggcggtccgaccgccggaggtccaagtatgagcttgtgcacaccgtgcgcacgcacaagggcgccaacgacaagtgctttggctgtgtcacccaggaggaagacgagatcggcaagatcggcgtgtcgctctccaaggacctgatggcggtggccggagacgcgctgaagacgaacatcaccaccctcgggccgctcgtgctcccgttgtcggagcagctgctcttcatggccacattggttgccaagaaggtcctcaagatgaagatcaagccatacattcccgatttcaagctggcatttgagcatttctgcatccatgccggtggccgtgccgtgctggatgagctggagaagaacttggagttgactgactggcacatggagccatctaggatgacactgtaccggtttggcaacacatcgagcagctcactctggtatgagctggcgtacaccgaggcgaaggggaggatcaggaagcgggacaggatctggcagattgcatttggatctggtttcaagtgcaacagcgcagtctggaaggcgctgcaaacagtgaatccagcgaaggagaagaacccctggatggatgagattgacaacttcccggttgaagttccaaagatatcaaaggttggaaatgcatgacatgaaatgccttgtttgtctcaagagtagtaaaaagtatggtgggttgagtggcattgtgcattggcattggtagggcaggaagttcatcttcagggttctaaatccatttgcaattgttcaagagttctttggttttcagttgtagcatctgtgaggggaactttaaaaagaaaactgtagctgattcaattaggtagaaaaagggtgtgttttcttcacttagggctgtctgataatgctgtatttattcagattggagaaaacaattggagtcttcatgtgacgtttattcatcaaaaaaaaaaaaaaaaaaaaaaaaaagcacggtcacattctcattaaatctcgcgccttgaattgactggtttaaaaaaaaaaaacctcgtgc

SEQ ID NO: 7620 - DNA, 906 bp, Oryza sativa
  Clone ID: PAT_MRT4530_14199C.1
atggatcttgagaggtccacctcaaacaccgcgtccctgaagaagctgcaagacgacagtgccctccccggtgcatttgtttctcctgacttatcgagttcttgttctcgatttacaagtttggacagcaacactgtgggacgccgcgttggtcagataatgattagcgcggcctcaaaggcggacgacatccctatcgcactttgcgacaaggacgcgaccgaacgcgccgccgcgattaatgctctccctctgtcggatgccatcggtcctctcgtggatcaccaggcggcaacgtcgttgaaggagggcgttgccaaggaggcatctgacgctgttgctaccaccacaagtggcagcaatattctgaagaaagggaggaaattctcctccatactcaggacccactggaaagcgacgaactccgcgtctcatgaagagaaggaaaatcttcgcaggatggcgcgggcaaaggtggcgcaaggtcgcgagatggaggaggcccgggcggtgacattgtcggcaaaccagcgtgccgagcagctggcgcgcgatctggcggaggcccgtgaggacctcctgaagatgagggagctggtagctggcaacgagagagatgttgatgtcgaggatgtccaacagcgtgggcagcctgatacgccggtggtcattctagcgattacgcttgagccgcacgtgctggagacgaagctcgaggtggccgaactcgaaagggctatggtggaggtgaaggaagaccaggccgtggaagccctccgaggtcacgaggtgtggttcaactcatacctcaagagctactgcacggcgatggcgggggtttgcaaggagctacgagttccctcagagatcccaaggagtcagcggctggttgtatctcgtggttga

SEQ ID NO: 7621 - DNA, 792 bp, Oryza sativa
  Clone ID: PAT_MRT4530_1419C.1
atggacttggaggtaaccctgtttctgggtgacatcccccgtagtgcagctgatgaggtagatggtctgtggtccttatcagtaaaatctgtgctcttcagtaaagcattaacaccgtccgaggcaagccgtcttcttggtgaagtccctcgtgatgccattgaagaggtggaagtaaaatctgtgttctttgatatagaatctacacgatcagaggcgagttgtctacgtggagaaacccctcgcaatgcagctgttgacctggcagtgaaggtgatgttttttgaaatgccatcagatgcaagccgccttcttggtgacataccacgtaatgaggcagacgaggttgatgatgatgaggatgtggatggtctgctatctttgtcagaaaaatctgtgcttcttgatattgcatcaaggccatcagaggcaagtcgtcttcttggggaaaaccctcgagatgaagtcgatgaaatggctgctctgctatccttctcagcaaaatctatgtttttcacaacagcattaacactgtcagaggcaagtcgccttcttggcgaatttcccctcagtgaagctgatgaggaggccggtctcttatcattttctggcaaatcgatgtttcttgataaagcaccactgccaatagatgttgatgttcttctaggtgaaagtcctcgtgttgactttgctgtagtttgtgatgtagcattagacatacttgatactgacacacttggtgaaatcccaggagatgatgctgccgaggagagggtttggtacctttactaa

SEQ ID NO: 7622 - DNA, 3524 bp, Oryza sativa
  Clone ID: PAT_MRT4530_141C.1
atggccgccgccaacgacggcgcggacgcagccgctgtcgccgccgaggacggtcttggaggcggtaagcgttattacatgccagtgtaccatattgatatatacatactggtgaaatcagaatttatggtggcattggacactgcagagaagcaagttcaggagtatcgagccacacttgatgatatggaggaacgattatccaagagtgaggatgagagggcaacatgccaggacaaactgaattatgtcgagcaagaattggcagcaacaaaaggtcgggaaagtgcaatgcaagagcgattattaaaggaggtgggtgagtttcaggaaggctactgtaaggagatcaagatcaaagtgcaatttgagacgccgctgaagctggagacgtccactgcaatgatggcactgacggagcggcagccgcagtcggagaagaaggcggcgagggcgaggccgatgtcggcgaaggccgtcgtcgtgctctgcgccacgagcttcttcgtcggcctgctgctcagcggccggatgacgcttctgatgccaccgccgtcgggcagcgtcggcgcggcctcctccggccatggctccaggctctccctcttctccgacgactgcgagaaccggcataaactggacgagggcaacccgaacgacatcatgaacgaggtgtcaagaactcaccaagcaatccagtcgttggacaagtcggtgtcgtcgctggagatggagctggcggtggagcgcgcgaagcagaacggcgggctgggcgcggcggtgccgtcgaagcgggggcggcggccgcccagggcgttcgtggtgatcggcatcaacacggcgttcagcagcaagaagcggcgcgactcgcagggagagagcagaaatggaattatctaaggtgcaggaaattgaagctaaagcacagaagttggagcttgaattagcatcatgcacagcattgctcagcaacatacctgatgtatcttcttttggtgatatacctcaaaagatcgcagatttgcagaagcaagcattgacaaatttaaataaagttggtgaggtaacatcacagttgaaagaattaaaggttgcattggaatttgctgatcttagcaagcaacgggcagaaggtgaagcaacccttgccaaagagagggctgaaagtgctactagggagatcaagcggcttgaacttctgcttgctgccatcagtgaagaaagggatagattaagaaaggaccatgctgtgtcgaaatctagggatggagatgatgcatcatccaaggtgacaatccagaatatggaatcggatctatctcgaatggaaaaggtagtaacagaactggagagcactatacgtgaccagagagaactaattagtcaacagcacactgagctcaatttgatgaatgaaaaattgagcattgaatcaagaaaagcaaaatcattggagcgagatggagatcaactacgctcacaggtggctttacttgagtcaaagctgggccatggagattactctgcctctagcacaaaagtactgcgtatggtaaatactcttgcagtggacaatgaagcaaagcagactatagaggcattgcaagctgaattgaagaaaacgaaagagaggctacaagcagttgaagaactaaaaggacaagctgatgttggaactgtggttgatgtgaatattgctgaaaagctagcacagcttaaaaatcaaattgcaaccctagagaaacgtgaagaaagatataaggcagtatttgcagagaggatctcagttttccgaaaggcttgctgctcgctctttggttataagatagtgatgaatgatcagcaacagtcaaatgggatccctgtaacacgttttattctgcattctgtttacgcccaaagtgatgatgagaagcttgagtttgactacgaatctggaagcaccaatattgtggtcaatgactacacttctcaacatgaaattgctcagcagacactgtcgacgtcggagcggcagccgcagccggagaagaagccgccacggacgaggccgccgctgccaggcaaggccgtggccgcgctgtgcgtggcgagctttgtcgtgggcttgctgctcagcggccgggtggtggtgccgttgctacctccgggctcgtcgtcgccggcgagcaactacaagacgtccttctctactggctgcgagaacaaacgcgctaagctaggcgagagcaatccaacggacatcatgaacgaggtgtccaggactcaccacgcaatccagtccctggacaaggcggtgtcttctctggagatggagctcgccgtggagcgcgctcggagcagcgccgccgtcggcgccggcacggccgtctcatccctgggcccacagaaggccttcgtcgtgatcggcatcaacaccgccttcagcagcaagaagcgccgcgactccctccgcgacacctgggtccctagaggggataagctgaggaggctggagaaggagaaggggatcgtgatccggttcgtgatcgggcggagcggcgcggcggcggcgggcgacgggccgctggaccgcgcggtggacgcggaggacgccgagaacaaggacttcctgcggctggatcacgtggagggctaccacgagctgtcctccaagaccagggtctacttcaccaccgccgtcgccacctgggacgccgacttctacgtcaaggtcgacgacgacgtccacgtcaacctagggatgctgacgagcaggctggccaagtacaggacgcgaccgagggtgtacgtgggctgcatgaagtccggcccggttctgtcacagaagggagtgaagtaccacgagccggagtactggaagttcggggacgaggggaacaggtacttccgccacgccaccggccaaatctacgccatttccaaggatctcgccgcctacatctccatcaaccagccgatcctgcacaggttcgcaaacgaggacgtctccctcggcgcgtggctgatcgggctcgaggtcgagcacgtcgacgaccgcagcatgtgctgcgccacgccgccagattgcgagtggaagaagcgagctgggaacgtgtgcgtggcgtcgttcgattggtcgtgcagtggggtctgcaagtcagtggacaggatgaagcacatccacagggcctgcggcgaaggccagggagcagtctggagcgtcgctacgtgatgatcacatcatcagctttaatcgtagcattaatctttggttttatgatggtgcaaagcagctagcgggcgacgaggggcctagtttaactgaatgatcgattgtttcagatgattaggaaacgagccacgtagaatggatgaacgtgcatgatggtggaaaatggaaatgcatgggtggtaactgtaaaagtgtaaaggctttagcatccaatttccagggggagttgggtcatgccatatgcttcacttattaatcacagctctttctgcatttttaagggctccttcagaaaaaaaagggcgaaaac

SEQ ID NO: 7623 - DNA, 579 bp, Oryza sativa
  Clone ID: PAT_MRT4530_14200C.1
atggaagacgggttcctctgcttcggcgccgccatgatggtgtcgtactgcgccgcctggctcgtcgacctcgcgctcatcggctcccaggcggccgccgacgaggaggccgcgaggttcatggacgacgtcgccggcgagctccgccgccgcggcggcgtcggggaggacgaggacgagggcgaggtcgagatggccatcgccaagcagatggccatcctcaaccagctcggtgtatacgacgcctacacacatgctaaaaaggactactacgtgacgggagtcccagtgagagcgaaacaacgggcggcggccccggcggcggcgccggcgctggagaaggtggtgatcgcggtcgccgccggcggggtcctgctgtaccacctggcgaggctgggcgccctcgtggcgcggggccaccgcgaggagaagaggcgggcggcgcgccggagggagcagtacgtcgccgaggcgagggcggcgcggctcgagggcctcaagcgggagatccgcggcaaggcggtcgactggtggtcggcgcacaagaaggccgccgccgccgccgcagactggagctaa

SEQ ID NO: 7624 - DNA, 189 bp, Oryza sativa
  Clone ID: PAT_MRT4530_14201C.1
atggtgccattgttaagggaccgaccggtggatgtcgaggaggaggaagtgccggccatcgtcattgtcatcgtgcacttgtcgtggacagcggcgacggtgatcgtgacggcgtcgatggtcttggcggcgatggccgtcggcggtgacgacgtggcgtggtgcggcggtgatgcttcccgtcactag

SEQ ID NO: 7625 - DNA, 341 bp, Oryza sativa
  unsure (1)..(341): unsure at all n locations
  Clone ID: PAT_MRT4530_14202C.1
tgaccgcccgcccgttngccgacaatggcccgcccgaggttcttnggaggtgcggtggcacttgagggcgaccatgcgcgcccatggaaaagcttggttaatttgttttcctccctgatggccaagaaatatttggagttttgactttggaagatttttattttgattttttagtgtaattttaattcacccctcttataccaagtagtacaaaattgagaggatgtgtttgtctgtgtaggttggtagaaatacctaacgtgaagaaatttctatcgtatatagacgaatattaattatttattgattcattggcacaagaaaaaaaaaaaaaaaaaaaa

SEQ ID NO: 7626 - DNA, 362 bp, Oryza sativa
  Clone ID: PAT_MRT4530_14203C.1
aactaaactaaaaatctgctggagcgatcacacacacacacacaattaaagtacatacatacatgcactggtgcaactgcaactgaaaggtcctgtgcgtggctactacaagtgcacacatggtacgtaggtaggcaccatctacatcgggtcgttgtgctcacttgccggagactaagctagtggcttatgcccacacattaaaggcgacagggtcggcgacctggaccaaaagggtatcgaaggggcccttaccggttaccatagcctgaacaaagaatcccaacattgaaaacatggcgaggcggacattcttgagctccttcaacttgagctctaggaatgtgtcagggtcgtcgggg

SEQ ID NO: 7627 - DNA, 2124 bp, Oryza sativa
  Clone ID: PAT_MRT4530_14204C.1
atgcattttaaaaagcttagtaacaaggattggaaagttattgcacaaagaattgaaaagaaacttagtagttggaaagataattttcagagcaacatattggctctgattttgggcacaattataaaggcgcaggggctctggacggccatcgatccctgctatgcggagtaccgcgaggatcgtgcagcgctctcggcgattctccaagctgtgccccgcgagatgttgcgcggcttggcaaagcacgacacggcgaaggcggcgtgggatgccattaaaaccatgcgggtcggtgtcgaccgcgtgagcgaggcgagggagcagggattccgccgtcagttcgaggcgatgcgcttcaaggacggtgagacaccggaggaatttgcgatgcggctcactgccatcgttgcggacatgcgcaacatgggcggagtcatggaagacgaacacatcaacaagaagctgctgcgtgttgtccccaagaagtacaagccggtggcaatttccctcgagcagctcctcgacgtgaagaccatggccctggaggagctcatcgagtggctgtcgacggtcgactcctacagtgatgatgaggaggcaagtgacggtggcaaattgtacctcactaaggagcagtggcaggccgaggcaaatgcaaatctggtccaggctgaggaagagccgactctgctcatggcacacgtgatgggggtgtcgctcgccggcgaagcggccgttggtcgaacaccttgtgtgcaggaagtgcatctcacagagaagaaggttgtgctggaccatgaggatgggcgtaaggaggagaagactggagagtggttcctggacaccggggccacgaatcacttgacgggcgcacgctcagcgttcgcggagcttgacactggtgttgtgggcacgagcaagaatggtgatcaccgctcactagaggcagtgtactacatccccaagctgagaaaaaacattgttagtgttggtcgcctcgatgcgcgcggctacgacgcacacatttggcatggtgttttcacgttgcgtgacccggaagggatgcagctagctaagttgaaccttgcgacactaatctgtatggcagcgagcggctccgagctagcatggcgatggcatgcacgatttggccatctgaatttcctggcacttcggaggttggcaaaaggaggcgtggtccgcaggatcccgcaaattgatcacattgatcagttgtgtgacgggtacctcgcgggcaaacaacatcgcacaccgttcccagaggaggcgcagtacagggcgcagacggcgctcgagctggtgcacggtgacctctgcggaccaatcacgccggcgacgacagggggcaagaagtatttcttgctcctagtcgatgacatgagtcatcacatgtggatacgactcctctctgccaaacacgaagcatcggcagcgattaagccggcgtggagaaggatagcaatcggaagctcatggcgctgcgcactgatcgcggggcagaacagtgtcgtggagcggcgcaatcagactgtggtggcagcagctaggtccatgctgaaggcggcaaacatgctggcatatttctggggagaggcggtggttgcagccgtctatgtcttgagcaaatcaccaatgaagagtcttgatggggtgacgccgtatgaagcgtggtatggtcgccgacccactgtcgaacacctgcgtgtgtttgagtgtgtgggctatgttaagacagccaagccaaacttgagaaagcttgatgatcgtagcacgaggatggtcttcatcggctacgagcaaggatcaaaagcctacaagatgtatgattttgtgacgacgttctgggactggggcagcaacactgatgaagaaggagatcaggacgcgtatgtggagtttacggtggagaatttcacaatcccagtccaagggagtgagacacatgcccaggatgcagcagccactccaaccatgctagcaacatcaccaacatcaagcaccggaactgcaacaactctgccatctggtgttgaattctgttcccctccaactgatgctagtgaagggactgatgaagggcccaggagctacagaacagtg

SEQ ID NO: 7628 - DNA, 3849 bp, Oryza sativa
  Clone ID: PAT_MRT4530_14205C.1
atgtcatacacaccgcctggccgccgtggtggtggcggcggcgggggaagcggcaacggccgcggcagcgcgagcggcagcggcgtggggaattgcgcagacggcgcatcactcccgctagtgcctcaggggagagatgctgggcacactgcccgtctcccgatcctgtcgaggacaaattatccggactgggcactgttgatgcgcgtaaacctgcaggcgcaggggctctggacggccatcgatcctggctacgcggagtaccgcgaggatcgtgcagcgctctcggcgattctccaagctgtgccgcgtgagatgttgcgtggcctggcgaagcacaattcggcgaaggcgacgtgggatgccattaaaaccatgcgggtcagtgtcgaccgcgtgcgtgaggcgaaggagcagggattccgccgtcagttcgaggcgatgcgcttcaaggacggggagacgccagaggaatttgcaatgcggctcactgccgtcgttgcggacattcgcgacatgggcggagtcatggaagacgaacacatcaacaagaagctgctgcgtgttgtccccaagaagtacaagccggtggcgatttccctcgagcagctcctcgacgtgaagaccatggccctggaggagctcgtcgggcggctgtcgacggtcgactcttacagtgatgacgaggaggcaagtgatggcagcaaattgtacctcactgaggagcagtggcaggcccgtgtcaagcagcgggagcaggagggatccagcagcagcaacaagggccgggcgggctctagcaaccagaaccgtcgaggtaaggccggcgattcaccgaagggaaagaagatggccaccggcggccatggccgtcgtgacatctctaaggtgaagtgtttcaattgcgatgaatacggtcattactcgaagcagtgccgtaagccgcgtcgccaacgtcggggagaggcgaatgcgaatctggtccaggctgaggaagaaccaactctgctcatggcacacgtgatgggggtgtcgctcgccggcgaagcggccattggtcgaacaccttgtgtgcaggaagtgcatctcacggagaagaaggttgtgcttgaccgcgaggatgggcgtgaggaggagaagacttcagagtggttcctggacaccggggccacgaatcacatgacgggcgcacgctcggcgttcgcggagcttgacactggtgttgtgggcacggttaaattcggcgatggctcggtgattgacatccaggggcacggaactgtggtgtttcagtgcaagaatggtgatcaccgctcactggaggcagtgtactacatccccaagctgagaaaaaacatcgtcagtgttggtcgcctcgacgcgcgcggctacgacgcacacatttggcatggtgttttcacgttgcgttacccggaagggatgctgctagctaagttccaagccggcgtggagaaggagagcaatcggaagctcatggcgctgcgcatcgatcgcgggggtgaattcacctctgtagagttcatggagtactgcgcggatacaggggtgaagcgtcaactcactgcaccctactcaccgcagcagaacggcgtagtggagcggcgcaaccagactgtggtggcagcggcgaggtccatgctgaaggcggcaaacatgccggcatatttctggggagaggtggtggttgcagccgtctacgtcctgaacagatcaccaacgaagagtcttgatggggtgacgccgtatgaagcgtggcatggtcgccgacccactgtcgaacacctgcgtgtgtttgggtgtgtgggctatgttaagacggccaagccaaacttgagaaagcttgatgatcatggcacgaggatggtcttcattggctacgagcaaggatcaaaagcctacaggatgtatgatcctgtggcgcgacgcctgtgtgtgtcgcgcgacgtcatttttgatgggacgacgttctgggactggggcagcaacactgatgaagaaggagatcaggatgcctatgtggagtttacggtggagaatttcacagtcccagtccaagggggtgagacacatgcccaggatgcagcagtcactcctaccatgctagcaacatcaccaacatcaagcaccggaactgcaataactctgccatctggtgttgaattctgttcctctccaactgatgctagtgaagggactaatgaagggcccaggaggtacagaacagtggcaaacacgcttgccactacagctccaatccttgattttgattacagtgatcaatgccttatggcagcagaggaaccagcaaatttcttggaggctgagcaggagagctgctggaggaaggccatgcttgaagagatggactcaattgaaggtaacaacacttggtttctctgtgatttgccctctagccacagagcaatagggttggagtgggtttataaaatcaaacgtgatgccaaagatgccattgtgaagtacaaagctcgattggtggcaaagggatatgtccaacaacatggagttgattttgatgaagtgtttgccccagtggcgaggatggagactgtgcgattgctgattgcaatggctgctcatcagggatgggaagttcatcacatggatgtgaaatcagctttcttgaatagggaattggaaaaagatgtttatgtggttcaaccacctggttttgttgttgatggaaaagaagacaaggtgttgaaactgaagaaggccctatatggactaaaacaagcaccacgtgcatggtatgccaaattggattctagtcttgtgagcctgaattttgtcaagagtggtgtcgaaagtgctgtgtatactcaaggagagaagaactcacgacttgtggttggtgtatatgtggatgatctcattattacaggagcaagtctgatggaaataaacaagtttaaggagcagatgcaagctctttttaaaatgagtgatctcggtctgctctcttattatctcgggatggaggtgaaacagggaaaggaagggatcacagtgtctcaaggtgcatatgcagcaaagatacttgacaaagctgggatgagggattgtaatccatgtcagactcccatggatgctcggttgaagttgagcaaggagggtggagaatgtgtggaggaaactcaattcagaagcataattgggagcttaaggtacttggtgaacacaagacctgatctaagttattcggttggttatgttagcaggtttatggagaaaccgacctctgaacattgggctgccatgaaacatattttgaggtatgtggcaggtactctgaatctcggggtggaattcagaaagaagcagcatcaggttcctcagctgaatggctatagtgacagtgatatggctggggatattgatgatagaaagagtacaaccggagttctattcaaactgggagacagtttgattagttggcagtcacaaaaacaaaaggtggtagcattatcttcgtgtgaggctgaatatatagctgctgcaactgctgctgtacaaggagtatggctggctcgaccgataggtgagttggaaggccaagaacctggttgtgcactgatcaaggttgataacaagtctgctataagtctctgcaagaatcctgtgcttcatgatcgcagtaaacatattgatacaaagtttcatttcatccgggattgtgttgatcaaaaacgggtggaggtggaatacataaggtcagaggaccaacttgcagatattttaacaaagcctcttggtaagattcgatttctggagttgagaggcaagctgggattagttccagtctga

SEQ ID NO: 7629 - DNA, 363 bp, Oryza sativa
  Clone ID: PAT_MRT4530_14206C.1
caggcgttcaaaggcattcaattgatataggggcccccccataaggttgcccaagcaggggggaggggcaaaaccgggaaatttggggcccctcccaacgacaaaaacgccttcctcctggtggcccccctaacagctaaccatgaccctccaaatttttgcatccggcatttaaataaaaggggacgggggaaatggcagccggaaccccggaaacggggggtccccttttgagggccccggccccggaaaaattggggttagccgccttggggggcccattggggacgggggaccccccgggggctaacgggtaaggggggatggaccccttgtcgccaccagaaggggcgggggtagccc

SEQ ID NO: 7630 - DNA, 2506 bp, Oryza sativa
  Clone ID: PAT_MRT4530_14207C.1
ctaagcatcttcttccaattccctattcaagaaagctaatttcacatccatctgatgaacttcccatccctgatgagcagccgttgcaatcagcaatcgcacagtctccatcctcgtcactggggcaaatacttcatcaaaatcaactccttgttgatggacatatccctttgccaccaatcgagctttgtacttcacaatgacatctttggcatcacgtttgattttgtaaacccatttcagtcctgttgctctgtggctagagggcaaatcatagagagtccaggtgttgttaccttcaattgattccatctcttcaagcatggccttcctccagcagctctcctgctcagcctccaagaaacttgctggttcctctgctgccataaggcattgatcactgtaattaaaatctaggattggggtcaaggtggcaagcgtgttcaccactgttctgtagctcctgggcccttcatcagtcccttcactagcatcagttggaggggaacagaattcaacaccagatggcagagttgttgcagttccggtgcttgatgttggtgatgttgctagcatggttggagtggctgctgcatcctgggcatgtgtctcactcccttggactgggattgtgaaattctccaccgtaaactccacatacgcgtcctgatctccttcttcatcagtgttgatcttgtaggcttttgatccttgctcgtagccgatgaagaccatcctcgtgctacgatcatcaagctttctcaagtttggcttggctgtcttaacatagcccacacactcaaacacacgcaggtgttcgacagtgggtcggcgaccataccacgcttcatacggcgtcaccccatcaagactcttcattggtgatttgctcaagacatagacggctgcaaccaccgcctctccccagaaatatgccagcatgtttgccgccttcagcatggacctagctgctgccaccacagtctgattgcgccgctccacgacactgttctgccccgcgatcagtgcgcagcgccatgagcttccgattgctatcctttctccacgccggcttaatcgctgccgatgcttcgtgtttggcagagaggagtcgtatccacatgtgatgactcatgtcatcgactaggagcaagaaatacttcttgccccctgtcgtcgccggcgtgattggtccgcagaggtcaccgtgcaccagctcgagcgccgtctgcgccctgtactgcgcctcctctgggaacggtgtgcgatgttgtttgcccgcgaggtacccgtcacacaactgatcaatgtgatcaatttgcgggatcctgcggaccacgcctccttttgccaacctccgaagtgccaggaaattcagatggccaaatcgtgcatgccatcgccatgctagctcggagccgctcgctgccatacagattagtgtcgcaaggttcaacttagctagctgcatcccttccgggtcacgcaacgtgaaaacaccatgccaaatgtgtgcgtcgtagccgcgcgcatcgaggcgaccaacactaacaatgttttttctcagcttggggatgtagtacactgcctctagtgagcggtgatcaccattcttgctcgtgcccacaacaccagtgtcaagctccgcgaacgctgagcgtgcgcccgtcaagtgattcgtggccccggtgtccaggaaccactctccagtcttctcctccttacgcccatcctcatggtccagcacaaccttcttctctgtgagatgcacttcctgcacacaaggtgttcgaccaacggccgcttcgccggcgagcgacacccccatcacgtgtgccatgagcagagtcggctcttcctcagcctggaccagatttgcatttgcctcggcctgccactgctccttagtgaggtacaatttgccaccgtcacttgcctcctcatcatcactgtaggagtcgaccgtcgacagccactcgatgagctcctccagggccatggtcttcacgtcgaggagctgctcgagggaaattgccaccggcttgtacttcttggggacaacacgcagcagcttcttgttgatgtgttcgtcttccatgactccgcccatgttgcgcatgtccgcaacgatggcagtgagccgcatcgcaaattcctccggtgtctcaccgtccttgaagcgcatcgcctcgaactgacggcggaatccctgctccctcgcctcgctcacgcggtcgacaccgacccgcatggttttaatggcatcccacgccgccttcgccgtgtcgtgctttgccaagccgcgcaacatctcgcggggcacagcttggagaatcgccgagagcgctgcacgatcctcgcggtactccgcatagcagggatcgatggccgtccagagcccctgcgccgcgccatcccacgatccgagccgagtcaacgcagcttgacggagacttgcagacgacgtcaactctggcgactctgacgatggcggtgcatccggcat

SEQ ID NO: 7631 - DNA, 315 bp, Oryza sativa
  Clone ID: PAT_MRT4530_14208C.1
gttcttgttaacttcgtttgagaccatggcaatatcagaaatgtcagctcttttctttctatttagtgctttgctaagaagttctttggtccacagtcaaggattgcagatagggttttatgataataattgccctgatgctgaggacatagtcaggtctaccgtcgaaaagtattacaacaatgatgcaaccatagccccaggcttgctcaggctacatttccatgactgttttgttcaaggatgtgatgcgtcagttttgatttcaggtgcatcctctgagaggactgcaccacaaaattttggtatcagggg

SEQ ID NO: 7632 - DNA, 4216 bp, Oryza sativa
  Clone ID: PAT_MRT4530_14209C.1
gaagcatcagactggaactaatcccagcttgcctctcaactccaaaaatcgaatcttaccaagaggctttgttaaaatatctgcatgttgctcctctaaccttatgtattccacctccacccgtttctgatcaacacaatcccagatgaaataaaactttgtatcaatatgtttactgcgatcatgaagcacaggattcttcaagagacttatagcagacttgttatcaaccttgatcagtgcacaaccaggttcttggccttccaactcacctattggtcgagccagccacactccttgtacagcagcagttgcagcagctatatattcagcctcacacgaagatattgctaccaccttttgtttttgtgactgccaactgatcaaactgtctcccaatttaaatagaactccggttgtactctttctatcatcaatatccccagccatatcactgtcactatagccattcagctgaggaacctgttgttgcttctttctgaattccaccccgagattcagagtacctgccacatacctcaaaatatgtttcatggcagcccaatgttcagaggtcggtttctccataaacctgctaacataaccaaccgaataacttagatgaggtcttgtgttcaccaagtacctcaagctcccaattatgcttctgaattgagtttcctccatacattctcctccctcctttctcaacttcaaccgagcatccatgggagtctgacatggattacaatccctcatcccagctttgtcaagtatctttgctgcatatgcaccttgagacactgtgatcccttcctttgcatgtttcacctccatcccgagataataagagagcagaccgagatcactcattttaaaaagagcctgcatctgctccttaaacttgtttatttccatcagacttgctcctgtagtaatgagatcatccacatatacaccaaccacaagtcatgagttcttctctcctcgagtatacacagcacttttgacaccactcttgacaaaattcaggctcacaagactagaatccaacttcgcataacatgcacgtggtgcttgtttcagtccatatagggccttcttcaatttcaacaccttgtcttcttttccatcaacaacaaaaccaggtggttgaaccacctaagcatcttcttccaattccctattcaagaaagctaatttcacatccatctgatgaacttcccatccctgatgagcagccgttgcaatcagcaatcgcacagtctccatcctcgtcactggggcaaatacttcatcaaaatcaactccttgttgatggacatatccctttgccaccaatcgagctttgtacttcacaatgacatctttggcatcacgtttgattttgtaaacccatttcagtcctgttgctctgtggctagagggcaaatcatagagagtccaggtgttgttaccttcaattgattccatctcttcaagcatggccttcctccagcagctctcctgctcagcctccaagaaacttgctggttcctctgctgccataaggcattgatcactgtaattaaaatctaggattggggtcaaggtggcaagcgtgttcaccactgttctgtagctcctgggcccttcatcagtcccttcactagcatcagttggaggggaacagaattcaacaccagatggcagagttgttgcagttccggtgcttgatgttggtgatgttgctagcatggttggagtggctgctgcatcctgggcatgtgtctcactcccttggactgggattgtgaaattctccaccgtaaactccacatacgcgtcctgatctccttcttcatcagtgttgctgccccagtcccagaacgtcgtctcataaaaaaacgacgtcgcgtgacacacacacgcgtcgcaccacaaaatcatacatcttgtaggcttttgatccttgctcgtagccgatgaagaccatcctcgtgctacgatcatcaagctttctcaagtttggcttggctgtcttaacatagcccacacactcaaacacacgcaggtgttcgacagtgggtcggcgaccataccacgcttcatacggcgtcaccccatcaagactcttcattggtgatttgctcaagacatagacggctgcaaccaccgcctctccccagaaatatgccagcatgtttgccgccttcagcatggacctagctgctgccaccacagtctgattgcgccgctccacgacactgttctgctgccgtgagtagggtgcagtgatttaacgtttcacccctgtgtccgcgtagtactccatgaactctatagaggtgaattcacccccgcgatcagtgcgcagcgccatgagcttccgattgctatccttctccacgccggcttaatcgctgccgatgcttcgtgtttggcagagaggagtcgtatccacatgtgatgactcatgtcatcgactaggagcaagaaatacttcttgccccctgtcgtcgccggcgtgattggtccgcagaggtcaccgtgcaccagctcgagcgccgtctgcgccctgtactgcgcctcctctgggaacggtgtgcgatgttgtttgcccgcgaggtacccgtcacacaactgatcaatgtgatcaatttgcgggatcctgcggaccacgcctccttttgccaacctccgaagtgccaggaaattcagatggccaaatcgtgcatgccatcgccatgctagctcggagccgctcgctgccatacagattagtgtcgcaaggttcaacttgagaacatacaggtaacttgaatcacgatttaccttagctagctgcatcccttccgggtcacgcaacgtgaaaacaccatgccaaatgtgtgcgtcgtagccgcgcgcatcgaggcgaccaacactaacaatgttttttctcagcttggggatgtagtacactgcctctagtgagcggtgatcaccattcttgctctgaaacaccacagttccgcgcccctagatgtcaaccactgagccatcgctgaatttaaccgtgcccacaacaccagtgtcaagctccgcgaacgctgagcgtgcgcccgtcaagtgattcgtggccccggtgtccaggaaccactctccagtcttctcctccttacgcccatcctcatggtccagcacaaccttcttctctgtgagatgcacttcctgcacacaaggtgttcgaccaacggccgcttcgccggcgagcgacacccccatcacgtgtgccatgagcagagtcggctcttcctcagcctggaccagatttgcatttgcctctccccgacattggcgacgcggcatacggcactgcttcgagtaatgaccgtattcatcacaattgaaacacttcaccttagagatgtcacgacagccatggccgctggtggccatctcctttcccttcggtgaatcgccggccttgcctcgacggttctggttgccagagcccgcccggcccttgttgctgctgccagatccctcctactcccgctgcttgacaccggcctgccactgctccttagtgaggtacaatttgccaccgtcacttgcctcctcatcatcactgtaggagtcgaccgtcgacagccactcgatgagctcctccagggccatggtcttcacgtcgaggagctgctcgagggaaattgccaccggcttgtacttcttggggacaacacgcagcagcttcttgttgatgtgttcgtcttccatgactccgcccatgttgcgcatgtccgcaacgatggcagtgagccgcatcgcaaattcctccggtgtctcaccgtccttgaagcgcatcgcctcgaactgacggcggaatccctgctccctcgcctcgctcacgcggtcgacaccgacccgcatggttttaatggcatcccacgccgccttcgccgtgtcgtgctttgccaagccgcgcaacatctcgcggggcacagcttggagaatcgccgagagcgctgcacgatcctcgcggtactccgcatagcagggatcgatggccgtccagagcccctgcgcctgcaggttgacgcgcatcaacagcgctcagtctatataatttgtcctcgacaggatcaagagacgggcagtgtgccctgcatcgactagcgggagtgatgccgcagccgttgtcgcttcccccgccgccaccgccaccacgacggccaggcggtgtgtatgacat

SEQ ID NO: 7633 - DNA, 304 bp, Oryza sativa
  Clone ID: PAT_MRT4530_1420C.1
ccatgtcccttatataggaattggtcttgccctctacaggccctcctccacgtccaactcggggtagaaaccaaaggaaacccgaaacatgccttcccgagcaaggaaacttcgagacccgacgaaacagagtaggactcggacctgccgtcagaccggccacacaccgccggtctgaccggccctcaaccggtggtctgaccgcccaacacacagcggtcagaccggcccacttcagaggaaaccggtggactttcaaatttcggcaatattaccgctcggggtcgccggtcagaccggcagc

SEQ ID NO: 7634 - DNA, 387 bp, Oryza sativa
  Clone ID: PAT_MRT4530_14210C.1
acagcactaactacgccgccggcaccaccaccgacaggcgcgccgactgcaattgcctgaggaccgacgtcactggcgtaggcgtcctcaacctcgccgacgccgtcggcgtgcccatacaagggtggcgtgggcgtgacgtacaccatgagcagctgcaccgactgctgcagggagagctaaacctaaacgaggatgatcgatcgatgatccattccggcgccgtcgccgtccacctctatcggcgccgaccatagcatataccatgcatcgagatggggtactactgctacctggtactactgaatcaaaagctgtccgtatgtacggacgtacatgtcggcgagtgccctgtgacacgcatgtagctcaaggtatgttcgttcg

SEQ ID NO: 7635 - DNA, 247 bp, Oryza sativa
  Clone ID: PAT_MRT4530_14211C.1
tatatttgtggtgaggttgtctccacacatccgatatttttttttgttgaaacatgaatatatgagtaccacatgccacatgtatacttttatggtttttataattgagacactatggggtgccccacgctacacccccacgcgtgagctgtgtagatgtgttgtgttacaccttttgtgagaatgccacacaaagattaagtcctttcggaatgtttgccttgggtaaaaaaaaaaaaaaaaaaaa

SEQ ID NO: 7636 - DNA, 1971 bp, Oryza sativa
  Clone ID: PAT_MRT4530_14212C.1
ctacgaaggaacaaaaaagaaaaatggtgtcacggttacggtgctgtgcgggaacagtagcgtgcgagctgctgctgagtcttttgtctgcgtcagtgaacgcttcagggcagttaaaaccatagcagagaccccagcagccacagcccagctagtggcagctcgcctccgcctgcaccctgcacctgcacgggcgctgcaccaccaccgcctccccgtccatcgctgcgacgccgcgtgcagaggagcacgaggagtattcaactctctcgcaagccataaggctgtcgcggccattgccgccactggccgatctcctcttccacagctctgcaagccaagtccttgcgccatcatgtttgcctcgacgaggtgaacccatttttcccttttcccctctcttttagcccccacaacaagccaccaccgccactccttttgttgccacggtcgagctcttgtcgtcgccgtttcggccttctccttcactttctccgccagccaccgcactccccggatgctttgtgctcgggaacaccacccgccgccggcgtcgccatcttccagccgccggaaaaccggcgcccctcctctccttctcctctgctgctcgtgctctacgtcggaccgttggttgtaaagcccggcaaaaaccaaacccaaggtcgaagtgctgctcctggcaccccacaccttgatgcgtatagcggtcggagcttcactatcctctcgacctcctattcttctagccgatatgctgtctatcgacaccggcttagcctccaaccctctagaacctccacataaaatattagcccagtaatccctatgccgtggtcgagcattcatgagctcccaccattgatgcacggcgacgccgtggtcacgcagccggccgtacagcgccaggcactcccagtaggggcggcgcgccgcgtcggcgccggcgccggcgtcgcagtcgaggaagagctcgtcgacgcggcggacggcggcgcgcctgcggaggatctcctccacggcctccacgccggccttcaccaccacgtagtcctcctccctcacgttcccttccagccactcggcgatccccgccgccgatgagctcgccgccggctccgtcgcgtcggcggcgtcgaggcgcaccatgtcgaacacgcgcttccctctcgggtagtgcttcttgaaccacgacgccgcgccgccgccgcgagagggcgccacgtcgatgaacgttcgtcggcggtagccttccagcgagtcgccggtcagctccgggaggtaccttggccgcagccgccggatgattcgccggtgctgcctctgcggcggctcgaggagcacggcctcgagaccggccaacgcgtcgtccttcttgctccccggcaatgcgaggagcttccggtgaggtcccaccggcgaagccgtcacggcggcgctcgtggtcggcggcgtggtcttctccacggcgaaggcgatggccgcctccgacctgtgcgcgaacacggccttgtagttgtcaggcggctgcaacgtcgacgaccccgacgtggcgaaaccggcggcgacgccgccgagcttgaggacgcggttgacggcgccgagctgaaccgcgtcgccgtcgaagaggacggcgtcgacggactcgtcggcgagctcgcggagcttgccggcgcggaagacggcgacgtggtgccgctcgaggaacggcgcccacgacccggcgtcgccgacgaacaccgagcggctgccgtggcgcaggtagccgcggtcgcttacttcggcgagtagcaccggcaggtagagctcgccgtcgtcgcccaccgccgtggccggcgagagcaccagccggagcgacacgagagaaagcacgacgacggcgaggagcgccgcccgcgccaccagccggaggagcctgccattgctggcggccctgccatccctcgcagctaatttcttcatcgtcgccat

SEQ ID NO: 7637 - DNA, 3135 bp, Oryza sativa
  Clone ID: PAT_MRT4530_14213C.1
atgtcatacacaccgcctggccgccgtggtggtggcggcggcgggggaagcggcaacggccgcggcagcgcgagcggcagcggcgtggggaattgcgcagacggcgcatcactcccgctagtgcctcaggggagagatgctgggcacactgcccgtctcccgatcctgtcgaggacaaattatccggactgggcactgttgatgcgcgtaaacctgcaggcgcaggggctctggacggccatcgatcctggctacgcggagtaccgcgaggatcgtgcagcgctctcggcgattctccaagctgtgccgcgtgagatgttgcgtggcctggcgaagcacaattcggcgaaggcgacgtgggatgccattaaaaccatgcgggtcagtgtcgaccgcgtgcgtgaggcgaaggagcagggattccgccgtcagttcgaggcgatgcgcttcaaggacggggagacgccagaggaatttgcaatgcggctcactgccgtcgttgcggacattcgcgacatgggcggagtcatggaagacgaacacatcaacaagaagctgctgcgtgttgtccccaagaagtacaagccggtggcgatttccctcgagcagctcctcgacgtgaagaccatggccctggaggagctcgtcgggcggctgtcgacggtcgactcttacagtgatgacgaggaggcaagtgatggcagcaaattgtacctcactgaggagcagtggcaggcccgtgtcaagcagcgggagcaggagggatccagcagcagcaacaagggccgggcgggctctagcaaccagaaccgtcgaggtaaggccggcgattcaccgaagggaaagaagatggccaccggcggccatggccgtcgtgacatctctaaggtgaagtgtttcaattgcgatgaatacggtcattactcgaagcagtgccgtaagccgcgtcgccaacgtcggggagaggcgaatgcgaatctggtccaggctgaggaagaaccaactctgctcatggcacacgtgatgggggtgtcgctcgccggcgaagcggccattggtcgaacaccttgtgtgcaggaagtgcatctcacggagaagaaggttgtgcttgaccgcgaggatgggcgtgaggaggagaagacttcagagtggttcctggacaccggggccacgaatcacatgacgggcgcacgctcggcgttcgcggagcttgacactggtgttgtgggcacggttaaattcggcgatggctcggtgattgacatccaggggcacggaactgtggtgtttcagtgcaagaatggtgatcaccgctcactggaggcagtgtactacatccccaagctgagaaaaaacatcgtcagtgttggtcgcctcgacgcgcgcggctacgacgcacacatttggcatggtgttttcacgttgcgttacccggaagggatgctgctagctaaggcacttcggaggttggcacaaggaggcatggtccgcgggctccagcaaattgatcataatgatcagttgtgtgacggggcacagacggcgctcgagctggtgcacggtgacctctgcggaccaatcacgccggcgacgccggggggcaagaagtatttcttgctcctggtcgatgacatgagtcgtcacatgtggatacgactcctctctgccaaacacgaagcatcggcggcgattaagcagttccaagccggcgtggagaaggagagcaatcggaagctcatggcgctgcgcatcgatcgcgggggtgaattcacctctgtagagttcatggagtactgcgcggatacaggggtgaagcgtcaactcactgcaccctactcaccgcagcagaacggcgtagtggagcggcgcaaccagactgtggtggcagcggcgaggtccatgctgaaggcggcaaacatgccggcatatttctggggagaggtggtggttgcagccgtctacgtcctgaacagatcaccaacgaagagtcttgatggggtgacgccgtatgaagcgtggcatggtcgccgacccactgtcgaacacctgcgtgtgtttgggtgtgtgggctatgttaagacggccaagccaaacttgagaaagcttgatgatcatggcacgaggatggtcttcattggctacgagcaaggatcaaaagcctacaggatgtatgatcctgtggcgcgacgcctgtgtgtgtcgcgcgacgtcatttttgatgggacgacgttctgggactggggcagcaacactgatgaagaaggagatcaggatgcctatgtggagtttacggtggagaatttcacagtcccagtccaagggggtgagacacatgcccaggatgcagcagtcactcctaccatgctagcaacatcaccaacatcaagcaccggaactgcaataactctgccatctggtgttgaattctgttcctctccaactgatgctagtgaagggactaatgaagggcccaggaggtacagaacagtggcaaacacgcttgccactacagctccaatccttgattttgattacagtgatcaatgccttatggcagcagaggaaccagcaaatttcttggaggctgagcaggagagctgctggaggaaggccatgcttgaagagatggactcaattgaaggtaacaacacttggtttctctgtgatttgccctctagccacagagcaatagggttggagtgggtttataaaatcaaacgtgatgccaaagatgccattgtgaagtacaaagctcgattggtggcaaagggatatgtccaacaacatggagttgattttgatgaagtgtttgccccagtggcgaggatggagactgtgcgattgctgattgcaatggctgctcatcagggatgggaagttcatcacatggatgtgaaatcagctttcttgaatagggaattggaaaaagatgtttatgtggttcaaccacctggttttgttgttgatggaaaagaagacaaggtgttgaaactgaagaaggccctatatggactaaaacaagcaccacgtgcatggtatgccaaattggattctagtcttgtgagcctgaattttgtcaagagtggtgtcgaaagtgctgtgtatattcaaggagagaagaactcacgacttgtg

SEQ ID NO: 7638 - DNA, 495 bp, Oryza sativa
  Clone ID: PAT_MRT4530_14214C.1
ctataaatagccggccatccctcctcttttccccaaatcaaaccgagctctctctctcctccccatgtcagccactggtcgatctcctccaccggtgccccgccggccaagccattgcgccatcgtgttttcctcgacgaggtgaacccatttttcccctttcccttctcttttagccaccacaacaagccaccaccgccactccttttgttgccacggtcgagctcttgtcgtcgccgttccggccttctccttcactctctccgccagccaccgccctccccggaagcgtggtgttcgggaacaccacccgccgccggcgtcgccatcttccagctgccggaaaaccggcgcccctccttcccttctcctctgttgctcggcgttggttgtaaagcccggcataaaccaaacccaaggtcgaagtgctgctcctggcaccccacgccttgatgcgtatagtggtcggagcttcactatcccctcgacctccat

SEQ ID NO: 7639 - DNA, 780 bp, Oryza sativa
  Clone ID: PAT_MRT4530_14215C.1
atggcagggcatagggattactgggctaatattttaagtggaggttctagagggttggaggctaagccggtgtcgatagacaacatatcggctagaagaataggaggtgatgcaggtttagtggggtggaagtgttactccgacaaccgtcgagaggatagtgaagctccgaccgctatacgcatcaaggcgtggggtgccaggagcagcacttcggccttgggtttggtttttgccgggctttacaaccaacggtccgacgttgagcacgagcagcagaggagaaggagaggaggggcgccggttttccggcggctggaagatggcgaagccggcggagggtggtgttcccgagcaccacgcatcctgggagggcggtggctggcggagagagtgaaggagaaggccggaacggcgacgacaagagctcgaccgtggcaacaaaaggagtggcggtggtggcttgttgtggtggctaaaagagaggggaaaagggaaaaatgggttcacctcgtcgaggcaaacatgatggcgcaaggacttggcttgcagagctgtggaagaggagatcggccagtggcggcaatggccggtcatgagaagagagagagagagagagagcttggtttcagtggcggagcgctcggtatggcgaggtctggcgctcgccatacctcgctccggccgccggtacccctccacgagcgtaagggcgcaggcgcagcacggtgttgccgttgctattggacggctgggccactcagtactcgtatgcattaa

SEQ ID NO: 7640 - DNA, 135 bp, Oryza sativa
  Clone ID: PAT_MRT4530_14216C.1
atgacctggttcgtgctcagcgagccgggggccggcaaaaccgctgcagcctctgccggcggggtgcgccagatggtgtcgcggacgtgttgcagtgtcatctccggaggaaggcgctgccctcgacagggctaa

SEQ ID NO: 7641 - DNA, 1923 bp, Oryza sativa
  Clone ID: PAT_MRT4530_14217C.1
ttataatatattttcgtttatatggaaatatgctggatgcttaggctcatcaaggaccatactctcactacttagcattgcaacaacatttgacatggtcggtcgatcaactgcattctcttgtacacacaacaacgcaatgttaatgcacctcaacatacacgatgactgccaatttgtaaccaatgatgcatcaagaagttcaagccatctttcctctgaccacaacttccatgcatatccaaggagattgatgaagtcttcacattgatctaaactggcatttctttttccgctaatgatctcgagaattataacgccaaagctgaatacatcagattttggagagaagaggccctcggaagaatactctggagccatgtaaccataggtcccaaccactcttcttgtagttccttcattgctatttgagccaaatatttttgctagcccgaaatctgaaattttggggttcatttcgctgtccaagagaatgttacttggcttaaggtctcgatgaatcacacgcaatcgggagtgcttatgtagataaagcagtccttgtgctattccttcgattatcactagacgtttgttccaatctagtaaatcttttttcctttcatcgaaaatatagaagtccaaacttttgtttggcaagtattcatagaccaatattttctcctctccttgagagcagcatcccaagagcctaactaaattcctgtgctggagtttggcaattagttggacttcatttttgaactctaggaaaccttgtcctgaatgtgaagcaagtctcttaactgctatctccaatccctcagaaaacaggcccttatatacagggccaaatccaccttctccaagtttgttttcttcagaaaagttatctgtagccttgataacctcacgaaactcgaaaaccgaaaactctgaaatctctccctccatttcgcaaattagttcatctcctcggaacctgcgactacgcttttctcgcaatctcactctatcttttctgaaccttcttgaccaacgacagtagtaacagacgatcaagcagagaactactgccgctacaggagctgcaatagcagcaattacccatgatttgctcttctttctgtttttggtcggagcgatggaatccggcgccggagttgagcccggcgggctgacacgccgcgtgggctcgccggcgtagaagacaaaggcctcgaacctgagattgcaccggagcaagaggacgcgtcctcccaagcgcacggaggtggtggagttcaccatggcgatgaggcgctggaggcaagccaggcagtcgccggcggccaagtccggcgtgcactgcgccagcgagtagagcgtctgcttcgactcgctgcttccgtccatgaagcctgtggcgaaccgcctcgccgccgccgccgccgtccgggccgtcaccgtcagcagctcgcggacgttggcggcggcgacggcggcgtcgccggtgatgttctgctggttccatgcctggaagagcgtggcgttctccgtgatgttgggcgcggcgaggaagtcgtcgccggcgaagcggaggaggcagtcgtcgtagtagatggtcgccgacttgtcgctcgggcacgtccgccgcgcgtcctggaacgaggccgcgacgcagtcgccgcaggcggtggcgttggcgacgtcgccgcggcagagcgcgagcgcgtacgccgcgtcgggggcctggccggcggtggccgtggcgaagtggtccggggaggaggaggcgttgctcgggagggcggcggcgaggcgcgcgaggttggactggtaggtgccgttggccgtgtagttgccgccgttgccgcagagctgcgccagtagttcgccggcggcgagcggcatgatgctaaggaggagcaggacgccgaccat

SEQ ID NO: 7642 - DNA, 323 bp, Oryza sativa
  Clone ID: PAT_MRT4530_14218C.1
tttgggggggttttacacagatcgcgtctcccccgacggacagcatccacatttatttttcaagcctcaactcggaagacaacgagactaacgtgcctttcaccctaacagctacacggctcatcccaagaagcaccctacatttagggagacagagggagtcccagagggagaccttaaaacactagcgtgagaccgtttgttgatccgaggctttggccaggggggaaaaagaccatttgcctcaaccccaaaccgcctggagaaccctggcccagagaaggggatgggcctttttaaacattttcccacccccaaaggga

SEQ ID NO: 7643 - DNA, 1635 bp, Oryza sativa
  Clone ID: PAT_MRT4530_14219C.1
atgatgaacgcctgctgcctctgtctcactgatggcactgaggtcaagtcccgaatgccgggagacgccacgtactacatacctgcctactcacccatctcggcgaggccacagctgcatgccggcgtcgatccgatgcgcatgatgcaccggcgcgccattttgaggccggcctcgtgctacgcggtgtcgggaatgtacgaggcagctagcgcctttcgttggctctcccaacccaatgcacatgccaggacgtcgtcgtcgtcgatcgcctacctctccgcccgcacaccgccgccgctttgggcaattggcagccgcgcgaggatactgccgtgcagggctaaatatttcgattttggcatttgtatcggttatgatcaccatcagacagcattgctgtgtttctacctgcctgacaaagtgaccaccatcatggctacttgtactgctcgccaattagtcttcgatgtcagagacttcggcgctgtcgccgacggacagacagataattccaaggcgtttgagagggcgtgggcgaaggcgtgcgcggcgccggggagggcggcggtcgtcgtgcccgccgccggcggcggcggcggtggcggcggtggctacctgctccacccggtggtgttccggggaccctgcaaggggttcgtcgaggtgcgggtcgccggcgtcgtccgcgcgccggccggcctcgacgcgttccgggggtatcacgagtggatcaacttcgccggcatcgacggcctgctcgtcaccggcggcggcacgttcgacggccgcggcgcgtcgtcgtggcacctcaatgactgtccctggaaaccggactgcgtgcctcctccctcatccatcaagctggggagcgtgaggaacgcgaccatcacgggtgtgacgtcactggacagcaagttcttccacgtcaccatcgtcgggagccacgacgtggaggtgagccacgtcagcatccgggccccgcgcgacagccccaacacggacggcgtccacatccagggctccacgggcgtccggatcaccgacacggcggtcgccaccggcgacgactgcgtctccgtcggccccggcagcgccgacgtgacggtgtccggcgtgtcgtgcggccccgggcacggcatcagcgtggggagcctcggccggagccccggcgaggccgacgtgcggcggctgcgcgtgtccaactgcaccatcgccggcacggccaacggcgtgcggatcaagacgtggcgcggcggccagcggagctccgccgccgccgcggccgccgccgccgtttccggcctcgtcttcgaggacatcgtcatgaggagagtccgcaaccccatcatcatcgaccaggagtactgcccctatctctcctgccaccatcaatcggagcggcggccgtcggtggtgaggatcagcgacgtgaagttcaggaacatcaggggggtgtcggcgacgcaggtggcggtgaagctgtcgtgcagcgcggcgagcccgtgccgaggggtggagctcagggacatcgacctcagatacgtcaggcgaggggtggccaccgtgtcgcggtgcgccaacgtcgccggaggcgtcgccggcgggacgcttgtgccgcccccttgcatatga

SEQ ID NO: 7644 - DNA, 4476 bp, Oryza sativa
  unsure (1)..(4476): unsure at all n locations
  Clone ID: PAT_MRT4530_1421C.1
atggacgcctgtggaattcgggcgccaggggatgtgctgctgcggaaatctgagctctcgtcggcggcagcggcggccaagaattacggcaatggccacgacgacgccgcggtgaggcgcaaggcggcggcggggtcgccggcgacgccgaggaggcacccgtcgccgaatgccggtcggtcgtcggcggcggcggcggaggccgcggggtcgcaggcgaggaggtcccagtccaccgagcggaggccggcgaccccgtcgaggctgtcacctggcggctccagggcggccgccccgtcgtccaggatctccgccccaacctcgccgtcgtccgcgccttccagcccgtcgtcgtcgtcctccagctcgtccacgcccgtgcgcgacgccgtcgccgccgagtcgcagagcgctccgaggaggctggccggcggccgggctcctcctgatgggctgtggccgtcaatgcggagcctgtcttcctccttgcagctcgaggcgaaggggaaacgcagcaatggcggctctgcggatcaggccaaggcgagggatgcgggtgacaggaagaggagcccgtcgagggggaggagcgccgctgagcagcagccggagaatccgcacgccaaggtgattgaccaccatcgctggcctgctatgatggggggcagggtgtccgtgagcgcaatgtcgaggagcgtggatctcactgacaagatttccaggccagcactatcatcgattccatctcgcggcgtctcaccgaagaaagcaacgatggcatctactacaaatgcattggcaagaagtattgatcttgctgacaagattgatcgcctggtctctttgtcggtttcatcaccaagaacaccaactgcttcaaatggcgcagctgatgaatcgaaaagcatgagtgttagtaaaggtaccaaacctgcagccgtggcaattccatcacgagtttctgcaataataacagctacatcaggtggtataagggccctgtctaagagtatggatcttactgaaaaagatatcggtaccctctcctcggcagcatcatctcctgggatttcaccaagtgtgtcagtatcaagtatgtctaatgctacatcacaaactacagcaaagtcaacacgaggactttcacctagaagaacatcaacatctattggcagtggtgctttatcaagaaacatcgatttgccagaaaatgataagagaccggcctcctcatcagcttcactgaggggaaattcgccaagaaggcgacttgcctctgacagtgttaatgctgttgtgaaaaacatagattttgctgagaaggatagcagagcagccatttcatcgacttcatctcgagggttttccccaagaagacgacttgcctctgatggccttgatgcaatatcaagaagcacagatttttctgacaaagatagcagaccatccacatcctcatcatctgcacaacgtgggatttctccactaagaaggcttaccatatcaaagggcacggactttactgataaatcttacaggccatcgacctcttcagctgcatcacgaggtgtttcaccaaggactcgattagcatctgacagtgctggtaatatattaaagagcatggatttggctgatagagacaataaaccatcaacctcgtctgcctcattacgtggtatgtcaccaagaaggcggcttgcatctgatggcatttcaaaaaacatcaccttcactgaaaaggacgacagaactatgccctcttcagttgcatctcaagagatctcaacaataagacgtcttccatctgacggtgctgacagtatatcaaagaatatagaccttcctgaaaaagttacccgacctgctacctcctctgctgcgtcacggggcctttcaccaagaagacgacttgcctctgatggtgtcaatgctatatcaaagagcatcgatcttgctgacaaagataccggacctgccaggtcaacagctgcattgcgaggggtttctccacgtagacaactcgcctctgatcgtgtagattctatatcaaagaacacagattttactgaaaaagataaagacaccagaccttccacgtcgtcaggagcatcacgggggatttcaccaagacgacgacttgcctctgatggtgtagatgatctatcaaaaggcataaattttagccaaaaaagtatcagaccttccacctcttcaatggcatcacgagggacttcaccaagaagacggcttgcctcggacggtgttaatgctttactgaagagcacagattttactgataaggaccacagaccatctacctcatcagctgcactacgggggatgtcacccagaaacagggttacctccaagtccatcgatgccaaaagcctggatttttcagacaaagatagcagaccattcaccccatcaggtgcatcgcagggaactctacaggaagttgcccttgcttccgatggcattaatgctctgtcagaagctgtggatactgctgtcataggtagtttacagtccacgtcatcagttgaatctggtgagacttcagatgctagacttaataatggctccggtactgttgtaaacaggatcgattttgctcaggaagttaatatagcaaccccagatggttgtaatggtcatatttcagaaagcatggattctcatgacataggcacgtctgcaccctcaatgtcaattacgtcacaagagcaatcaccaagcagaactgtttctaatggccctaagactctctcagaggatatcaatgccactaaaaaaaataacagagcaatgacagtgaagattccatctcgaggtgctagtccaagaaggcgacttgcatctgaaggctttggtactatatacaaaagcatggatttttctgagaaagataggacatccataaacatggcaacaccatcacgtggaatgtcacctagaagaacagcaagatctggtattgttgatatgtcaaagagtatggatttttctgagaaatgcaatggaccaatttcctcaatagctccatcacatgtggtttctgcaagaagaatactgggaccagatggtgctaatgccatgtcaagaagcatggatctgactgataaaatcagacaaccaatctcttcaactgtccggaaaatgtctcttgctgatagcagagcaaaagcccctgaccttttgtcaggtgacatcgagagtccaggttctgccaatggaaatgaaagccaagaggagaatgctggttcaagcctagatgcaccttcaaatgattcagaaaaatctgcacctccgaaacgattggccagaacattatcttcaccatcaccaacaaaggcttcatcaatatcatcttttacccctaggaggatgccgagcccatcgaggaatagaccttcaacacctgtctcaccatgtagttctaccagatctgattctgcctcttcgattcttagctacatgggcgatgtaacaagaggaaagagaagcccaagtcacatggaagacgcccatcaactgcgcctcctatataacaggagcttgcaatggcgctttacaaatgcttacgtagatgaaatgcaatcagttcagaagatgagtgctgagactatgctctacagcgtatgggatgctaactccagcctgtgcgattctatggttatgaaaaggagttatgttcaaaggctgcgacaggaggtcaagctaggagttgtgttgaaagagcaaatggactaccttactcactgggcagcattggaaacagaacattctacttctttatctagtgcaattgaagctcttagagcaagcacactacggcttccagttacaggaggagcaaaggctgacgtttttaccgttaagaatgctgtcagttcagcagttgacattatgcaagcaatgggctcatccgtctgctacttgttatcaaagttacaggccacacactctctggttacagaactttcagccgttgctgccaatgaaagctccatgctcaatgagtatagagaactcttaggtaccgcggcagccctacaggtcctagagtccagcctaaggacacaactcatacaagaaactgagtgaacagcttaatgcatgtatgtctaactaagaagaatagaatgtagaggtaacaccattcattagtttcagtagctgactgtgtatcttcatgctctctcgccccacttcctattcctttttttcccttttctagttaggtgttttcccatttcttcttttgtacttcctgcatgccccttttctgtctctacaatttacatggaagagaagtgcatcaacacgaaatcatggatcaatccatggtgacgagcctgtcaatgttttatttatagcggcctacaaactgaggacgccaacgtcctgaaactgaaaacttgttgtaaagattagctcttctcttccccntcttacccaaaaaaaaaaaaa

SEQ ID NO: 7645 - DNA, 769 bp, Oryza sativa
  Clone ID: PAT_MRT4530_14220C.1
agtgatccccgggctgcaggaatcggacgaggactagatacttccaagtcccctcctttctcctccaagcactccagctaccggcggtcgaggaggcggctccaaatctgcagcggcagaccacgcgctcgacgtcgatggctcgggcaggcgcatcagggtactccgcttgaccgaatctctgcctccatcgcacattggaggcagagaaagacgagagccatagtcggcgtgagcatcgccgtcgcttccagccggctctgcatcagcgcttgcgctgcgtgcgcctgctgatcctggtgagctctcgtgccgaatagcggtggagattcgcgtcccttcccatgtccaaggaggcgccattgccagatttggtggagaggtggagttaagccatcctacggatccagccatgtgcaaccaaagccgtgaagcggaagctgcatctccaccaatccttcacctagcccgtcgcatgctctccgccgtcgccattttactttggctaaacggcgagagctggcgccggatctggaatcttgagagggttcttccacttctctgcgctcagacgccagctacgtacaccaccactgctgaagacgacgtccaagccgtagcctgcgccataatcctcatcgccgccaagttccctgaagcaatccggcagcttgtctgacgcctcaccccgacgaaagtttgcttcttctctggactagggcctcctcgattcggactacctacgaaagatggctggtgggcacacaca

SEQ ID NO: 7646 - DNA, 353 bp, Oryza sativa
  Clone ID: PAT_MRT4530_14221C.1
aaaatgaccacaccagatcacacagggccggggcagaacctggaaacaaactcccacttccgggacagaatacacctctccttccagactacaacatccaaacacggggaccaaaagaacacctgcaagcatacgggacacgtacggccatacactggacggggtccacacacgcacactttcctgaaaagacgcgcatcggtcgtgaaccatagctagcttaaatgaaggggatggggacagacggcactacggaggaggaggcgcccacttgccggggaccaactgggaggagcaggccaaggcggctccggaggccggggctgctaggcgggccttgaggggcacgaggg

SEQ ID NO: 7647 - DNA, 210 bp, Oryza sativa
  Clone ID: PAT_MRT4530_14222C.1
atggccggaagggcggcgccgttgaggagctccggcgccggcggccggcagctggtggtgctcatccttctcctgctcattctgttcctattcacggcgcccatcgtcatgcgggatggcaaaggtggaatatgcgaggagaggcagaagagtcggctagaggcaggtacctacttgctactcccctgctgcagcagagatgaaggttag

SEQ ID NO: 7648 - DNA, 378 bp, Oryza sativa
  Clone ID: PAT_MRT4530_14223C.1
atggcaaggcggcgacggcaagacggcggaggccgcgtgaatccacgtcgcgccggtggggacaaaggcaacggaggtcggtcgccgccggatccagacgacggcaacggcaacctcgaggacgactggcgacggtgcagacgacggcgacagcggctagcgacctcgacaacgatggtggcgctccagcgtgggttcaagatgctcgccgtcgtgctctccgccgccggctccccaacaaccccgccacggccccctccttgccgccggcggcggcctagcgcccgcgccgaggagctccgccgtaccatcctggtgcacggaagccgatgctcgcggcggtggcgaggtcttggctgcctgcatcatccgagctga

SEQ ID NO: 7649 - DNA, 1482 bp, Oryza sativa
  Clone ID: PAT_MRT4530_14224C.1
ttctgctcgccgcgcacccctcccctccccatgtcctcgccttcctccccgcgctcttgctcccgcagcttcacgcttcccccgcactagtacagactcctgatggtggtggaggtaaacctcggcggctaacccatcgtccaccgcgcgcggcggctctgtttttggtttgggcggcattttggtctccttgggggtgtggatttgggttgggggggaggagagctgggtgaagatttgtggcggaaactgttgggggggaattgatggtgggattcatggagtgcgtgcacgattggttgctgtgggacgccgtcctggaatgcggagggatccggaggccaccgattagatagcggccgggggaggagggagaggagaggagagaggagcaggcggtggcagaggcggaggccgtcgccattagcaccagtcaccccgaggcgcgagtcaccaagccatgggggaagacctcgtcaccaccctgtccatggagaacggcggcggtggcggtggcggtggccaccacagcctctgcacccttctctccatggatcccgccggccacctcgacgaccgcgccgtcggggtcatggtgcagccccgcatcggggacggcgccgggcgcgcccacgccgtgtcgctctccggcgcgcatccgccggacatcaaccagccgtggcagactgacctctgcgacatgctcgacgtcagcctcggcccgcagattcaggtgtacgacgccgaggcgctcgccgtgctgagcagtgccccgaaggctgggaaccgcaaggccgccaagcgcggggacagcatctggggcgcctggttcttcttcacgttctacttcaagcccctgctcgcggacaagtgcaaaggcaaggtcacccgggatgccaacggtgtgtcagggtttgacaagacggatctccggctcgacatgttcatggtgcagcacgacatggagaacatgtacatgtgggtcttcaaggagcggccggagaatgcccttggcaagatgcagctgaggagctacatgaacgggcactcccgccctggtgagccgcaattcccgttcagcgttgacaggggatttgtgcgatcacaccggatgcagcgcaagcactaccgtggactctcaaacccacagtgtattcatggaattgaggtggtgagatcaccaaatcttgcaagcataactgaggtagacaggaggaggtgggtggagcttacagggagggagctcaatttcgcaatcccgcaggaggcctgtgattttgggacatggaggactatgccaaacacagagattgagcttgacaggccacatcctgtcatgaagggcaacgttcatcaacacccaaagaagctgcttaatggatctggcttgaatttgtcatcaccctccaatcactcaggagaagatggcatggatctctccccagttagcagcaagcgcaggaaggaggtgtttccgcatgc

SEQ ID NO: 7650 - DNA, 222 bp, Oryza sativa
  Clone ID: PAT_MRT4530_14225C.1
atggtggcaaaattaaggataaaagaacaccacttaagctcacataagttttatttatcaattatcaggggcatgtctgaagagcagggtttcacttattgcgctgattatcacgcttaccgcgggacaattatcgcggttatcgtgctaccgcgaggtggcggtaacctcggcccaaactctgttgaagatctttatttatcggcagaaataccttcttaa

SEQ ID NO: 7651 - DNA, 465 bp, Oryza sativa
  Clone ID: PAT_MRT4530_14226C.1
atggagcaatcaaattgtaagaatgagaatatgtttgatagcggagaggatgtacacggtcatctgatacaacgaggattcatgaagggctatacatattgggtgaaacatggaagcaagaatcaggaagtggagcagcagcagacagaagtgggtggatccgccaaaggagctagagctgatgttgccaggaagacgaaggaggttgatcatctgttggcaaaattagaaaataagggagtggagatagatggcaagatagctagtattattgatgatgggatagctagaattagagatgaagctggcgaggaaggagtgagtatacgcaaacatccttttgatagggagcacctcgacaagatcagaaaagagaatgtgatgaccatacttgtcaccgttgcatctgttgctgttggtttcatcatgggagcggaatggtatgaactgccttccgtgcgttaa

SEQ ID NO: 7652 - DNA, 829 bp, Oryza sativa
  unsure (1)..(829): unsure at all n locations
  Clone ID: PAT_MRT4530_14227C.1
aagaggacccctattttncctgacnaccaagtnccntncaccggcctggtgttgtttttgtggngttggggttgttgatccgtaccgttacgccggtctgaacccgggacgcccggcacagccnccncttccgactncaccttnctgcggtacgtccaccttgtcttgcccttatactacatacgtttgtncaccttctggtgtntatgttnccccacattgatcagttnaacagtagtatnctcacccacatccccaccgttncgcccgggcctggtnctattggtgttgttccactactcattgctcagttagtcaccctagcaatcctaaccactgtcatccttctatcagtattctaagcacctttagctttctaccgttcctcctccaccaccccctgatccgctgcctacgcctcctgatgctcctgcgtccccaactcctcctgtgacaccaccaccaatcgctgctactcctattacacacctcccgatccacctcctcctccgctccctctccttcacttccgcctccgactcctcatacccaccttcactcccacggcaaatgatcatgatccccccatatgctccattcggctctccctcaagcccgatcagtcttccgatcatactactacgcatcctgcctcacaccgcctcccgccccgtgtcaacctctagcgcacgccgcacctccgactccccaggccagcacccgactcgcaccctacaggcaccacaaaccccgcgaccgccaaccccacgaaacaaccccacaaggcgcacaaccaagcaagcaaacagaaacaaaagaccagaaaaan

SEQ ID NO: 7653 - DNA, 2435 bp, Oryza sativa
  Clone ID: PAT_MRT4530_14228C.1
ctccatactatgttagaactctgaaaactcggataaacatctacatggactaaagacacatacaaaccgggccccccctccaggctgttttttttgggtttttttttttggactagtaacaaattgaagacgatatatgtaaacggaacgaaagaatgggctgtgacaaaaattaaacacgatatatgaacttggtcgtaatacaaaaagtacagcagcctggtgtctcctagatcctcaagcacaaggaacaaaagcacaaaccaaatgacacctcacagctgcgttgatctatgaatgacctagaacggggtaaaatcagctatatatgccccaagataggggaggatcaccaactgggagtaaaggagaaacatgagtatgataagtagatgatcaggactatttggaccatgcaaccgcatcaatttctgcttgagcactccgatatagctccagcctcttcgcaagattagtcctccgttccatgacggcggggtcttcatcaagaagcttagaaagttgtttaatctctcttgctcccaattcagtaaagaagtgatcgagcagtgagcgctttgcctcccgcacttgacagtagacaatagatttcggaatagagttcctcaaggttgaacataccatgttaatatatgccagaaccgttgttccaattcgtctaagataagaatcattatatctatcaaaaatagagtggcttggatttccacccttctcaacatcctggggaagtttcctgaagaaatctacggttaagtagctgcattccatatcaacaagctttaatgtgtttttcttgctttcatccctcattctgtccaatgactcaaaagccgcattgcctacttccacacgaagagtggggaactgcttcagctcatgtgtttcattgatggccttgtgcactaattccttgagtatcgcatggaccgcatccacagctgcctcagcaggacctctgatactaacaagacaagactctatgagccgtcgatatccttgctctggagctattaaatgaggttggtatccatcagcctccgttatgagctttttcacattttccattgccagttgtttgtcaaactgcaaccgtttaatggctacaggaaactgattgtcaaagacatgatagattttctcaccaccaggacgcactccatccagatgttctttgtagataccatcaaacatgcggcatatttccatgatcgtgtacagctttcctccagcatctgtagcaatgggcttcccaagtcgattaagttctgtctccagttcggcaattgtctttgtaatgagagattggagccctgggattcttgacttaataacagtctccaaatgcttcgagagactctttgctaaatgttctgatcccatcctatgagcaaggtgcttgtattctggcgtagttgaaaaatattcacgctctctgcgcctagcagcaatcatgtccacattcttgttgatatcctgctgagatcgattgacgacaccaatccattgttgttggagccggtatgatctgccttccaatatatcaacagcatcggtgcccttgtccattagatcaatttttgtaagcacaccaaacgtcctttcacctttggggtcaacttcccgtgaaatcttaattgcatcagaagttgcaagatcctgattggctggagaaacagccagaatgatacaattgggcttttctatgaacgagcgaaccatgttttcaatgtcctgaacaatactgtcaggctgaccctccaatttgcaggaagacgatcaacagcaactttagtaagcccaggaagatcgataagagtcaggttcacaacatttggagaatatatgcttaaatgaatagggaccgatgatatttgctttgaacgaccagtttctctgtcagtttcatcagctatctccttcctcacaagagcgaaatcagtgaatctcttcctgggaaggtgcatgaactctgcatattctctgtctccgtcgatcctatgaagctgcagcaccaagggacgacgggtgacaatgcctgagcctcttggtaggaaatccttcccaacaacgctctccagcaccgaggatttacccgaactctggcctccgacgacggcgatggccggcagcgagtcccagagggtggggagggcgctctcctcgccgtggtcgccgagggcggtgcaggcccgctgcagcttgttgacgagcgagatcaggttctccatggcggcggcggctcagcgagatctgggcgagatcgcgcgcgtggggggaggggcgagatcgaggtcggtggagaggagggggggagatgagggttggcgatgccgactgccgagccgcgtcggggtcgagagctgcgcggcctcgggctgtgtatggtggtgcgccccgacgcggacgcgtgg

SEQ ID NO: 7654 - DNA, 902 bp, Oryza sativa
  unsure (1)..(902): unsure at all n locations
  Clone ID: PAT_MRT4530_14229C.1
tgcacagggcttaggaaggtccttgacaaccgtanagacatgcggtggcaagcaaaaactccgggaaagacgacgctagcttaattcccgcaacgaacgnagaagaaggaatcgacgacggcggcgattggccggagttgaggaagaaagtaaggatctctttgtcggcggctcttcaagcgcgattcgcttggatggcctcctcctggaaccttggagaagatgatggtgcagcggtttgctctgagatggacgagatcgacgggaacggcggcgcaacgagcggcggcgctctggacaccgaggacaccgacgagctcgacacaagatgttcgatccatgcaacaggcaaaacaaaggacatgaacgagttaggcattatttacagatcatttttccatgattattgtgcggcgaagctcaccagagtcgatttcatgcagtggacgttcgggaacgcggacctcgccatcgctgatctggagcaagcctggagcgccgccgtggatcgcgtcgccgttcctgtcaatccgcccgaaggccaggagaagctgacgccgtcgccatgccattctctgccgccgccggaactcttctcgggcggcgggcgggcgaggagccgactgccgacgggtggccggcggcgggcggtgggcgggcgaggagccgacgccgatgggcggccggcggcatggatggctgtgggcgggcgaggagtcgacgccgacgggcggccggcggcggggataggccggatggcggcggggatgggccggatagctgcgggcggcggcctagcgaggagcccacgccgacgggcggccggtgctggggatggctgccggcggcgcgcggctgggggaaatgatggctgctggcggaaaataggacacgaaggctga

SEQ ID NO: 7655 - DNA, 234 bp, Oryza sativa
  Clone ID: PAT_MRT4530_1422C.1
ttggcccttaacaccccgttgtttttaatttttttttttttttttttttttttttttactcttcctaattatcagaagaatttttatttcattaattccccccctggattaaacaggctaattttataaataattcaccacaccttatttcattgatcagggtcaaaacctgcacaaaaaaacacactaccggttcaaatttcaccttttttccaatactcgaccatccatccc

SEQ ID NO: 7656 - DNA, 339 bp, Oryza sativa
  Clone ID: PAT_MRT4530_14230C.1
tttgtgggcaaagaataagcacagctgttcatagactatttctttttcttaaggagacgtgctaatcagacttctttcaccataacattggcgtaggcattaacagataacaaatacacttatttattttgaggaagaccatcaaacacataacacttgcatggactataaagctggagagggggggacagggtttacagaactatgggctgggcgcgctgagaatgatagttgaattgtggcgaggaaacaagagcaccaggggcatccggaaaaaaagccttcgaaagggagttttcttgatggagcgggttggacacttgaggggcttgaccacct

SEQ ID NO: 7657 - DNA, 183 bp, Oryza sativa
  unsure (1)..(183): unsure at all n locations
  Clone ID: PAT_MRT4530_14231C.1
atggcagaagtggccaatgtgggaacaaagtcgtccatcaataacaatgaagacaccagttggcggcgacgaaggcggtcgacggtgaaagcgaagatgcccactaatggcggcatgataggtcagcncgtgcagagacaccagtcggcggcggcggaggcaagccggtcggtgaagacgtag

SEQ ID NO: 7658 - DNA, 136 bp, Oryza sativa
  Clone ID: PAT_MRT4530_14232C.1
atgaggctgatcaagaaaaacttgacgcacacggaaaaggtgagatctcaagctctccgtgtatgcgggaagatcgcgacctcccaaaagagcatgaaacacaagcgatgtatacaggttcaggccgttgagaagc

SEQ ID NO: 7659 - DNA, 520 bp, Oryza sativa
  Clone ID: PAT_MRT4530_14233C.1
ggcccaaaaaaggggaagggcttaaaaataaaaagggggggggggaaaaaaagatttaaacatacccccccccccaaggagagataaaaaaaaaaatattaaatataaaaaaataaaaaaataaaaaaaaaaataaaaaaaaaaaaccctgcccaaaacagggttttgcaaaaaaaaaaaaaaagggccccgatctttaaccccgggggggaacacaaaccgggactaaaggggggtacccacgggacaaaaaacgttcttttgttctgggggggggaagggcccccccccccgcccgggaaaccccgcaagggggaaaatttgggctttcccggggacccggggaactttaaacccgccttgacgttgggctaaaaaaacacccacccaaaaaagttttttgcccctcccttggggagcaaaaagccggaggtgggggaaaaaaggcccctcaacttacccccgagggaaaaacccccccggggggggggacaaaaaaaacctgcctcccacaacgaaa

SEQ ID NO: 7660 - DNA, 1032 bp, Oryza sativa
  unsure (1)..(1032): unsure at all n locations
  Clone ID: PAT_MRT4530_14234C.1
atgggcgaggaagccgcggcggccacggtgacggcggcggcggcggcggcggcgagcggcggcgcgccgcacctgctcctcatctgcttccccgggcagggccacgtcaacccgatgctccggctcgccaagcgcatcgcggcgaagggcctcgtcgtgacgttctcgtcgacgtccgccatcggcgccaagctcgtggagtcgtccggcgtgtcggtcggcggcgacggcgtgccgctcggcggcggccggatcaggttcgagttcttggaggatggcttcgacgggagcgacctcgacgagctgatgcggcacctcgggacggccgggccggcggcgttcgccgagctgctcgcgcggcaggaggcggcggggcggccgtcgtgcgccgtgttctcgctctactaccaccgcgtccacggcctcgtcgagttcccccccgaggacgacctcgacgcgcggctcacgctgccggggctcccggcgatgtcggtcgccgacgtgccgtccttcctcctcccgtcgaacccctacatgagcctcacggaggcgatacagcagcagatccgcaccatcgacaaggggacgtgggtgtgtgtcaactccttcaccgagctggagcggcacgtggcggacgcgctcacgcgcgtggccacgtcgccgcnccgcccgccgctcatccccgtcggcccgctgatcgagctggagggcgacgccgcggtgcgcggcgacatgatcagggcagcggacgactgcgtcgggtggctggacgaacaccctccgcgctccgtcgtgtacgcgtcgctcggcagcgtcgtggtgctgtccgccggcgaggtggcggagatggcgcacgggctcgcctccaccggccggccgttcctctgggtggtgcggccggacagccgcgcgctgctgccggaggggttcctcgacgccgtcgccggccgcggcatggtggtgccatggagcccccaggagcaagtgctcgtccaccccgccgtggcgtgcttcttcacgcactggggttga

SEQ ID NO: 7661 - DNA, 1544 bp, Oryza sativa
  Clone ID: PAT_MRT4530_14235C.1
gcagcacgggagagatcgatcgcgggatcgatcactgcacgccagctgctcggagaaaaggcgagaagaaaatagtgagctcgcagctagctaagttagcttgcttagccatgggcgaggaagccgcggcggccacggtgacggcggcggcggcggcggcggcgagcggcggcgcgccgcacctgctcctcatctgcttccccgggcagggccacgtcaacccgatgctccggctcgccaagcgcatcgcggcgaagggcctcgtcgtgacgttctcgtcgacgtccgccatcggcgccaagctcgtggagtcgtccggcgtgtcggtcggcggcgacggcgtgccgctcggcggcggccggatcaggttcgagttcttggaggatggcttcgacgggagcgacctcgacgagctgatgcggcacctcgggacggccgggccggcggcgttcgccgagctgctcgcgcggcaggaggcggcggggcggccggtggcgtgcgtcgtcgggaacccgttcatcccgtgggcggtcgacgtcgccgccgccgccggcatcctgtcggccgtgctgtgggtgcagtcgtgcgccgtgttctcgctctactaccaccgcgtccacggcctcgtcgagttcccccccgaggacgacctcgacgcgcggctcacgctgccggggctcccggcgatgtcggtcgccgacgtgccgtccttcctcctcccgtcgaacccctacatgagcctcacggaggcgatacagcagcagatccgcaccatcgacaaggcgacgtgggtgttcgtcaactccttcaccgagctggagcgcgacgtggtggacgcgctccgcggcgtcgcgacgtcgccgccgccgccgccgctcatccccgtcggcccgctgatcgagctggagggcgacgccgcggtgcgcggcgacatgatcagggcagcggacgactgcgtcgggtggctggacgaacaccctccgcgctccgtcgtgtacgcgtcgctcggcagcgtcgtggtgctgtccgccggcgaggtggcggagatggcgcacgggctcgcctccaccggccggccgttcctctgggtggtgcggccggacagccgcgcgctgctgccggaggggttcctcgacgccgtcgccggccgcggcatggtggtgccatggagcccccaggagcaagtgctcgtccaccccgccgtggcgtgcttcctcacgcactgcggctggaactcgacgctggagacggtcgccgccggcgtgccggtggtggcgttcccgcagtggggggaccagtgcaccgacgccatgttcctcgtcgacgagctcgggatgggcgtccgcctccgcgcgccgctgcggcgcggcgccgtgcgcgacgccgtcgacgccgccgtggcggggcccgacgccggcgcgatgcggtccagcgccgcagcgtggagcgccgccgcgcgggcggccgtggcggccggcggctcgtcggaccgccacgtggaggcgttcgtggaggaggtgaaggcgcgagcggctaaggcgtga

SEQ ID NO: 7662 - DNA, 498 bp, Oryza sativa
  Clone ID: PAT_MRT4530_14236C.1
atggttgtaggtttggttggggagactagaatcaatgcctccagggaggtatatggcaccaaaaggcgtcgccgtcgatcacacaaccgggggtgtgcacggctttcaccctctctccccaaatccaaactgcaggcttgcatctgccaaggtagccggctagcctgccgagcaggtcaccggagccaggtgcggctgctcccagaccttctcgcccgcaccgttaaggaagcggcaacgaagggagatgagggtgaggagggtgttgagggaccagcgagtacagcggcttcggagagtgaggacagcggctgcggagcacaaacagaaatcagaagcacagaggggcagctcgccgaactggcgccgacacggtggagacaaccaccgccgcctaggcgccgcgcgcccctgccttcgtcgtcgccctccccgccgctgttgccgttgccctccctgccgccagtcgccaccccgccagcgttcgtgcgcagctag

SEQ ID NO: 7663 - DNA, 593 bp, Oryza sativa
  Clone ID: PAT_MRT4530_14237C.1
ggaaaccaaagcactgaaacccccttcctggcaatgccattgaaaaaaccaaccaaaccaggggttgatgctacaaaatcggggggatgaccaaacccaaaacctaaattaacatggagctaatcaaggaaagcatccctctctgagttggaaaaatgttcaggaccccaaaagctggatcaaaaacagggagaggaaaaaaattcaccccctgcatcaggaaaggatcgcgtcccaatcgatctccaacgacgggtacttgggcaaaaggaagctctcggactcgtcccatggcccctccaaaaagtcaagcagttgcatttccgggacaacgtgggaggaccccgtcaataacacctccccgtcggccgaggaaaaactttcggaggcggagcaaacgggctcgcttttgaccaccgggctttccaaggaaaaaaaggggcttggggggttcgtccccgtcgtcaacatcgtcgtcgtcgtccaattgctttgggtttggggttggggttggggcaagcccatcccgtggcaaatggcgtggagcttggcgtccaccgcggcgtggagcggcgggccaaggtgggcccccc

SEQ ID NO: 7664 - DNA, 405 bp, Oryza sativa
  Clone ID: PAT_MRT4530_14238C.1
tgtaaggaagagtttcccactaagcctattaaacccggaacacccactggggactccctcacctgatcccggtgtaattggtaaggaaaaatgttccttgctctccccccctaatataactctcccctggaacacacagcccctaggccccttttaaggtgaccacgtccacgccctgcgtgtctaattagatgaacttgcctatactttatactatgctggatcctactttctccgtctcaaaataaaccaacatattatgagatgcgataacctgctcagatcattatactagaatacgtcacatctcatgatttgttttttgagacggagcgagtactactaaatttgtttacaacccttgctagtttaattactccctcccaaaaaaaaaaaaaaaaaaaa

SEQ ID NO: 7665 - DNA, 716 bp, Oryza sativa
  unsure (1)..(716): unsure at all n locations
  Clone ID: PAT_MRT4530_14239C.1
gtttttcttttcttgttagaattctaggattcctcttttatccgtattgactatggggttcgttttccgagttttactatattatagataattataagaaataacaatggaagatccgctaatgtctgtactgaaaaaactctaccaccaccaccaggccccagctgaaattgaatgccaagcaataaataattttggattatggaacttaactttgcagatcttcgatttaaattattatcacggatgaacggcgactgcctgatagcttcttcagtgaactgatatttctctttataaagccgaacagtttctgcatgagcaagtagttggtgatggcatgcagtgtaaggctcccttcctgaatctccaactctgcattttcccttctcccaggatgaacaccggcctggtgccatggtgccagatgcatagcccatagagcagaagttccaaggctcattgaagggtgatccaatgtttcacccggtcaccaaactctttgaagcatatttcagcatagtccttatagtcatttctgcaacagttctttacagtcaataacgttagcacttttttcattgcaagtaacagtagctgaaaagatatcacagggagcactattggggctggtngtcagtggaacaggggttaaatcctgtccaagcanaacccgtcctgactccctttccaaaatagcagtaaacaatattcgc

SEQ ID NO: 7666 - DNA, 726 bp, Oryza sativa
  Clone ID: PAT_MRT4530_1423C.1
atgccgcgccccgtcgccagtgcgctctttgtcaccggacgtcggcctgcctcaacctcctccggccagatctgggagggagggagggaggggagccgccccacgatgccctgcggccatttggttctgagggttatgtccgcctgcgaaaataaatatccaacgtcggtccttgacatcagtgtcatcggcaccggccctcttgatatgagtaacttagccttcacggagagtgatggggacgtcggatcttgcgtcgacaaaggggggtcgataggtggatgcatgggtggtgccatcctacctgccgcttccagcggcggagccaagggccggctagcatgggcaggggccggcggcagggggctcgtgtcgctcatccgtctcgctggctcgggcatcatggaggggcagcagggtgcactggagcagatcagcagagccgtcgagcgagagggacccgatgccagcacagcggtgggggcagaatcattgccgccggtcccaggtggccgagtggccgatgactgcaggcgatggccgccggcgccaggcgacaagactaggggagcagcgcagccagccgggggcgcttgtgcaaagcaagaggagcggggagaccgaagatgggacgggagcaacgtgatttgggggaggactggagcggcgcgactaaggggtgtattggtgtggccgtgcgcctctcctctgcgtccctaccgctaa

SEQ ID NO: 7667 - DNA, 312 bp, Oryza sativa
  Clone ID: PAT_MRT4530_14240C.1
gtcccggcgcccgaatttcccgttgccaaactcacctgctcctaccctccctgtttgcaatccagcctctaactcgggctcggcagcggcggcgtcgctgtcgagggcgacgtaaggaggagtcgctgcttccgctccgaggtgtggagagattgattcggactctcccctttttctgatactttaatccggaaatatggttgctctgtttcttggtccaccctcaccgtcgctggacaagtggacgctgcggcagtgccgctgcggagccggttcaacttccgtacagaatcgcgcggcgggaggatccag

SEQ ID NO: 7668 - DNA, 789 bp, Oryza sativa
  Clone ID: PAT_MRT4530_14241C.1
gaattcggcacgagcacgaggctctagcttctcctctccttgtcaacctagctagtagctaggtaagttacctcgatcgtgcaggcgatggcaacgccggcaggaggacggccgtcgcagccgcagccgcaggcgcagcagctgtcggtggatttcgaggcgctgagctacatcagcagcctcgtggaggcgttccaggcgttcgactccgacaacgacggcctcgtcacggcgccggagctgaggggcctcctggcgtcgctcggcctcgacaagccggagcacgaggtgcgcgacatgctggcgcgcgccgacgccgaccgcgacgggaagctcagcgtggaggagctcctggacgtgatgaacgccgggcagctcggcctgggcgcgctcggcgcgctgctgcagtccgccgtgccggcgctcgagtccgcggcggggcccgacggcgtcctcggcgccgatgagctcgccaggctgctcagcgtcatgggcaccgccagcgtcgaggactgcatggagatcatcgcctgcatggacggcgacggcgatggcgccatcagtgtcgaggagttcaggctcatggcccagctgctctagcttactatccactccgtaggctctaccaaacatacaactttgcaagaagctacgcgttgttggagaatacttgatgatggttttagcaataagagatcgagtttatcaactctgaactctgaattttgaattcgaaaaaaaaaaaaaaaaaaaaaaaactcgcactagttctctctctccctcgtgccg

SEQ ID NO: 7669 - DNA, 1431 bp, Oryza sativa
  Clone ID: PAT_MRT4530_14242C.1
atgatccacgccgcggcggcgccggccatgtacggcggcggcgcggcagcgggtggtgctacgacgacgacggggagccacggcggcggcggcggcgactggtggagcgccgcggtgtcgtcgtgctcggcgccggcgccggagacgatgcaagggttcggcggctggtcggccgcggtggtggccgtcgacggcggtggcaacacgtcgaggtcagctgctggtaacactgcttcgtcggagtcgcctggatcgctcgccaccggaagctccatcactttccaggagcccgccggcggcgtcgccgacccggccgccatcgccgtgcacgcgcagacggtggccggcggcggcggcggcggctggaatcagcagcctttcttgggtgggagtggtttccatggctacatgagctcatcaagaaatgatcaccataccaatcatcatcatcatcagatcaacacgccgagtttgatgagcaactcatcatcaaataacggcgtgatgctgcaagagcaccaacatgaccagaattaccagttcctctccaacctcggcttcgagctgctctcgtcgccgacctcgccgtacggcggcggtggcggcttccgctcctcgctgctcagaagcctcacggagccggcggcggcagcgaagcctaatgactcgccggggtttcagcagtatcatcatcatcagccggcgatgaacctgcagccgccggccgccgccgccgggagagagccactgcagttcaccaacagcacggcggcgccgttttggaacccttcctccaggttcaccgtcgcggcggagggtacagcactaggtggtgccggagcatcgccggcgcagcctacgccggcgagccttgcagctaagagggcattagaaggagtaggagactccagctcaatcatcacgaagaaggcgaaggctgattccacgccactaaagaaatccagaaccgggacgccatcgccattgccgacgaccttcaaggcatgtgtctacatatatataatatttaatttgtcccaaatggtgattgatttccttccaataaagttccatgtgaggaaagagaagctaggggacagggtcacagcactccaacaactagtctccccttttggaaagacggacacggcatcggtgctccacgagacaatcgagtacatcaagttcctgcacgatcaagttggtgcacttagtgctccttacctaaagaacaggcaacaagtgccccacttgaagaactccaccggcgtcgacaacgatggcggcggcggcggcggcgaggcgacggcggctagcaagagagacctcaccggaagagggctgtgcctggtcccgatatcgagcaccttcgccgtcgccagcgagacgccggtcgatttctggacgccgttcggtgcagccttccggtag

SEQ ID NO: 7670 - DNA, 778 bp, Oryza sativa
  Clone ID: PAT_MRT4530_14243C.1
ccggaattcccgggtcgaccccgcgtccgcttctggccacctcggcggttcgtcgccggcggcgatggcggcgacggtgcggttcgggctgctggtggcgatgttccaggccatgtcgcgggaccgcacggcggcgaagaagcgggcgcggctccgcgcgctcctcgaccgcgcctacgggcccggcggcagggacgactacttcagcgcgctccgcctcgtgctcccggggctcgaccgcgagcgcggctcgtacgggctcaaggaggccgcgctcgcctccgtcctcgtcgacgccctcgggatagccaaggactcgcccgacgccgtgcggctcaccaactggcggcgcgggggcggcttccgcaacgccggcaacttcgcactcgtcgccgctgaggtgctacagcggagacaaggaatgacttctgggggattgacaataaaagaggtgaatgacgcacttgatcgcctggctgcaactgagaataggtctgagaaggcttcgattctttctagtctgatcaagaaaaccaatgcccttgaaatgaagtggctcttgatgattattctgaaagatttgaaattggggatcagtgagaagagcgtatttcatgagttccatcctgatgctgaagacttgttcaatgtcacttgtgacctgagattggtctgtgaaaagcttaatgatcgaagtcagaggcataagcgccaggatatagaagtgggggaaggctgtcaggcctcagctatctatgagagtcaataatgcctcatc

SEQ ID NO: 7671 - DNA, 732 bp, Oryza sativa
  Clone ID: PAT_MRT4530_14244C.1
ccggccgggttctgcagaaggttgtcagacctttgaagggccatctggaaatattagttccaacaggtggcctgaacatccatcgtccgccagatgaaccatgctggtccattttggcacatagtcttgatgatgtggagaaattcttcaaggacactgttgataatagagaagagggaattatactaaaggaccttgagtccaaatgggaacctggtgaccggagtggaaagtggcttaaattaaagcctgattatatacatgctggtgctgatcttgatgttattattataggtgggtattatggctcaggacgtcgaggaggagaggttgcccagtttttagttggtcttgcagtgccttctgacgacaatagttatcccaaaagatttctttctttttgccgagtcggtactggtctttctgatgaagagcttgacgctcttgtcaccaaattgaagcctcatttcaggaaaaatgaataccccaaaaaaccaccaagattttatgaagtgacaaaccattcaaaggagaggccagatgtttggatagaaagccctgataagtcagtcataatatccacaacaagcgatattcgaacaatcaaaatctgaggtatttgctgccccatacagcttaaggttcccccgcattcaacggttgagatacgataagccatggcacgaagtggccttgatgttcaagcattttgtggacatcgtacattcaagt

SEQ ID NO: 7672 - DNA, 435 bp, Oryza sativa
  Clone ID: PAT_MRT4530_14245C.1
atggggagaaaggaggaggagcaggagcaggatgcggagatggaagaactagtagtggactactacgcagatgagccgatggaggaagacggtaaaaatagtaacaacaagtggaaataccgggaggaccctggcttcatggaggcatacctgaaggtgatgcagctcgtggaagaagatgatcggatcgaggacgaggagagcgctgcggcggcggaggcggcgaagccagggcggaagagggctcacgcccggaaggcgggggagctggacgacgtggagacgacgaagaggtacaagtgcaactactgggcggacgacgaccctgcttaccgcggcaagaggcggctggagaacaccggccagctcttggcccgcaccgccgccctcatgaaccgcgccgaacgggagaccgccgccatgatggcccgatga

SEQ ID NO: 7673 - DNA, 3914 bp, Oryza sativa
  Clone ID: PAT_MRT4530_14246C.1
atggcggcgacggtgcggttcgggctgctggtggcgatgttccaggccatgtcgcgggaccgcacggcggcgaagaagcgggcgcggctccgcgcgctcctcgaccgcgcctacgggcccggcggcagggacgactacttcagcgcgctccgcctcgtgctcccggggctcgaccgcgagcgcggctcgtacgggctcaaggaggccgcgctcgcctccgtcctcgtcgacgccctcgggatagccaaggactcgcccgacgccgtgcggctcaccaactggcggcgcgggggcggcttccgcaacgccggcaacttcgcactcgtcgccgctgaggtgctacagcggagacaaggaatgacttctgggggattgacaataaaagaggtgaatgacgcatttgatcgtctggctgcaactgagaagagtgtatgccttgaaagtgagaagttactcctcattcttgacaggtctgagaaggcttcgattctttctaatctgatcaagaaaaccaaagagcttgaaatgataaagcggtagtagataattctgaaagatttgaaatttgtgataaatgagacgggagaatatcatgtggtccaaccagatgctgaagacttgttcgatgtcacttgttacctgagattggtctgtgaaaagcttagagatgataatcaaaggcatgagggccagtatatataaatggggaaggctgtcatggcacagctatatatgagagtcaataatgcctcatctgctgagaagaagcttcacggaaaacaagaagatgctgagtgccaatcaaacggtggcagtattaaaatgcaccagaatgggcaagacattcatttcttctcaaggagctttcttgatcactcagaatatgcacctggaatgtccaaagttattatagaaaatatcttggttgacaggtgtattttggatggagaaatgcttgtttgggatactgtgcttaatcggtttgcagaatttggatcaaaccaggaaatagaatgtccagatgttgcttttgacattctttatgctggagacaccagtgttatccaccaaagtttgacagagcggcatgaaattctgcagaaggttgtcagacctttgaagggccatctggaaatattagttccaacaggtggcctgaacatccatcgtccgccagatgaaccatgctggtccattttggcacatagtcttgatgatgtggagaaattcttcaaggacactgttgataataggttttttcctacctccccaaacactgatgaacttagcaacctttccatatcactaatgattcagttcagattttctgattattcaatatgctatgtgcttagagaagagggaattatactaaaggaccttgagtccaaatgggaacctggtgaccggagtggaaagtggcttaaattaaagcctgattatatacatgctggtgctgatcttgatgttattattataggtgggtattatggctcaggacgtcgaggaggagaggttgcccagtttttagttggtcttgcagtgccttctgacgacaatagttatcccaaaagatttctttctttttgccgagtcggtactggtctttctgatgaagagcttgacgctcttgtcaccaaattgaagcctcatttcaggaaaaatgaataccccaaaaaaccaccaagattttatgaagtgacaaaccattcaaaggagaggccagatgtttggatagaaagccctgataagtcagtcataatatccataacaagcgatattcgaacaatcaaatctgaggtatttgctgccccatacagcttaaggttcccccgcattcaacggttgagatacgataagccatggcacgagtgccttgatgttcaggcatttgtggacatcgtacattcaagtaatgggacaactcacagggcggcagatgatgataatgatctgaagaatgttaagaatggcggatctttctcgatgaatcttaatgactcagttactcattgcatagcagcggagaaaaaagattttgcaaggcacaaatttcctgaagagatcgactcatatgccgactatttctactgggacattgatatttctgacctcaagcagattttcagcaatatggacagagctgttgttgattcaaacatggtacaccactacaaaaagaagtattgcgcagatgagagattctgcttcttccagggttgctgtgtctacttctatcatgcacccttggtgaatgcggactacaatgtaatatctgatcttgcactcaagagagtgaagcaggaccttaccatgcatggtggtcaagtgtgcagcattcttgctcccgctactcatttgattatagtttcagttctacaagcctacaattttgacatgctgtacaagagcctccctcctgccgagaggcgttatctacatgacaaaagattgcaggttgtcagtaacaagtggttggaagattcagtggaaaaacaaacaaggctgcctgaaaccacttacagccttaaaccggatacactagaagaaatagaaattgaacgaagtgaggaaactgttcagccttgtaatgacaagcttgaggaaaatgagaaggctgatacatctcatgttaagcatgcaccaaggaaaaggggaaggccatccagtagtgcctcaagaactgcaaagcctgctcctagaccagtccgaagaacaagagctagaagaggaaatcaacatgcaaaaatagatgatgttgagcctgaagaaagtgaccatggtgaaacaggtctagatgatcaaataccagacacagataacatctctaaaatggaagtagatagctttgacaaagaccagtttctgctagaccagtccgaagaacaagggctaggagaggaaaacagcatgccaaaatcgattatggatgatcaaaggttggatgcagattacatctctaagatggaagaagatagcagtgacagagaccagggggcacatccaaccgctcctagagtggtccgaagatcaagggctcaaagaggaaagtggcttgcaaagatagatcgtgaaacaggtcctggtgaaacaggtcaagatgataagaagttgaacgcagattccatctctaagatggaagaacatgcccatgacaaggatcaagaaccacctccaggtgcccagcttatcacattggatgagcaggagcccaaaggaatcaaatcgagtaccacggagacaccaagcagcccaaaacacgaacgcaaccaaacagttcttagaagagacaccgctgaaacaacgagtagcgcaacgtgcgagaagatggaacagatggttgatccgctgcacgcaatgctcctggacatgattccatcgcttggccagatgaagacggacgttggtaacagggttgccgaagccaaagctgagacgaatccaccttgggtaggaagctccacatccagttacgtggctccagtgccacaggcctcagcgagttctgcatccagttctggtgttccggcaccacacgcaggaagctccacacagagtaccggggttccagccccagatccaactgctggtgctccaaagaagaaaaaggtcagttacaaggacgtcgccggtgcacttctgaaggattggtgacaaatagtactgaatgctgccacttcgggtaacctgtacgctgtatattccccatctttcattaatctgcacggccctgtaggctgtgacaaatgcttgtgaatgtccctgttcttagctctgaacgtccgtgaagattctgacaagaatggcgctagtagtttggtcgaaaaaaaaaaaaaaaaaaaaaaaaaaaaaaagctcccgttgtcgagaacggcgtgatggctagtagttgagagcttctacttccgattaat

SEQ ID NO: 7674 - DNA, 159 bp, Oryza sativa
  unsure (1)..(159): unsure at all n locations
  Clone ID: PAT_MRT4530_14247C.1
gaaatataagtttttattttggggtggtattttgacaatgggatggaacacaancaatccatgtgcatgccacatttattaacttgagctggtcaatgtaaccaaaatactcccaaccttttttttcgcccccgttcttttattatgccaaattttaca

SEQ ID NO: 7675 - DNA, 504 bp, Oryza sativa
  Clone ID: PAT_MRT4530_14248C.1
cccacgcgtccgcccacgcgtccgaatttttccgatgattccttcggattcgcgtttcggggctgacgaaacccaatccaccacccaaaaaagtagcgagtctccgatcgaattcgccacccagtatctcaatttcgttcgtgcgaggcatccgtgttcgatttgcgaaggtgaattttgatcggtttggtttggatttttggtttttttttttctccatcagatggatggattggcgccggcggcgatgtcggaggcgctgctggtcttcgcgagcgggagatccatcggcggcgccggtccaggacgacgacctcatcttcgccgcggcgagagccgggagttcgcgtggatctacgactacgaggatgcgccgatgagtgcgccggtgtggtgagaggggtttgggcagctccaatctcgagtcgaggcgcccgctgatggggacgaggaggtcaatggggatcgagcgtggcctcgcggctcgcgccgtccatccccaat

SEQ ID NO: 7676 - DNA, 1808 bp, Oryza sativa
  Clone ID: PAT_MRT4530_14249C.1
cacgcgtccgccacgctttgaggagccgcagccagtccgggagacgctcgtacgcctgcctcgaccgatccagcgccgccacggcgaccgtggccaaggagatccgccccctcgtcggtccgccgccaacgatctccgatcgagacaaaccctagccacgcccattgccttctcccgtcgccatgtccgccgcgcatctcctccgccactctcgcaagttgcggagtttacacaatgctctagactgtgagcgttctggcctcgtgcgctacttctccactgcttctggttcgttccccaccaagggaaatggtgctgagaaaagaattggaggtgccagatttcctcagcgcaagcaacctggaaaagagcttgagacctccaagttgtcactaggacttaatggaagctacacttgcaggagatcacctaacaactttatcccaaatactattactggtctcaatggttcattgtcatgtggacagatagcttcagcaagatctttctcaagcagtgcagacctgccaccacatcaggaaatagggatgccatcactctctcctacaatgaccgaggggaacattgcaaggtggctgaagaaggaaggagataaggtctcacctggtgaagttctttgtgaggtggagactgataaagccaccgtagaaatggagtgcatggaagagggctatcttgctaagatcattcatggagatggttccaaagagatcaaagttggtgagattattgctgtaaccgtggaagaagagggtgacatcaagaagtttaaggattataaaccttcaactttggctgcacctgtagccccttctgaactgaaggctcagtctgagcctacagaaccaaaggtggaggaaagagagccttccaaagcatctgagctaaaggccccaaggactgaagaaccttcgcggtcaggagatcgaatattctccagccctcttgctagaaaattggcggaagataacaatgttccactgtcgagtgtaaagggaactggtcctgatgggcgcattttgaaggcagacattgaagattacttggctaagggttgcagaaaggaagctcttgcggctccagggctaagttacaccgatgttcccaatgcacaaataagaaaggttactgcgaaccgcctgctaagctctaagcaaacaattccacattattacctgacagttgacacacgtgttgataatctcatcaagttgcgaggggaactgaatccattgcaggagtcctccggtggtaagaagatatctattaatgatctagttataaaggctgcagctctggctcttcgaaaggtccctcagtgtaatagctcctggatgaatgattttatccgccaataccacaacgtgaacatcaatgttgctgtacagactgagcatggactgtttgttccagtaatcagggatgcagacaagaaaggacttggtatgattgcggaggaggtgaagcagttggctcaaagagcaagggataacagtttgaaaccagatgattatgagggaggcacattcaccatatcaaacttgggaggtccttttggaattaagcaattttgtgccatcataaatcctcctcagtcggcaatcttggccattggttctgctgagaggagggtgatacctggcagcgccaatggtcaatacgagtttggttccttcatgtcggcaacaatgagctgtgatcacagggttattgatggtgcaatcggggcagaatttctgaaagcattcaagggctatatcgagaatccaacctcaatgttactgtga

SEQ ID NO: 7677 - DNA, 2160 bp, Oryza sativa
  Clone ID: PAT_MRT4530_1424C.1
aagattcagatttgaatctttttggctcaaaattcctgggttcttggaagcagtgcaagactcatggcaacggccgatccttgccactaattgcctagctattttccgcatcaaacttcgacgtctcgctcgagatttaaagggatggagtcggagccaagtgggtgacattaagttacaacttgcggttgcatctgaagtggtctttcagctggacgtagctcaggaaactaggaccttgtcagacgatgagcgcctcctggtgtctaacctcaaaaataggattctggctttatcaacatcacagaagaagaactgaagaaaactgttttctcaatgccacccgagaaggctccggggccggatgggttcattggtgcttttttcaaatcagcgtgggagatcattaaagaagatttgttatcggcagtaagatcgttttttgatcttaacactttgcggctaaaggaactaaactcagccttcatttgtctccttcccaaaaaagaagatgctttgggagctgaacagtatcgaccgataagcctaatccatagtttctctaagataatttccaaaattttggcaaacaggctagcgccaagactgtgtgagcttgtctcccccaaccagagtgccttcgttcgaaaaagggctatccatgataatttcgtcttcgtaaaaaacatggtacaatatttacatagaacgaagaaaacgagtctgtttatcaaaattgacatcgccaaagcttttgacacggtttgttggccctaccttcttgatgtgcttcatcagtttggatttggaactcgttggctaaactggatttccaatttacttgcaacctcttcctcccaagtgcttctcaatggatctccggggcaagctgaaaatgcatcacttctctctccaatgggtgggagttttgacagattcaggtgctccctgtatgcagacgacgtggcagtttttgtgaagcctcacgcttcagacttatcggtgcttatgagactcctaactttctttgcgcaaacctctggccttcacacaaacatcagtaagacagagatctacccgatcagatgtgaaaacatcaacctcgtatctcttcttgcaaatttccctggaatggtaaagcaattcccttgtcgctaccttggcctgccactccatatccgaaagctaaggaaaatcgacttcctaccgctaatcgaaaaaattggcttgcgaattcctggctggaaagggaggttctttacttcagccggaaggaaaacgctggtccaatcggtcctaagctctatgccaattcatcacttcaccgcattgcaagtgcccaaatgggtgataaaaagaattgatcgctttaggagatcttttctttggaaaggagaagaccctgacaaaaccaacccaggcagcagtttagttaattggcagacggtgtgtaagccaaaagttttgggtggtttgggcatcctggatttagagaggttttcgcgagcctttcgtcttcgttggctttggctcggttggaaggatgaaaacaaaccatgggctggcatgagcgttccctgtgatgatacagataaaaggttgtttcaggcagcaacgacaattgagctaggtaatggcgcaaaaacaagcttttggcatgacaattggctacaaaacagcagcccaaaagacattgcaccactgtgtttcaagttggcaaaaagaaagcaaaaaagcgtccatcaagagctccataacaataactggctgatctctttcaggcaaataacatcagtagaagaaatccacgaacttgttcactttgggagcatgcttcagggagtcctgcttaccccgcgtcttgatgacatctcttggaactggaatgaatccaaagtttacacaagtaagagtgcttatcttttccaatatcaaggatcttttgtttccttagatttctcttcgctctggaaggcgccggctgagccgaaacttaaattttttggctggctagtcctccaccagaaaactcttatggctcaaaacttgttgagaagacactggccgtgcaattggatttgtagtttatgcacaagcgcctttgaagacactaatcatctgtttagcgaatgccccttcttcaaggaagtttcgtctcta

SEQ ID NO: 7678 - DNA, 2701 bp, Oryza sativa
  Clone ID: PAT_MRT4530_14250C.1
atgcgggtcggcgggaggaagacgacgacgtcggccggaacggacgacggacggcggcggcgagcggcggggcgatctacagcgatgcaggcaagggcgagcgcaccgggaggttgcatgggacgaggggagacgagccaacggctcggattcgccggagggggctcgacggcggcggattgcggcggcggcaaccggcggcgagggaagggggaaacggcgacggcgcgacgggagatcgattcgggcgagctagagcatctacgcgactccgggaatccggttctagcgtcggattggacggagacactacgagagaggtcggcgacgtgcgggcgctacggagcacgggcggcgacggtggcggcacatagtgagcggcggcagcggggcgcagtgacggtggccgacggcgcggggcgtgatcgcttcggcctcgggcggggaagaggaaggagaggggcagggcgcggcaatggcaagggcgaaaacggggaagattggtttggggagaggctcggcggccaaaacggcgacagggaggatgacgccggcgggggagaaaaagaagaaaggaaagagggaaaggagacttgcctcttgccactttgggaaaagaaggaaggagagagagggcgacgagacagtgggaggaggagctctgcctccaacccttggaagcatgcgcggtggtggtggggccgggtcgtgacgacggcgatgacggcgggggcggtttggaagggcgcggctacagggcggcaggcgcgggctcaggcgcggcagggcacgcgcgctggctcgtggggtagggcgcggcacaggcggcgcagtgccgcagggcgcgtggccggacggcgcaggcacaggcagcaggcggctgacgacggcggcgaccgcgcgcgcacgcaaggccctagaggacggccaccagtcctggaaccagctgccacaggggggagagaaggcagcccagccaagaggcaacaacacccggagccagacctgccgagcgaacacgcagtcgaggaggatgtggttcgccgtctcaagatccttagcgcaaaagaggcaggacactttgcgtgctagagaagatcggcacaggcaaagaaatgctggtcatagaagaattcctggtgcaccgaacgcgctgagagcgctggtcagccgtccaatgccaaacgagacaatcctcgacacccggagatctcatgagaaggcgcggtatgcgacggccgagctgcggccgtatccgctggtcggccacctgccgcagttcctcgccaaccggcaccgcatcctggactggatgacggaggtgctgtcgcggcagccgacgcgcacgttcgtgctccgccgccccggcggcgtgcggggcgtgatcaccgcgaacccggcgaacgtggagcgcttcctccgatccgggttcgacaactaccccaagggcgagcgcttcgcgtcgctgctgcacgacttcctcgggcgcggcatcttcaacgctgacggcgaggcgtggcggtcgcagcgcaaggcggcgagctacgagttcaacacgcggtcgctccgcgccttcgtggcgcggtgcgtgcacggggagctgcacgggcgcctcctcccgctgctgcggcgcgccgcggcggagggccgcgccatcgacctccaggacgcgctcgagcgcttcgcgttcgacaacatctgccgtgtcgccttcgaccacgaccccggccagctccctgacgccagcggcggcggcgctctcgcggaggccgacgatggctccactgccagcggcaggttcgccgacgcgttccgcgacgccgctaatctcagcgcggggcggttccggtatgctgtcccgtggttctggagggtgaagaaggcgctccacattgggtccgagcggcggctgcgcgagtccatcgccatcgtccacgacttcgccgaccgcatcatccggtcgcggcgggaggagatacgcgccggcctcgagaagcacgacctcctgtcccggttcatggcgagccacgacgagtcgtacaccgaggtggccctccgcgacgtcgtcatcagcttcctcctcgcggggcgggagaccacgtcgtcggcgctcacctggttcttctggcttctctcctctcgcccggacgtggagcggcgcatccgcgaagaagtcgccacggtgcgcgcacgccgtggcgacggcgacgtcgacagggtcggcttcgacctggacgagctgagagagatgcagtacgtgcacgccgcaatcacggagtcgatgcgcctctacccgccggtgccggtggactcgctgcatgcgcaggaggacgacgtcctgccggacggcacggcggtggaggccgggtggttcgtggcgtacaactcgtacgccatggggcgcatggagtccgtgtggggcaaggacgcggcggagttccgggcggagcggtggctggaggacgcggcggcggcgacgttccggccggagagcccgttccggtacgtgtcgttccacggcgggccgagggtgtgcctcgggaaggagatggcgtacatacagatgaagtccatcatcgcctgcgtgctccaggagctcgagctcgccgtcgacggcgcgtaccggccgcggcaggtgacgtcactgacgctgcgaatggcggatgggctccccactagggtgaaagttagaggcaattga

SEQ ID NO: 7679 - DNA, 549 bp, Oryza sativa
  Clone ID: PAT_MRT4530_14251C.1
atgaagaaagttttcaggaaaatcatattgtatagaagcgtgaaaagcgtgcctgccataatccatattcgaccacatagaagtactattccagagaagatcgcgccctgctggagaaggacaaaacaacgactcagtaccatgctggcaagggttccttcaatccttatctacagaataagcgaagctcaaacttctagttttcttggaaagagacatgaagatgaaaacacaggctggggatctgacattttattaccaatggggcacgctacatatcttggtcgcatgcaaggagttccattcttcttcatggtggaatgctatttggatagcgtggcgctggggatccagatgaagatcatgcctcaaaatatacatttggtagaaacaaattgggagtacgtactagtgatagcagaggcattcaacatcttcaatttgcccctaaccattccatttctcgatggcagcaagatgtacttccattccaatccagaagctttgccaatattagctgcattacaaccaaaaaagggggaagaatga

SEQ ID NO: 7680 - DNA, 2091 bp, Oryza sativa
  Clone ID: PAT_MRT4530_14252C.1
atggtaaagctaagggaactaaaggtagcacagttgattcaggtgacaaaagtggggagcctaaggatgatgcaaggagtgcctcagcagaagccttgggctgatatgattgcagatgtgatgaaggaacagttcgggcttaagccaaaggatactggaaacctatatcggcacccttaccctgagtggtttgagagagttccattgccaagacgatacaaggtcccagactttttgaaattttcaaggcaagacaatgtgtcaacttatgagcatgtcagccgattcttggcccaatgtggtgaggcatcggctgttgatgctttgaggggtttgataactccgatcaaggagaagttttcgtctcaagattttgaaagcttgtctcatcttgcacagaaggtagccctacatgagcaaaggtttgcagaggctaagaaaaactttaaaaagtgggttaagagtcttggaaaagaggaaaaatatgattttgatatcaccaaggctgacaagatttttgatttgctacttcgggagaaacaaattcaacttcctgctggttatataattccattagctgaggagctaggggagctagggaaaaggaaatattgcaaatggcataattctgggtctcatgctaccaatgattgcaaagttttccggcaacaaatccagttggctattgagggaggaaagattaaattcgatgattcaaagaagccgatgaaggttttgctggaacgaagggatgagactgccatcgatagaagattgccccagaagagaagtgtccagaggatgaggaacatggagcgttttcaagaagtgcaacaagaaatcaaccatcggctgaaaaagacaaaacaagaatggcgcattaagagcaaagttatagcaaccgatgaggttgaagccaacaaagcagagtggttgctcaagggcaaagctgttgcatcttcatcggtgaatatggtttttatgttgcctgtggaatatgaggctaaacaagccgatgttgatgtggaggaaacctctactagattgattttgtcaccagagcaagcaatctgtgagaagccagaggggacagaaaatcggcatctcaagccgttgtatgttaacagattcgtcaacgggaagccgatgtccaagatgatggttgatggtggagcggctataaatttgatgccatatgctacattcaggaagctgggtagaaatacaaatgatctcatcaagacaaacatgattctcaaagattttggtggcaatccttcggaaaccaagggagttctaaatgtggagttgacatgcttgattcaatggcaaggtgacaagattgagatcatgccagccgacagccaattgaagatggagagcccaaattattactttgaggacgtcgtggagggttcaaatttctacaccaaggacacggtggatgatctcgatggcaagctaggacagggtttcatgttggctgacaatctggaagaagttgatataggtccaggggcgataggccaaggccgacatttatcgatgtcctgtgcaatcggcttatatgagtgggtggtgatgactttcggcttgaaaagtgctggagctacgtatcagagggccatgaattatatattccatgatctgatcggcttgttggttgaagtttacattgatgacatacttgttaaatcaaaagaggtagatgaccacatagccgatttgaggaaggtttttgagataacaagaaaatatggcgtgaagaagaatcccacgaagtgtgcttttggtgtatcggctaggcagtttttgggctttcttgttcatgagaggggaattgaagtaactcagaggagcgttaatgcaattcagaagattaaacccctagaagacaagaagcagctacagaagttgatcgacaaggctcttggatgcagagacaagtacgaatcacctaaggcggtgaagggacaagctatagccgattttgttgtggagcatcgtgatgattcaatcggctctgttgatattgtaactttgaagcatgtttctcgggagcataatgttgaagctaatgatttggcttag

SEQ ID NO: 7681 - DNA, 1245 bp, Oryza sativa
  Clone ID: PAT_MRT4530_14253C.1
tcactcacgcgactcggtctctgcagccggtgcagcccaaagtcttgcggactttttgtttcggtctcttctgctgatttttgcctgaacttcttcccctggtgtctggtgcagatctcccctatgccactgatcaacgtcgtctggcggaccaccaccacgaacactgaggtggtgaaacacggcaccgttcttcgtgctcccatttgtttggtaagcaacgtcggccgcagctacttcgtccgttccggtccggacggacagagcgactttgtagttgtgcctaaaaccggagccaatgagttgccctgaaaataacttttcaaataccgataaaatcagtttcaaattctttgcctgttgcaagtcatgctccaaaaagataatagtatcatcgacatctccaacacacaagcccaggagaaggctagcaccggaccggccgtcactaagcgtgaccaatcgccacacctgcgaatccacggctgacgcaccgaggctccaccaccacacaagctctgccgacatgtgggacccctgcaccagcgtcccccgccggtcagccttcgtgcgccgaagaccgcgccacacccaccggcaactccttctcacatctaggttgtctcctccactgccggccgcgcctctcgcgccaatccggccttcctccatcggccgcgcctctcgcgccaagccggcctccatctccgccgcccacgtctctcgcgccgagccggcctccgttgccatcggctgcgcttctctgcgccaagcctgtctccgacccctccaccaaacgatgccacgacggtcagatggagccgtctcccacgccctcgggtagccgtccgaggccgtcatgcctccgactccttccccgccgccgatgtcgccaccgcctccacagtcacgaccaccgtcgccgctgccactgacgctagccatcgcctccgcagaccgccgccttgtgaaaattgcatcaccatagtcaggatgagagaaacgcgagaatcgagctttgctcacgagcctggcccgctcgatgcaacgcgtttgcatccgcgcaagcagtgctgcacccgcggctacagctcgttggttggggtaaccagggccgtacggcccgacggtctttaccactgccgccacctttgttgtagtccgagtcattgccaagatcctctctcccttcatcagcagctggatctggccaccaatgacagtgtcacagccttttattgtcat

SEQ ID NO: 7682 - DNA, 671 bp, Oryza sativa
  Clone ID: PAT_MRT4530_14254C.1
gaggatttaaaaactttttccactaagggaactaaaggtagcacagttgattcaggtgacaaaagtggggagcctaaggatggtgagattgaggagattgaagaagaggagattgaggagcaagaggccttgaagttcaataatttccaggatcaagttgattatgctgttcatcaagctttgattaatctatcgggtgctggtcaatactttgacaaatatcatcaagactgtggttgatatcacaattgctgagcattaggataacgggccagtctttctgccagaaggtgggttccatacatatagaagcttggtgacatgtaatcaacagcctgtctccaatgtacctccagggcagccgatggcgtcagcttcagctttgagaccaggagcatcatcttctacgtagagaccagtggtcaatcctcatgtactgactagggaacaacctcggcatgctgggaaaaacaccggttgtcgagccgattcaatcgacaccaattaggcagcaagtggttcagccgattaggcagcagatggttccccaaataccggcaggacagagaacacctattattcagcaaaatcagcctgttggagctcagtttgttcctaaacagcagatacataatgtgcaacagcctcctcagaactatctgggctgcagg

SEQ ID NO: 7683 - DNA, 3222 bp, Oryza sativa
  Clone ID: PAT_MRT4530_14255C.1
gatgtgacatcatctaagcatggtaaagctaagggaactaaaggtagcacagttgattcaggtgacaaaagtggggagcctaaggatggtgagattgaggagattgaagaagaggagattgaggagcaagaggccttgaagttcaataatttccaggatcaaagaccagtggtcaatcctcatgtactgactagggaacaacctcggcatgctgggaaaaacgtcaatcggctgactcaggaacagattgcagctatatttgggccatctcaaccggttgtcgagccgattcaatcgacaccaattaggcagcaagtggttcagccgattaggcagcagatggttccacaaataccggcaggacagagaacacctattattcagcaaaatcagcctgttggagctcagtttgttcctaaacagcagatacataatgtgcaacagcctcctcagaactatcttggtgatgtgatgaaggaacagttcgggcttaagccaaaggatactggaaacctatatcggcacccttaccctgagtggtttgagagagttccattgccaagacgatacaaggtcccagactttttgaaattttcaaggcaagacaatgtgtcaacttatgagcatgtcagccgattcttggcccaatgtggtgaggcatcggctgttgatgctttgaggggtttgataactccgatcaaggagaagttttcgtctcaagattttgaaagcttgtctcatcttgcacagaaggtagccctacatgagcaaaggtttgcagaggctaagaaaaactttaaaaaggtcaaccatttttatccttatatgtatgaatatgaagaagaatatgactctgagtgggttaagagtcttggaaaagaggaaaaatatgattttgatatcaccaaggctgacaagatttttgatttgctacttcgggagaaacaaattcaacttcctgctggttatataattccattagctgaggagctaggggagctagggaaaaggaaatattgcaaatggcataattctgggtctcatgctaccaatgattgcaaagttttccggcaacaaatccagttggctattgagggaggaaagattaaattcgatgattcaaagaagccgatgaaggttttgctggaacgaagggatgagactgccatcgatagaagattgccccagaatcagaagagaagtgtccagaggatgaggaacatggagcgttttcaagaagtgcaacaagaaatcaaccatcggctgaaaaagacaaaacaagaatggcgcattaagagcaaagttatagcaaccgatgaggttgaagccaacaaagcagagtggttgctcaagggcaaagctgttgcatcttcatcggtgaatatggtttttatgttgcctgtggaatatgaggctaaacaagccgatgttgatgtggaggaaacctctactagattgattttgtcaccagagcaagcaatctgtgagaagccagaggggacagaaaatcggcatctcaagccgttgtatgttaacagattcgtcaacgggaagccgatgtccaagatgatggttgatggtggagcggctataaatttgatgccatatgctacattcaggaagctgggtagaaatacaaatgatctcatcaagacaaacatgattctcaaagattttggtggcaatccttcggaaaccaagggagttctaaatgtggagttgacatgcttgattcaatggcaaggtgacaagattgagatcatgccagccgacagccaattgaagatggagagcccaaattattactttgaggacgtcgtggagggttcaaatttctacaccaaggacacggtggatgatctcgatggcaagctaggacagggtttcatgttggctgacaatctggaagaagttgatataggtccaggggcgataggccaaggccgacatttatcgcaacccccaaggagatgtaaagccgatatgtatgatgctatcaaggctgaaattactcatttatattatgctggttttattaggccgtgccgatatgctgagtgggtttccaacatagtcccggtcatcaagttacaatcagatttttatggcagaagaagatattcacaagactgctttcagatgtcctgtgcaatcggcttatatgagtgggtggtgatgactttcggcttgaaaagtgctggagctacgtatcagagggccatgaattatatattccatgatctgatcggcttgttggttgaagtttacattgatgacatacttgttaaatcaaaagaggtagatgaccacatagccgatttgaggaaggtttttgagataacaagaaaatatggcgtgaagaagaatcccacgaagtgtgcttttggtgtatcggctaggcagtttttgggctttcttgttcatgagaggggaattgaagtaactcagaggagcgttaatgcaattcagaagattaaacccctagaagacaagaagcagctacagaagttgatcgacaagaagggagtacctttcagattgtatttatcagccagagagaagtcaatcggctcagtttttattcaggagatcgaaggcaaggaaagagctattttctatttaagtcgcaggctcttggatgcagagacaagtcaattggcaggagaatatgaatgcaagaacgatgtgttgatggtctacaatgagaagtgccgagaattaatggatagtttttggcagggggcatcaggatataagccgatggcgaaggggattgaggtggaagttgctacaattgcagtcgatgattggagtgctgatcaagctaaagttgtgatgggagaagtacatgaagggtatttttggccgacaatgttagaagattgcttccgatattacaaagggtgtcaagattgtcagaagtttggagcaattcagagagcgccagcatcagctatgaatcatatcatcaagccatggtcatttagaggatggggtatggatatgatcggtcaaatcaatccacctttaagcaagggacataagttcatattggtggcaaccgattatttcaccaagtgggtagaagggattcctttgaagaaggttgattcaggggatgctatacggtttgtcaaggaacatatcatctaccgatttggtatccctcaaaccataacaaccgatcaaggatcgatctttgtatctgacgactttgtttag

SEQ ID NO: 7684 - DNA, 1215 bp, Oryza sativa
  Clone ID: PAT_MRT4530_14256C.1
ggtttgataactccgatcaaggagaagttttcgtctcaagattttgaaagcttgtctcatcttgcacagaaggtagccctacatgagcaaaggtttgcagaggctaagaaaaactttaaaaagtgggttaagagtcttggaaaagaggaaaaatatgattttgatatcaccaaggctgacaagatttttgatttgctacttcgggagaaacaaattcaacttcctgctggttatataattccattagctgaggagctaggggagctagggaaaaggaaatattgcaaatggcataattctgggtctcatgctaccaatgattgcaaagttttccggcaacaaatccagttggctattgagggaggaaagattaaattcgatgattcaaagaagccgatgaaggttttgctggaacgaagggatgagactgccatcgatagaagattgccccagaagagaagtgtccagaggatgaggaacatggagcgttttcaagaagtgcaacaagaaatcaaccatcggctgaaaaagacaaaacaagaatggcgcattaagagcaaagttatagcaaccgatgaggttgaagccaacaaagcagagtggttgctcaagggcaaagctgttgcatcttcatcggtgaatatggtttttatgttgcctgtggaatatgaggctaaacaagccgatgttgatgtggaggaaacctctactagattgattttgtcaccagagcaagcaatctgtgagaagccagaggggacagaaaatcggcatctcaagccgttgtatgttaacagattcgtcaacgggaagccgatgtccaagatgatggttgatggtggagcggctataaatttgatgccatatgctacattcaggaagctgggtagaaatacaaatgatctcatcaagacaaacatgattctcaaagattttggtggcaatccttcggaaaccaagggagttctaaatgtggagttgacatgcttgattcaatggcaaggtgacaagattgagatcatgccagccgacagccaattgaagatggagagcccaaattattactttgaggacgtcgtggagggttcaaatttctacaccaaggacacggtggatgatctcgatggcaagctaggacagggtttcatgttggctgacaatctggaagaagttgatataggtccaggggcgataggccaaggccgacatttatcg

SEQ ID NO: 7685 - DNA, 276 bp, Oryza sativa
  Clone ID: PAT_MRT4530_14257C.1
atggattgaaaaggaagggaaagcatcaacatttcaagaggtagatttggggaattttatgagtctgtttatattagcaccaaattgaagagctattttaacatattcaagtactccgttgtactgcgccccggtcgctaccgagacaacatcaatgccattatcctacccacaaccgccatgccacaaccgctggatcgagcagtcaagcaccccatgtatttgcgaaaatctgtaagaaattggaataacagagcaaacctgaacattttcttg

SEQ ID NO: 7686 - DNA, 246 bp, Oryza sativa
  Clone ID: PAT_MRT4530_14258C.1
atggagttccgtcacaccgctgccgccatggagtccggcagatgctgccaaaatctgaactgcaacaagagtttcttatctgagacatggtctcgccgcccggtccgaacctccaagaacaagaatagaggcgccggtccgtacctgctgctgccgctgagccgtggcagggccggcagcgcgtggctggatggagtcgtggaggcgcacgggcgagggtgcggccgtggcggcgagcggcgatga

SEQ ID NO: 7687 - DNA, 601 bp, Oryza sativa
  Clone ID: PAT_MRT4530_14259C.1
ttattatccaccctctcttccttccttccttccttccttccacacagaccagaccaggcatcccgacactacacgcagactctcgactttgtcactagcatcattgcttgatgatcgatgctgagctgcaaccaagcaccagcatatcctttccttcattccttcctggtgctggtagaagaagaacaagctagctagagtgataagaggtaattgtttcctccaactcattccaaccttgccttttgcctgccaaactcctcatcctctgccactgcataccatacgtgtgcgcgcctgaatgcctgcctgcctgcctgatactgatacatacacacagcacacacgccccgctattgtaagtgcggccaccactagctgtgtttctgctctctgtgtttatcaccaaattaaagcaacgacactcacttggtctgtttctttttaaaatattatttctcctcctcacctcacacatacctgcatattatttgcagctagctaccttgcagatcgatctccggccagcgattgatcccatccagtataataatggcggccatcacgctcctacgttcagcgtctcttccgggcctctccg

SEQ ID NO: 7688 - DNA, 1610 bp, Oryza sativa
  Clone ID: PAT_MRT4530_1425C.1
taaactcgtggtcgagaggcacccatcggtgagcgttggttcaattggaacgatcgatctataaacttacctcttcctcccaagtgcttctcaatggatctccggggcaagcaataaaccatgtccgaggccttagacaaggggatctactctcgctgatgttgttcatcctagcaatggaaccttttcatcgaattcttaaggcggctgaaaatgcatctcttctctctccgatgggtgggagttttgacagattcaggtgctccctgtatgcagacgacgtggcagtttttgtaaagccttaggcttcagacttatcggtgcttataagactcctaactttctttgcgcaaacctctggccttcacacaaacatcagtaagacagagatctacccgatcagatgtgaaaacatcaacctcgtatctcttcttgcaaatttccctggaatggtaaagcaattcccttctcgctaccttggcctgcctctccatatccgaaagctaaggaaaatcgacttcctgccgctaatcgaaaaaattggctcgtgaattcccggctggaaaggtaggttcttatacttcggccggaaggaaaacgttggtccaattggtcctaagctctatgccaattcatcacttcaccgcgttgcaagtgcccaaatgggtgataaaaagaattgatcgctttaggagatcttttctttggaaaggagaagaccctgacaaaaccaattggaaggatgaaaacaaaccatatgggctggcatgagcattccctgtgatgatacagataaaaggttgtttcaggcagcaacgacaattgagctaggtgatggcgcaaaaacaagcttttggcatgacaattggctacaaaacagcttcccaaaagacattgcaccactgtgtttcaagttggcaaaaagaaagcaaaaaagcgtccattaagagctccataacaataattggttgatctctttcaggcaaataacatcagtagaagaaatccacgaacttgtttaccttgggagcatgcttcagggagtcctgcttaccccgcgtcctgatgacatctcttggaattggaatgaatccaaagtttacacaagtaagagtgcttatcttttccaatatcaaggatcttttgtttccttagatttctcttcgctctggaaagcgccggctgagccgaaacttaatttttttggctggctagtcctccaccagaaaactcttacggctcaaaacttgttgagaagacactggccgtgcaattggatttgtagtttatgcacaagcgcctttgaagacactaatcatctgtttagcgaatgccccttcttcaaggaagtttggtctctagttacttcctggcagcatttacctacaaacaatgttggcctctctgtcggaacctccgattggtgggcccaaatcgattgcgtgggatcgaaggagcaaaagaaggcgatgagaggagctctgcttaccacttggtggaatgtttggttagaaagaaacaggagaattttcatcaacatttcaacctcagagagagcagtggcatatatagtaaaacaagatcttgatctccgttgctcggcttttagg

SEQ ID NO: 7689 - DNA, 300 bp, Oryza sativa
  Clone ID: PAT_MRT4530_14260C.1
atgacggccggcgacgaggaggatggcggcggcggctcggtcgacggcgacgagggggctccggtggtcgacggcgaaggggaacgggcggccgagattcctctcaccacggcgcacctaacggcggcgacggcaagcggcggcgacgacggaggcggcggcgcgacgatgccgaagacggccggcggcggcggcgaactttgtgcacgcggcggcggcgctacgatgcacgggagagctcgggagatggggcaaacggaagaggacgacgagaggaagctatatatgagctcggattga

SEQ ID NO: 7690 - DNA, 119 bp, Oryza sativa
  Clone ID: PAT_MRT4530_14261C.1
atgggcgtaacccacggggacccccattcatatcaatcttaagaaacggcttcccaggcaattaattggggctggtttcaacacgaaaaaccctggtttgggttcggtccccccacaaa

SEQ ID NO: 7691 - DNA, 1873 bp, Oryza sativa
  Clone ID: PAT_MRT4530_14262C.1
cattgatttcaacatggtttcctccacgagaaggacgacctcgtctctatccgccaccaccgccgccgccatcgcggcggcggcggcggcgctgatggtgtccgtggcgttcgccacagcgcagtacacgccggccacgccggcagcgccgggggctgcagcggcgggtgcggcggcgggggcgacgccggcggcgccgtacacgccggccacgccgggggcggcgggggcggcgccgtcggtgccggcggggccgctggacatcgcgcagctgggggcgaagggcgacgggacgagcgacagcacggcgttcgtgctgcaggcgtggaagaacgcgtgcaacgcgacggggacgcagaagatcgtgatcccgccggggaactacctcaccggcgcgctcaacctcaaggggccgtgcaccagcagcatcatcctccgcctcgacggcaacctcctcggcaccggcgacctcaacgcctacaagaccaactggatcgaggtggagcacgtcgacaacttcgccatcaacggccacggcatcatcgacggccagggccccctcgtctggacccacaaccagtgcaacaagaactacaactgcaagatcctccccaatagcttggtgatcgactactcgacgaacgtgacagtgagggggataacgctgaagaacagcaagttcttccacctcaacatatacgagagcaagaacgtggtgatcgacaaggtgaccatcacgtcgccgggggacagcccaaacacggacggcatccacgtcggcgactccaccaacatcaccatcagctccaccaccatcgccgccggcgacgactgcatctccatcggccccggcaccaagatggtccgcgtcaacggcgtccgctgtggccccggtcacggcatctccgtcggcagcctcggccggtacaaggacgagaaggacgtggaggacatcatcgtcaccaactgcacgataaagggcaccacgaacggcctccggatcaagtcgtacgaggactccaagtcgcagctgagggcgaccaagttcctgtacgacggcatcaccatggacaacgtgagctacccgatcatcatcgaccagaagtactgccccaacaacatctgctccgcgtccggcacgtccaaggtcgccgtcaccgacatcgtcttcaagaacatcgtcggcacgtcggcgacgcccgaggccgtcacgctcaactgcgccaacaacctgccgtgccagggcatccagctgcacaacgtcgacctcaagtacgccggccaagggaacaccaccctctccgtctgcaagaacgtcgccggcaagtccagcaacgtcgccaaggagctcgcctgcgtctgattttcatcttattatactactcttccgtttcatattacaaagtcatttgtttttttttaaagccaattttttcaaagtttgaccaaagttttttaaaaaatatagtagtattttcaatatgaaaagaacatattatcagaatatatttcatattggatttaattagactaatttaatattttatatgttgctatattttttttataaatttgtttaaactaaataaaaattgactagaaaaagtcaaacaacttataatatgaaatggagatagggggagtaattgtcgtctgattatatagttgtaagttaatcatcgttccctccgctacattcccctcacttgtattcttcatctaattattttcctctctctccctcttcggatttttttaattattttcttctatttatttttatgtttgcttcttcttcgtttggaatatatgattcttgtcctgatttcatttcatttagtttactcgttaattgattaattaattaattgtt

SEQ ID NO: 7692 - DNA, 306 bp, Oryza sativa
  Clone ID: PAT_MRT4530_14263C.1
ccgcctacggctggaccagcggcggcggcggcggcggccgcgcggcgccgtactgatcaacatcgatctcgccggagagaaaaaaaatggaggagaaggatcggagcgagccgtgcatggtgtaggatgaattaagctaagagttaatttcttcttccgcctttgctaatcatgatgctctcgtgttgtttaatctgtggcaatctgcttaattgcaagctcatcactgcaattaagcagcagctaaggatggttggatggttaaaactagtgctctctgttagtgttgatgttaattaattaatt

SEQ ID NO: 7693 - DNA, 318 bp, Oryza sativa
  Clone ID: PAT_MRT4530_14264C.1
cccacgcgtccgcgcaccaaatgctgatgattcccaagctgaatgctgaactgcacgttgggacttcggacattgcaagtgtgcagcacccagccctagatgatagacatcttcttatgctaatccatgtacacatattcttctagccattgtgctggctgaaactacatgaccactgcatgcacaaacggattattcgtttgatgtaacactagatcagaccatctgatcatggatgactgaatagcgagcatccatcttgcgcatcatgtgtgcatgttcatcttacagtgcgatctagacataaacatgctaaca

SEQ ID NO: 7694 - DNA, 615 bp, Oryza sativa
  Clone ID: PAT_MRT4530_14265C.1
atgtattttagagtcgttttgagacgcgacagcagagggagcaagaaggagcaagaaggactggaatcagggtcgttccatttatcaattacccaagatgggtctgaacttgaccggctttgctttaaagctacagagcttgcgcattgctctgggtatcctcatggagtggactataaaggcaagaagctaccggagcaggacggcgacgacgacacgccttgtgctgcttgggaggacatcactgtctgtcatggcaggcagggttccttcccggagtcttgtaagagcgttgcctacctcgccatcggctctatccatcagcattacccgaacgagttgcagcactcgcccttccgctaccacccttgtcatggcagatctcatgactacgccaccttcaaggatgccagctcagaggacgacaccaccatcgtgcacctggcacgtatggtggaggcgtatgacatggcccgcatcgacttccatcacctggtgcgtcgtgccttggtcgagaacaacgtgaagattctggagctgcgtcaggagaacctgcagctgaagaaggagttggatgccatggaggagcagctacgtcaactcaagatcgcctag

SEQ ID NO: 7695 - DNA, 1662 bp, Oryza sativa
  Clone ID: PAT_MRT4530_14266C.1
atggcgactccggaggacactggcagctggctgctctacctctccttggcggctaaatgctccggcgatggcgacggccagcctcaccggcttcttgggttcgtcgtggtttgcgccgtcgctggtctggttacatgtctgctgcactggtccttccccggagggccggcgtgggggaggtggtggtggacgcggcggcggcgtcgggggtcgccgtgcggtgtggcggctgttcctgggctgagggggctgccggtgatcggcagcatgtggctcatgaccgggctggcgcaccggaagctcgccgcggcggcggaggcggcgggggcggggcggctgatggcgctgtcgctcggggagacgcgggtggtcgtggcggcgcacccggacgtggcgagggagatcctgcacggcgcggcgttcgccgaccgccccgtgaaggagtccgcgtacgggctgctgttccaccgcgccatcgggttcgcgccccacggcgcgtactggcgcgcgctgcggcgggtggcgtccacgcacctcttctccccgtggcaggtcgcggcgtccgcgccccagcgcgcggtcatcgcgcgccagatggtccgcgccatcaagctgcagcagcggagccggagcggcgattccgccgccggcgccgccgtcgaggtccgccgcgtcctgcgccgcgcgtcgctccacaacgtgatgtggtcggtgttcggccggcggtacgagctgcagctggaccccggcaaggagagcgacgaggtccgggagctgagggccctcgtcgacgaaggctacgacctgctcggccagctcaactggtccgaccacctcccatggctcgcccgcttcgacctgcagagcacccgcgcccgctgctcccgcctcgtcccccgcgtcaaccgcttcgtcacccgcatcatcgacgagcatcgctcatctgctcccgtcgcagccgccatcgacttcaccgacgtcttgctctccctgcagggcagcgacaagctcgccgactccgacatggtcgccgttctctgggagatggtgtttcgcgggacggacacggtggccgtgctgatcgagtgggtcttagcccggctcgtgctgcagcaggacgtgcaggctcgggtgcacgacgagctgggccgggtggttgggctggaccgggacgtgaccgagtccgacacggcctcactcgtctacctccacgccgtcatcaaggagacgctgaggctgcacccaccgggcccactcctctcatgggcccgcctggccacgtcggacgtacacgtggacgggtacctgatccccgctggcaccaccgcgatggtgaacatgtgggccatagcacacgaccccgacgtgtgggccgagccgatggagtttcggcccgagcggttcatcgggaaggcggcggagttcagtgtaatgggttcggatctcaggctcgcgccgttcggatcgggtcggcggagctgccccgggaagagcctcgccatggccacggtggcattctggcttgccacgctgttgcacgagttcgccctcctcccctcgcccgacccggcacacggcgtcgacttgtcggaggtgctaaggctgtcgtgcgagatggccaccccgctggcggtgacagcgtggcctcggcgtgtggtgtga

SEQ ID NO: 7696 - DNA, 261 bp, Oryza sativa
  Clone ID: PAT_MRT4530_14267C.1
gacgaggagtacagcggcctgtcgctctagagagcctatatacatgtaaacatggtggcagtgaacggcgtaatcggaggagaacgtacatggctgtgtctgatctaaactgtggcctatgcctgagagatgtcgtatcatcgagacaaagaactgtgtacatgggtgatcgtgcacgcgtgtagcacgttaacaagataaattcgcagaactcagttttggatggcaaaaataaatacaacgacaacgatcaagccaagg

SEQ ID NO: 7697 - DNA, 699 bp, Oryza sativa
  Clone ID: PAT_MRT4530_14268C.1
atgtatgcagacgatgccatcatcttcattaatcccacccgaggcaatgtaaaagctttcgtggacattctggactgcttcgtcaccaaccttcagaaatcccaagtggcggccattagatgtgatagcattgacttggcaggtgtccttgatggtgttccagcggtgagggcaaatttccctctaaaatacctagggcttcccctagtacttgggaggttgtggaagacagacttgcagcctgttttcgacaaaatctcggggagggtagtaggctggagggaaaaaaacatggggtcagctgggagaaccacactcgtcaaatctgtactttcagcacaaccaatctacctcctggccgccctggaaatcacgaaggaatccttggagcagctagacaaacagcgacgccgcttcctctgggctagcacgggagatattattggaggaaaatgcaaggtcaattggacaaagacgtgcttgccgaccagtcagggaggcctgggggttctaaacttggataagttcatgaggaccttgcggttgcgattgttgtggaatgaatggaaagacctaaccaagccgtgggtcggcggtaggcggccgggcgagcaaaggtggcggcggctggctgggcaaccttggcagtcaggctccaccgcctccctccagcgtggatccggcggcagctcttggtag

SEQ ID NO: 7698 - DNA, 216 bp, Oryza sativa
  unsure (1)..(216): unsure at all n locations
  Clone ID: PAT_MRT4530_14269C.1
cggacgcgtgggcggacgcgtgggcggacgcgtgggcggacgcgtgggtttttttttatctgtcaggttgatgtcaacggtaacaatgctgcacccctgtacaagtatctgaagtctaacaaaggtgggcttttcggtgatagcatcaagtggaacttctccaaattcttggttgacaaggaggggtcggtggggattcnntntgcgcncaccacc

SEQ ID NO: 7699 - DNA, 2754 bp, Oryza sativa
  Clone ID: PAT_MRT4530_1426C.1
atgctctcgcgacaggttaggcgactagacgcacccgcgccggcggcctcttcggttccggcggccacctccggggattcggttcaagatttggttgaggtcagcacaggcaaggttctcaatgcagatctgctcaatcccgggtccggcgctgctgctgcgctcgctctgtcccttcaaggtcatggttcgccgaaagcaggtgctcagggatttaagcgcctttactctgaggtgctctccgctcctcttcgtcctccagctgctagtacctccctcttaacttcgttgcagccaccatcctcccctatgaagcctacaagctcgcctgctgcagctgtaaaggatttcaagatcctcaagagtgggcgaagagttgagttgtcttctcaaaatctttcagcttccaggcaaggtacaggaggcattcaagtgaattcagattcttggaaagaggtcagagggaagcactggtggagaaaatcctctgcattcaatcctcccaacaacaaagagtatctgcagtcaaggagggcgcgcttcctgcagcatatggaagggcatcccaatggccgcactgaagaagccgcgaccaagataatcgggcgcaagtgctcggttcaatatgttgaagaatactcccgccggcgcaactacagctgcacctatgatctttggatttggactgatgagcccagggcaatccctcgtggtggcactttcgccatcacttctgctgatgaggaaggtctgtccacggacattcctctgccggacttggagccgcttcgcaacccgccgccgtcagacacaaagaaggggtggacctacaatgtcctcgttcatgtggatactcttgaagacctcctcactcgcaaagcccatgcctataagtgggagtatgatgtccaagatgacggtactcgatatagagagtatcctctgccttgtagagctgagcctgatccttcaagagggccgactgatgatgacgacgacaaagacagagacaagccaagtaggtcccatcacaggagtcgctccctgtgggatcggcttgggcgccgatcctcaagctgcagcagagagccagagagagatgacggccggcgtcagggcaatgaagacagggggcgcccgcgcaaccgggaacgctcgggtcctcgtagcagaagcggtcggtctagggagccaagtgaggggcagggagatgtcctttccgttctggagagtcatcttgacccaatgttgcatgaggcgtccgtgcagcattccatctactcaccagacaatgctcctccccgtgtggcttctcctgtttttgtactttcttcttttgcagaacaggggactccgcataccaatggggtggcgacggatgtgcagactcaagccgggctggtggcgaggcagggcaacagggtggaagagttcatctctgctctctcgactcctcttcagcagccgctgctacctgctcccgacgtcaatgctcgttgtccaagctatgctaaggtgacaattcctgccatctcctcggcgcaacgccacagtaagcgcctccttcgcaagaagcgggcgggagcaaaacttgaaactcttgctcaagaaatcctgtcaaataagttttgcattttggatgatcatgcttcctttgatgataacatcaaaaagatttatttgcagcgctacaggaagcctctctctccatcctccttgaagacaatcgctgagctcgtggagaaggggggatgcaagaccatccgtctgaaggctgcaaagaagaaggtggcggtcgcgcccctcagtttgggccaaaattttgtgcggcaatgtgtggcccttccggcggacggcaccaagggtggtctgttgctagcttgcaatgaaaatttcttttctccttctgatgttatccttggacaatactctctgtctgcaactgtgaccatgcgagaagaggggctacagtggtcaatcacagttgtgtatgggcctcaactagaagctgacaaagtggtttttctctcagagatagagagcctgcagccctccatgaaatctgaatggctgatcatcggtgattttaatctcatctataaagcctctgacaaaaacaacgatcgcctaaatagacgaatgatgcagcgctttcgtggtctgctagacaaaattcaggttaaggagcttcaactccctggtcgtcgttttacttgggcaggggaagtgcaagactcatggcaacggccgatccttgccactaattgcctagctattttccgcatcaaacttcgacgtctcgctcgagatttaaagggatggagtcggagccaagtgggtgacattaagttacaacttgcggttgcatctgaagtggtctttcagctggacgtagctcaggaaactaggaccttgtcagacgatgagcgcctcctggtgtctaacctcaaaaataggattctggctttatcagttctaaacaaaatccagatcagacaacgctctaggcagacctggatcaaagagggagatgttaattcaaaattttttcacatcaaggccaattccagaagaagaaaaaattttattcaatccttgcacacgccatctgggattgcaatttcagcacaagacaaagaagaggaactgctgcgtttcttcaaggaaagaattggaactcgttttcaaagaacgtcagggattaactggaacatgatggatttgctctccctggaccttggcgatttagaataa

SEQ ID NO: 7700 - DNA, 419 bp, Oryza sativa
  Clone ID: PAT_MRT4530_14270C.1
cccacgcgtccgcccacgcgtccgcccacgcgtccgcacggcgaacccctcgccgccgccaccgccaccgccgatcgggcgggaggaggcgtcgcccgatccgatgtcggccgcggaggatcccgcgaagcccccgcccccacccccgccgcagctcgaggcgtccggatcggaccccgacgaccccctcctccgcgaccgcgtcgtcgtcatcgcccactcctctcctgggcgagcgcggataccgctgcgaggccccggacctccgcggctacggcggcaccaccgacctggcggagcacacctgctacaccatcttccacatgggaagggacctcggctccctcctcgacgccctatatatccgacaagtgttcgtgttggggcatgactggagcgccatagtgtgggggaacctg

SEQ ID NO: 7701 - DNA, 349 bp, Oryza sativa
  Clone ID: PAT_MRT4530_14271C.1
cgtgcagcggtgggcgtcggggcgcgacgtcgtggagctcgccgcgccggggagctactacttcatctgcaacgtcagcggccactgcctcggcgggatgaagttctccgtcgccgtcggcgagccgctgcccctgccatcgccgccgccgcctcccccgcgtgcgcccttcctggcgccgccgccgccgccgcccgtcggctccggcgccgatgacgcgtcgtcgacgtggcggcgacggcgggtggcgttgatggtgcaggtttcttgcctcgctctgcatcatcatcggcatgtggcaattcagctgttgattcagttgcatgatgtgcattgcatccaagcaatg

SEQ ID NO: 7702 - DNA, 615 bp, Oryza sativa
  unsure (1)..(615): unsure at all n locations
  Clone ID: PAT_MRT4530_14272C.1
ccccatacacgcgcgccgaagccgagtccaccaagagtcggatacanaagatcgcaccatcgctcacgcgcatatcgtcaggcctttatacctacgctgaacatcatccagcgacaaaatagagtgcgtaggtcgtatgtaccctacaataatgtatcacgacgacgaaatcacaacaacgcagacatgccaaaaaagacggtaaccacagccacacgcgcccgccgcctgatacccccatcagcttacccgacacgacagtcctcccccgcatcgcccgcggccatcgccaccgcctccatctgctcagcgcgtcacctccacggcgcctcccttcccccgccgccgccgcctcagtcctcctcccctccgccgccggtgccgccgccaaaatcccccaccgcgcgcgcgccacctactccctctccctctccaccaggttcaggcgaggtagtgagccctaatcctaagccctcattcctctcccccaccgcgccggcatcagctccaccccgttgtcacaagtctcccccactgctggcatcagcgtcctctcctcccctggctcctcgtgtccacgccgcctgcggctgcgccaaagtccaaggcgtctag

SEQ ID NO: 7703 - DNA, 170 bp, Oryza sativa
  Clone ID: PAT_MRT4530_14273C.1
acgcccacgcgtctggttagatctagaccaagttgacctgatatatgacattaaacttgaggatgggggggttatgtcaaagtgaaccctttctgaatttactgtttccggccttcaatttatggtggccgcttttgggggggccggttaattaccttactgcctgcctt

SEQ ID NO: 7704 - DNA, 191 bp, Oryza sativa
  unsure (1)..(191): unsure at all n locations
  Clone ID: PAT_MRT4530_14274C.1
gaggaggccatagccgacgtcatcaacgttgatggggccgaactcatcggcgacggaagcggagcggacgaactcaccggcgatgaggacacaaacgcccacgtggcctggcaccctcgggggacgtcgggcccgagggtgatgtgttcgccctcctcttattcccccggatgtggtncatgggatgaccg

SEQ ID NO: 7705 - DNA, 468 bp, Oryza sativa
  unsure (1)..(468): unsure at all n locations
  Clone ID: PAT_MRT4530_14275C.1
tcatcctgcccgctgcgctaggaggaggccatagccgacgtcatcaacgttgatggggccgaactcatcggcgacggaagcggagcggacgaactcaccggcgatgagggtgacgcgttgaggtgcggcggaagaactcgttgaggatggtgtcggtgacatgggatcaagagtatcatgactagaggtttgaggcagacacaaacgcccacgtggcctggcaccctcgggggacgtcgggcccgagggtgatgtgttcgccctcctcttattcccccggatgtggtncatgggatgaccggtatttgtaccattacaagcccgctgccgcagatattcccgtggcgagcgataacccagcgcactatgcggatgcccttcgttataatgctcggacggctctggcagggttctttgctgccgtttacccctctggtttgggctgatactgatgttagcacgctttac

SEQ ID NO: 7706 - DNA, 420 bp, Oryza sativa
  Clone ID: PAT_MRT4530_14276C.1
tgggcgccacgcaaatgcaaaacctttgcctggttgattctccaaaacagagtgtggactttggatatattagcaaccagaggctggccaaacggatccacgtgtccgctatgtcgtcagacccaagagacggctcatcactcagcactacgcacgttatacactcagagaatttggaatgagatagcgcattggactggcaatggacacctaagccctcatcgctggcgagcaacgcctacggtatacgagtggtgggaggccattgcaagtacaagagaagcaccaaagaaggcactacgcacgttaactttgctagtggcctgagagatttggaacgaaagaaactggaggactttccagtacaaggagttgccggcgtcaaatcttctatccaagataaaagaggaagaacaacgt

SEQ ID NO: 7707 - DNA, 240 bp, Oryza sativa
  Clone ID: PAT_MRT4530_14277C.1
atggactgcctcactgcgggcgggcgttggcggcacacgctgcaggtctgcagcagtgcgctagtgcggcactgcggctgcggcggcagccggccaaggcggcggactgctgcaggctacggcgccagtgcggcagtgtgggctgctgcggtggccaagccggccaaggcgcagcggcagcagcaggccaaggcttcgacgcgcgcgcgtggcccggcggcgctcgctctcacgatctga

SEQ ID NO: 7708 - DNA, 387 bp, Oryza sativa
  Clone ID: PAT_MRT4530_14278C.1
ccgtcatcttcccatcggaaggaaggtggttcttataacaaggcgcatactgtggccatgagagcgaacgtggaggcatgtatggcgtatcatcaggtgaatgggagtaagaagaacaggatccactactctgggccgttgatgcctcacggaggtaacatggaggagattctcaaagaacacgagcgtcaaatccagcaggcggtacgaagggcgcgcatggacaaccaggcaagaggcacgcaggcgttacggacggatcgctgattgatctagttatgcaagggagctgagctgcctctggtccatccctgaattcctgatgatggacagagatttttggttggctactatatatatattgttggcatgcattgaattgctcat

SEQ ID NO: 7709 - DNA, 306 bp, Oryza sativa
  Clone ID: PAT_MRT4530_14279C.1
atgtcccaagcatccagtagctatggtggtagggtgaagcgggtgctttgccccaactgcgattggggatgtcagtattatcagtgggaggatgagatggtggacagtgcagtgcatgcacttcatgcccctgcttcaatgcatgctgttcccatacaggcagtggcaccacctggtgcttttcctactacactgactggaggcaatgctcaagtggacaatagggtgatgcagcagattaagtggcttgaaaagctggtatatgtttgcatttttcttgctatgtatgctattttcaagaagtag

SEQ ID NO: 7710 - DNA, 1995 bp, Oryza sativa
  Clone ID: PAT_MRT4530_1427C.1
ctacaatattacaaccctcgttttgcgtatcttcccaatctcctcaatccccttctcttcaaacactccctccatctgagtgactgcgaatctgtcatggtgttttccatcacactgaacagccaaatgtgatggcttttttgacctttctaaactgagcacatctttgctgctaagatgctcaatctctgctgcgccatcgcttcctccggaggtcttcttgagctcctcgtacatgtcctcgatcatcggcttccacagtcggacgcgggcgtttatgaaccagtttgagacctggctcctgctcaggccgcttctcgccgccagcatgtccttctcgctgtcctttggatacgggcggaggaagttctcgaacatccaggccttgagcacggcgacggacttctccggcaagccgcgctgcggccgccacgactgctggtcacctcgccggagctgctgcatcgcccagtgcttctggatgaacgacgactcccagctccgctccttctcctccagcgccgccgccgccgccgacgacgacgacctcgccgtcgccgccgccaccagctgtcccatcacccgcctcctcaccctcctgtacgccgccgccaccgcccgccccgcgaacgccgccgtcagcccgccgccgccgccgccggtggagcgcaccatgctgttgaacctcgccgccgtgctctgcatctcctcgacgcattggttgcacttctcgtccacctgcatctcatcgccattggttcgcaccaagaaacggtttcttaggtgttcgacgaggaactgagccaagaactcaccagttggagtagcttcctcagacgctgcgcctccgccgcccacctcgcaccgccgctcccgggtgaggcatcctccgtcggcgccgtcgtgatcctcgccgaaaagcccgacgaggagcgcctggctcgcctcgccgccgtcgacgccgctggccgcgtccgcggcgacgtcttgcagcaggcaggcgacgaagccgttgagcagctcctgcgcgacgtgcgcgagcaccgctgaccgcgacaccacctgcgagaaatgcggaggcgccctcgagtggtacgcttgccttagctcgccggcggcggcggctgcggcgtcgtcgccgtgagtggggtggaacagggcggcgccggcgccggcggctgctgcctggtggtagccgaggccgcctccgctgctcacgtgggttaagccggagcagctcacttccgacgacgcgttcgccatgctgctcggggacgaacacttggtggcgccgagccgcagcgacagctcgctcgccgcgggcgccgccgccgccacggagctcgcggcgaaagggctcaagaacccggcgccggcgccggaggagaacccggacaggtagtacgcaccatgtaacggcgcaatgccggaccctccatagatccagccgccgccgccggcgtcgccgcacggcgcctctccggcgagccttcccatcctcgacgcctgagcaatggtgacacccgacgacgttccacacccaaactccaccgaacccagcaccgagtgcacggtgctgcagctctccgcgccaccggccgcggcggcggcgaccgcggcggcattcacctcctcctccgacacgctcccctgcggccgccgcagaggcacggcgcacgccagctcgtcgccaacagcagccaccggcgaggcgaccaagaactcgccgtccacatccccgaacccaaaaccaaagaacggcgccgccgcctctgcaccgccgccgccggcgacgaagcagcagctgatggcgtcgaggcccagctggtgataggatggattgctgctagtggacataaccggggtcagggactcaggggagagcaggggacgccatgattaccatcaggccacaccgagaaagagaagatgaagctgcattttttcagttttgcatggcatgcaatcatgcaggctccaaacctgcagcccggg

SEQ ID NO: 7711 - DNA, 2205 bp, Oryza sativa
  Clone ID: PAT_MRT4530_14280C.1
atgcggctcactgccgtcgtcgcggacattcgcgacatgggtggagtcatggaggatgaacacatcaacaagaagctgttgcgtgttgtcccgaagaagtacaagccggtggcgatttccctcgagcagcttctcgacgtgaaaacgatggctcttgaggagctcgtcgggcggctgtcgacggtcgacagctacagcgatgacgaagaagaagaaggaggaagcaagttgtatctcatggaggaacaatggcaatgtcgaaaaccgcgacgtcagcgccgcgtcgaggcaaacatggtgcagacagaggaggagccgactctgctcatggcacatgtgaccgggctgtcgctcactggcgaagcggcatttggtcgaacacctagggtgcaagaagtgcacctcactgaaaggaaggtggtcctggatgacgatgacgtgcatgaagtggagaacacaggagaatggttcctggttaccagggccacgaatcacatgacgggggcgcgctcagccttcgccgagctcgacactggagtcgtcggcactgtcaaattcggcgatggctcggtgatagacatccaggggcgcggaaccgtgctgcgcaagaacatcgtgagcgtcgggcgactcgacgcgcgcggctacgatgcacacatctggggcggtgtattcacgctccgtgatcccgaaggcttgctgctcgccaaggggaacatggttcgcgagcttccggccattgatcacgttgatcaattgtgcgacggctgtctcgcgggcaaacaacggcgactcccgttcccggaggaggccaagttcagagcacaggaggcgctcgaactggtgcatggcgacttgtgcgggccaatcacgcctgcgacaccgggtggtaggaagtacttcctgcttctcgtggacgacatgagccggtacatgtggattcggctcctgtccggcaagcatgaagcagcggcggcaatcaaacagttccaagccggcgtcgagttggagtccgggcgaaagctgcgggctctgaggacgggttgcaggggtggaattctgcacaccgccgagtgtgatctcccatctgggcacaaggcaattggtttgaagtgggtgttcaaggtgaagaaggatccagcaggtgcagtggtgaaacacaaggccagattagtggcaaagggatatgttcagcagcaagggattgactttgaggaagtttttgcccctgtggcaaggatggagactgtgagattgttgattgctttggctgcgaataaaggttggcagattcatcatatggatgtaaagtctgctttcttgaatggtgacctagaggaagaagtctatgttgtgcaacctcctgggttcagtaaaaaaggaagtgaaggcagagtgttaagactgaagaaagcgttcaaaatcttggagaagacaggaatggaaggctgcaattcaactcaggttccaatggaggcaaagttgaaactgagaaaggacagtaatggtgaagctgtagattcagctttgtatagaagcattgtgggaagtctccgatatttggtgaatactaggcctgatcttgcgtattcagttggatatgtaagtagatttatggaaaagccaacttctgaacattgggccgcagtaaaacatattttgaggtatatttctgggactctcaaaattggctgctggtttggaaggaataagtctgaaaatctggaattggttgggttcagtgatagtgatatggcaggagacatggatgataggaagagcaccactggagttctgtacaggttgggagagagtttgatcagctggcaatctcaaaaacagatggtggtagccttgtcatcgtgtgaagctgaatatattgcagctactacggctgcatgtcagggcatttggctaagcaggctgatggctgaaatactaggtgaaaaacccaaccaaatagtgatgaaaattgacaacaagtctgcaatcagtttgtgtaagaatccagtacttcatgacagaagcaaacacattgatactcgattccatttcatcagggagtgtgtggagaagaagcaaattgtcgtggagtatgtgcgttctgaagaccagcttgcagacattctgacaaaacctgttggacgagttcgatttcaggaacttcgaaagaagataggtttggagcaggtgattcaagattag

SEQ ID NO: 7712 - DNA, 464 bp, Oryza sativa
  Clone ID: PAT_MRT4530_14281C.1
ctggtgttttttttttttttttttttttttttttttgtgggttttttttttgcaggaaggaaagggcctcttctggcatcataatttgctaatcatgtgaagattccagttgcaaactgatacagcttattttgggaacccaaaaaaaggctttttccatttccttcactacttctatacactgataatcctaacatacaggatgtatactacccaaaaaaaaaagggaacctttacaaaagtataaaatgggtaacagcaatgacttgagtaagctaacaacaaggcatttgacttcaccttgatctaccggctttgtttagcgtctcccaactaatatcctggccacattctttgcaactcgggctgcatccaggcttggggccttggcttctccgagtaagcaaggggctcaggttgttacccttcttttggttggttgaaggggccttaagctgctgggg

SEQ ID NO: 7713 - DNA, 660 bp, Oryza sativa
  Clone ID: PAT_MRT4530_14282C.1
atggcttctttcatttcctttctgcttcttgctgctcttattgggatggcctcatggcaggccattgcagcagaacctagccctctccaagacttctgcgttgccgatctgaattccgcagtgcgtgtcaatggatttgcttgcaagaacccaacgaacgtgagtgcagatgatttcttcaaggcagccatgcttgacaagccaagagatacggcggtcaataaggttggatcaaacatcactttgatcaacgtcatggagataccaggtctcaacacacttggcatctcaatagtgcgcgtcgactatgcacccttgggtttgaacccaccgcacactcaccctcgtgcaactgagatctttacggtgctcgaagggacactttacgttggatttgtcacgtccaacccagacaacaagctcttctcaaaggtgctcaataagggtgatgtgtttgtgttccctaaggggctcattcactttcagttcaaccttgacccccataagcccgcaatcgctacctcagcaattagtagccaaaatcctgggattattactattgcaaatgcagtgttcagatcaaacccaccgatctcggatgatattttggccaaggcatttcaggtggataagaagattatagatttgctccaagcttag

SEQ ID NO: 7714 - DNA, 655 bp, Oryza sativa
  unsure (1)..(655): unsure at all n locations
  Clone ID: PAT_MRT4530_14283C.1
agggaatcctggacctaagtctcagcagaaagcttccactagtaggaggacaggagggcatacatcaaatttgctaccagagacatatgatgataccgaagtcattggactgacagccaatggttcaggttctcgcgtacgatcatttggccaagctcaagaaaacagtatggagccagtaggcttggatgaggtttgcagtttgcatcctgtaggctttcaattaagtcatgttgtgcttgtaggtgctaattcttttggtttctttggaacccatcatagcacttgaagagttgatcagttgaacgaattctgcttccactccttccgcttatagtctttataataacatctacaaactcaattcttgatctctttcttaaataaaaaaactaatcaaacacaaaaaacaatctggtatttcttttggctgtaggtagttctttgtgtattcatatgatgccaattatatgggacactactataaatcaggcaccagattttctctcaaaaatcgggctgtcaaatgtttcagttgaccaccggtgaaacgctaagttgtacatagtgaaacaaaaaaaatgtctctgntacatttancaattttgtgaaacacctgtcgaaacatttaccatcacgtatgaaacattgaatt

SEQ ID NO: 7715 - DNA, 595 bp, Oryza sativa
  Clone ID: PAT_MRT4530_14284C.1
ggaactgtttgcctgttgcattgagtatctgatattagagagtgataatttgtcaaagttgttccccaatgcacacctgaccattgggacatttacaataaatgcgcatatattattcgcaatcctgactactctgattgtcatgccaacaactatgtgccttggattccatcttgttcattccgttttagctggaggagtgattgcatctatagtcattgttgcttgcctgttctgggttggacttgttgatcacattgaggccaaggatgaagggacagcactgaatctcccaggaattcccattgccgttgggttgtatggctactgctactcaggtcatggagtgttccctaacatctactcttccatgaagaaacgcagccagttccctgctgttattttcacctgcattgcattatctactgttttgtttgctggtgctgcaattatgggatacataatgtttggtgaatcaacagaatctcagttcacattgaacttgccatctaatctggtagcttccaagattgccgtctggacaacgtcatctttagcattctctgtaacatctggtgacaaatccaataactaa

SEQ ID NO: 7716 - DNA, 153 bp, Oryza sativa
  Clone ID: PAT_MRT4530_14285C.1
atggccgccgtcgccagcctcaccgccgccgcctgcgccgccgccaaccacgaaaacgctgacgttggagcaagtgaaatcttcgcgctaggaggagacgatttgtacgactacatcgagctcgaaggttgcaagacatgcaccctcacttga

SEQ ID NO: 7717 - DNA, 528 bp, Oryza sativa
  Clone ID: PAT_MRT4530_14286C.1
atgtcgtccacgtcatcgtcgccgccgccgccgtcgaaggcaaagaggcgaggctgcatccatggcgcaaggccgcagccgctgatcgtgtcgtcggcgccggcggaggcgagccggccgtccaagaaaccccgtgtcagcggcggcggcggcgacacggggccggtgatcgtgtacgagctcacgcccagggtcgtccacgtcgagcaggaggagttcatggccgtcgtgcagaagctcaccggcggcaagcagcagccggcggcggcttcaaccttgacgacattgccggcggctgatcaggtggccggaggtgatcacgccgctgcagcggcggccgccgccgacccactggtgctcacgcttgggcagcagcgtcagcctgctccggcgccggcgatcgacggcgaccatccggcggcgccgcctcattctccaccggcggatgcttttcttctgtcgcccagtagtttcttcttgtcgccaaccacgatgcatgcgttacaagagttggctgctttgttctaa

SEQ ID NO: 7718 - DNA, 288 bp, Oryza sativa
  Clone ID: PAT_MRT4530_14287C.1
aaaaaaaaaaaaaatgacgggttgttttttttttcccaacctatttaaaaaacggacccccccaaaaaaaaaagggtattttttttaaacacccccatgaggctcccccccccaggcttaaatttcccttttcggcggggttttgggggctgcaaatgaccagccactgtctaaaagccccccactccctggggagggcttacaccatgaaaaccaccggggggcgcctggccccacccaaaaattcctttttggtaccgggaagaaaaccaactttttggggggccc

SEQ ID NO: 7719 - DNA, 2711 bp, Oryza sativa
  Clone ID: PAT_MRT4530_14288C.1
atggaggtggagaagccatgggagttgaaggaggatgtggagatcatgacggaggaggaggaagaagacgacagcagcaacctgctgcaggccaggggcaggaacaagaagcacgcgctcatcaatggagatgaacaacaacaacaacaagaagaagaagaagaagaagaggttgttgaggagcacaagagcgtcttctttgatccaacccaagggttatggaagtgccgtcactgcgattggacatacctcttgagtggtccatccagaaatgttatcctgaatcatcaagggtattgccaaatcacgacgaatcttgaatcgttagttcagagtgaatcattttacagttcaccaagcaaagctttttatgcacaaaatgagcatgtcactgatgatggaaaagctgtttctgagcatgttactgaagtaagtggtaagaatgaagttacaagagtggagcagttcgttgctaaaaaggaaaaggcgcatgaaacatcaagttcaaagggaaaagaacttgagacacaggaaaatgctaattctcaagaaactaatgaaaattctaataacagcagtttggagaacagatcaccttcaaatggttcacatgaagtctgtaacagtggtgaaacagttacagttgcaaatggaaaagcaggcttgaaagtgatcacaatcattgacaagaaccaaaacggcctggcaaactcaaatggttctcttcacattgccaatgtcagcatgaacaaaactagtgtccatgaaattgaagctgagaaggatgaagatgtcattaagggcaaagtgaacattgaagagtatgaccttgagaaaattcttgatgagcaagaaactcatgacctgttctgtcccaattgcaactcatgcataactcaaagggtgattctgcggaagagaaaaaggacagtaagacaaacatcacctgatgaaccaccaaagaaaacacagattgcagagccttctgctaatacttcaaatcagactgtacctgaaagacaagggcaagagtcacctgacatattcagatgtttatcatgcttcgccttcttcattccaacaggttgtggctttaacatattccgtatatttggaaggacggaagtgaaccaagaagctcaggtacaggaagctgctgcatcaggtcagatgtctggctccgacaattgtgcaagttggcttttttcttgtttcgagcctggagacggtccaaagaaaactgatgcaggtccagaaaaggagccactattacctgacaagcaggactccaataatggttcagcttcatcagttgaaggtagcacagcatccgttcatagtcatggcataagtgtacaacaacaagaatcaaagagaccattgccagctgagtcatcttcccaacttcaacccagcaatacaaagaaagaagacttcggaacagtatcgttcagtggatcatcatcggtagaagctccttcatcgtcatctgctagcattatcaaccctggacagaccgcgacaggattccttcagactggggaaacacatgtggtgattgggcagcaggacatcgtactgcaacagaacgttcctcttccaaagcctggagatgcagctcacctagataaacagaaacaagaaactccaccagcaagccacacatttcctacaccgggagtcaagatcccagatgcaaatccagctaaatttataccagatgtggtgaggccaatggtagataaaccaagtcgaggcattgtgattcctcctgaagcagttgagtcacaaactcgacctgagcattcatcagtgcaaatagggcctgatgcgagcatgccattgattgatactcctgcaccagagcaaagggatgattgggacatcctgaaagctatcgtatacggtggcctcgtggaatcgatcaccagcctctctgtggtttcagcagctgcatccagcggcgccaggacatccatcacatatgttggtcgatttgcagtggacatattcatcttgggcatagcaaacctcatcggtggacttcccatcatctttcacagcatggctgagctgagaagcattggagatgtggatgagagggaggagcagggcggtcactactggttgcagctggggaggcgatccaagtaccggctgcatgtcgccatggccgtgctgtcctacctcctcttcggcctgctgccgccgctcatctacggcctctccttccgcggcggcgacgtgagggagaagaagatggtggcggtggcggcggcgtcgctggggtgcatcgcgctgctggccatgggcaaggcacacgtggcacggaggcggagctacgtgaagagcctcctctactacctgagcattggcgtgagcgcgtcgggcctctcgtacgtcgccggcctcctcgcccactttgccctcatcacccaccaaacccctcctgcttcatcctcctgggcttcatactgaatttcttcttcttgtttggttcgacaaaagttttgatgccttcccatttacagcaagcccttcgcaagatcatagtgtaaaagctctttttcgttgtaccatagcaccctttttttttgtcaataaactttggcaaggaaaataacaaggtcaggcttgccctgttctttttactgaagaaaaagaacattttatctgcctgacaaagagccagcagcccggggaaccacaag

SEQ ID NO: 7720 - DNA, 1301 bp, Oryza sativa
  Clone ID: PAT_MRT4530_14289C.1
actgactagggtagacagtactaggacgaggcaacagcgactgcgttgtcccacccacacatcttgcggttgcgcggcggagagagagattgatgatgtcttcttggttgttccggcggagtgggccctcgggcttctcgtgggcctccaccgccgaccaagtcaccgccgggctctccgccgccggcctcaccgccatcgtcaccggcgcctccagcggcatcggcgccgagacggctcgcgtcctcgccatccgcggggcacacgtcgtcatggccgtccgcaacctcgccgccgcgcagcccgtgcgcgacgccatcctcgccgacgcccctgccgcctccctcgacctcatggagctcgacctcgcctccatggactccgtccgcgccttcgcctccgacttcgccgccaagggcctccccctcaatatcctcatcaacaatgcaggggtgatggcaactcctttctctctctcaaaggatggtatcgagttgcaatttgccactaaccatgttggtcattttcttttgactcatcttctcttggagacaatgaaaaagacctctcgtgaatcaaatgtggaaggaagaatcgttaatgtttcatcagaggggcacaggtttgcatatcgggaaggcatccgctttgccaagataaatgacgagtcggagtacaactccattggagcatatgggcagtcaaagcttgcaaacattttgcatgcgaatgaacttgctaggagatttaaggatgagggtgtcaacataactgcaaattctcttcatcctggatctatcatcacgaaccttcttcgtcaccacagtatcctagatgttctccatcggacacttggtaaattggtgcttaaaaatgctcagcagggggcggccaccacttgttatgttgcattgcacccacaggtgaagggtgtgtccgggaagtacttcagtgacagcaatgtgaacgaggcgagtgagaaaggcaatgacatggagctggccaagaggctgtgggagtacagcatcgagctcatcacctgacctgacctgacctgattcatgaactgaatgagagatactatgtaatgttgaagtttgagagagtgcctgtaaagtaaattgtggtaacttaactatggcagctaccatctggtgtgcgtgcgtacgtacatcaaaccaacatgatactagtagtgagtaataagcatatgcgaatcttcctcctcaaaaaaaaaaaaaaaaaaaaagaggggggggcccggtacccaattcgccctatagtgagtcgtattacaattc

SEQ ID NO: 7721 - DNA, 780 bp, Oryza sativa
  Clone ID: PAT_MRT4530_1428C.1
atgaagacagggggcgtccacgcaaccgggaacgctcgggtcctcgaagcagaagcggtcggtccagagagccaatctgcttccccctgcaagcatccaagctcccgccgccatccgagcccgaatgggggcgaagctgcaactccctctgccagcctagttgtccaagatcaagctattcttcaggctgactcatgcttctgttcgcaggggcagggagatgtcctctccgttttggagagtcatcttgacccaatgttgcatgaggcgtccgtgcagcattccatctactcaccagacaatgcttctccccgagcggcttctcctgtttttgtactttcttcttttgcagaacaggggactccgcattccaatggggtggcgacggatgtgcagactcaagcagggccgatggcgaggcagggcaacagggtggaagagttcttctctgctctctcgactcctcttcagcagccgctgctacctgctcccgacgtcaatgtttgtcgtccaagccgtgctaaggtgacaattcctgccatctcctcggcgcaatgccacagtgagcgcctcctttgcaagaagcgggcgggagcaaaacctgaaactcttgctcaagaaatcctgtcaaataagtttggcattttggatgatcatgcttcctttgatgataacatcaaaaagatttatttgcagcgctacaagaagcctctctctccatcctccttgaagacaatcgctgagctcgtggagaagggggatgcaagaccatccgtctga

SEQ ID NO: 7722 - DNA, 855 bp, Oryza sativa
  Clone ID: PAT_MRT4530_14290C.1
cccacgcgtccgcttattagtattgttcctgtttgcaacaggccatcatccatggattccttgaggtgctactcacctcacacaatcctgattccgaagacgatcggtccaggaatctgatcagagcctccatggatagcagcttctcaggtcctgaatccaagaaggctcccaactctgtcagcttcaccagcaaggtcaacaaggtctatgaagacaagagcatgggcatcctctgctacaccgacgagagcggcgagctgatctgcgagggcttcgacgagggcccaaggctcacctggcaagacatggagaagatcaacagggagaaggaactgaaggctgaagaagatcgtcgggagaggatgatgcggatcggcgtcgcggggatcgactggagcagcctgcggaccgctgtcagcaagcctgtcagtgtgggggaagaactgaagaagtaaacaagctgacaagcttagtgcagtaggttattttctgaaatgtttcagatcttgtagaaacaagttatgcttgtttgtgtgtatatagagtatgtagatcgatctccattgctgctgctttctctggaataaggattatgctgtgtttaggtaggattaggaggagacaaagaggggcgtgatgctgatctagctggtcagctcctggcttccaattgataaagagatcatgtaatatattctgcttggatgatcgttcagcttaatgttagttccaacttccaagttgatcagaaaaaaaaaaacctgtcgaaccaagctgctgggagttcgtttgcctgtcaatttgttgcttgataagaaattctctgaaagttaaaaaaaaaaaaaaaaaaaa

SEQ ID NO: 7723 - DNA, 651 bp, Oryza sativa
  Clone ID: PAT_MRT4530_14291C.1
atgcacgctgactacatccacacccatgctctccccgcttcatgcaaggtcgcccatcgctcaccaatatgtgttgatcccaacaatgtcgtcatcagcaccctcgtctatagcattgtcctgacattattccctaagcacccacctcccccgcttgctcttgtggcaatcccgtgccccgttgagaacttctacctagtgtcactgtcggactctgagtttttcgaccggcacaaggctggctcgaggaggccaaccgcctccgcaagctcaaggagaagtcctggagcaccgcgggagcgacaggtggccctacgcaaagtaggagagcacgacagttgtgacatagagggagtggaggaagaaccgaaggacgaggcaagagaggatgacatcgaagctggagccttaaaacatggcgaccgggatttgatggctgaggcacgcatcacagctctagaatttgatctggtgaaaaataacgcggacccgttaacaccacgaagaatcatcaaccttgcatcaaccaccttctgcgcagaactgacatttaaagtcgagctgcagctcattgatacgtcgagttcatccatgttgctatcctcgcagatgagtgatgaggattctcggagaaggctgacgaagtgttag

SEQ ID NO: 7724 - DNA, 348 bp, Oryza sativa
  Clone ID: PAT_MRT4530_14292C.1
atggggcatgcggcggcggctgacccagccgcgagcgccagccgtccccatcaggaagccgcggcgggcgaacagggcaagcagggagccggggagcaagaaatcgtcagcgtggaggagcttgcggaactcgacagcggcgaccacaacaggagcttggcggcgatgccggttcgtatgaaggccgagaaggagaaagagaaggaggattttccggtgatggcgatggtggcagggctgccgatgaggatggggccgaggggtagtacgaggcgtgggacctctccgacaatgaggcggtgctgggcagatcttgggggtggaactccgcggggaggcattaagtag

SEQ ID NO: 7725 - DNA, 153 bp, Oryza sativa
  Clone ID: PAT_MRT4530_14293C.1
atggcgtgttcagtccattcctacctcgaggcggctgccgctgatgccaaggattgggctggtctccttttcgcggagctgtacgttacaggtcaccttctcttctttgggttctttctcaaccggcttcaaatcccaaacatcgacggataa

SEQ ID NO: 7726 - DNA, 750 bp, Oryza sativa
  Clone ID: PAT_MRT4530_14294C.1
atggttgctatgagaggagcctcgccggttgttgttctggtcttggttgcttccgttcttgctccaggcgccatgtcagcgaagttcgtgttcaccaacaattgccatgaagtgctctaccccggcgtgctgacgccggcgaccgcgcaggcgttcccgaccaccgggttcgagctgcagccgggcgcgtccgccgcgtacgacggggtcccggacaactggtcgggcaacatctgggcccggcggctctgctccacggacgcctcgggccgcttctcgtgcgagtccggcgactgcggcacgggccgcgtggagtgcgacggcaggggcaacggcccgccgtcgacgctgtccgagttcacgctacgcggcggcagcgcccgcgacacggacttctacgacatcagcaacgtggacgggttcaacgtgcccgtgcaggtggcgccgtcgggcgccgggtgctcggcggtggcgtgcgcggccgacatcgacgcgtcgtgccccgcggagctggcggtgaagggcgccggcggcgcggtggtggggtgcaagagcgggtgcctggcgttcggccgggacgacctgtgctgccgcggggcgtacgggacgccggacaagtgcccgccgagccagtactccaagttcttcaaggacaagtgcccgcaggcgtacagctacgcctacgacgacaagagcagcaccttcacctgcacctctggcgccagctaccaaatcaccttctgcccttga

SEQ ID NO: 7727 - DNA, 252 bp, Oryza sativa
  Clone ID: PAT_MRT4530_14295C.1
cccagactgggggaaagcaggcgcatgtggagctccaatacgcaattgaaatggtggagttgaggctgctactgcaatgtgagggcaaaccacacaaggcatgtgtgacaacatgttgatggctgtgcacgggcatgcagtaatgttggtgtggggaatttgtggaccggataacaaatgttgcacacagggaaacagctgatgaccatggattaccccatagctgcttaatgacgactgcaactataggga

SEQ ID NO: 7728 - DNA, 2690 bp, Oryza sativa
  Clone ID: PAT_MRT4530_14296C.1
atgtcggcagggaccgccccggccgcgccgcggtacgcgccggacgacccgtcgctccccaagccgtggcgcgggctcgtcgacggcaccaccggctacctctactactggaacccggagaccaacatcacccagtacgagaagccgctgccgcccgaggaccagctcccgccgcccccgccgctccccccgccgcctccccgctccggccgaggcgaccgagaccgcgaccgccgcgaccgctcccgatcccgcaccccgccgcggcgcgaccaccgggaccgcgaccgggaccgcgacaggcgccacgacgaccacaggtcggcgccttcccaccaccatcctcttccggccgccgccgccatcgccgccgatgatccctccaccgaggcgtatcgccaccgccacgagatcaccgttgtcggggacaacgtgccagctccgataacttcgtttgagactggtggattcccaccggaaatcctcaaggagatacaacgtgctggattctcaagtccaacgccaatccaagctcagtcatggccaattgccttgcagtgtcaagatgttgtagctattgcaaagacaggatctggaaaaactcttgggtatctacttcctggatttatgcatattaaacgcttgcaaaacaacccaaggtctggtccaacagtgctagttttggcaccgacaagggagcttgcaactcagattttggaagaagctgtgaaatttggcagatcatcaagaatttcttccacgtgtctatatggtggtgctccaaaaggcccccagctaagagatttggatagaggggtcgatgtcgttgttgctacaccaggaaggttgaatgacatcctagaaatgcgaaggataagccttaagcaagtgtcgtaccttgttctagatgaagctgaccgtatgttggacatgggatttgaaccacaaattcggaagatagtgaaagaaattcctcctcgtcggcaaaccctcatgtacactgctacttggcctaaggaagtccgacgaattgcagaggatcttcttgttcaccctgtccaggtgaccattggaagtgttgatgagcttgttgctaatagtgctattactcagaatgtggagctgatcacaccgtccgaaaagcttcgccgtctggagcaaattttgcgatcccaggattcaggttcgaaggtactaatattctgtaccactaagagaatgtgcgaccaacttgcaaggacacttactaggcaatttggagcttctgccattcatggtgataagtcccaaagtgaaagagagaaggtcctgagccattttagatctgggcgatctcctattttggttgcaacagatgttgctgcacgaggcttagacatcaaagatatcagggttgtgatcaattatgatttccccactggcattgaagattatgttcaccggattggcaggactggaagggctggtgccactggtgtggcctatacgtttttctgtgaccaggattcaaaatatgctgctgatcttattaaaattctggaaggcgcaaaccaacgtgtgcctcgtgacttggcggacatggcctctcggggtgggcgtggtggtaggaagcgtaaccggtgggcaacccgctctgataggggtggttcgcattctgaactggattctaggtatggtggaagagatggtctgtcagggtcttctggcagattggatagtagtcgcagtagtcgcaggcatgactatggtgatgatggacggtctcgcaggtctgggagaggtcgcagtaggagccgtagcagaagtgacagtgataggtatagccgaagtcctaagaggtcacgccgtcatagccgtagcaggaccaggagtcggagccgaagcaggagcaggagctacactaggaaccgtcgtgctagccgcagcaggagccgtagccctggtgctagccgtaggcatgaaagaagcgctactggctctgggtctgcactgccagactctgggcacggtgagcgcaaaagaacaccagaagctgacccatcaagaaaccatacaaaccactcagacccgaaagatgaccgacacccagaggatgggaaggtgggaaaggttgatctcgatcggtcgcctactccacaagacaagtctggcccatatagtcctgcttacaatggaaaaaccagtcgctcagtgagccctggtaatcaggtggaaggaaacaacaaagctgcggaggtttctaagaatcctgatccttcatcgccaccccatcatggtaagaccagggaggacgaagaggaaggtatgatagatgaagatggagagatagctgatgatcctcgggcaaatgcaaccgtgcagaatggcggtgataattgactctttggtcccaaaagaatttaacaaactgctgagcagccactacagatgatctgcgtgacaaagctcaaaatgttaaaaattgtctgaagctgtcttttcgtagtcaaaacttaagttatgaaactatccgtgtcgtagagagctggagattgttttgtgcctgagttgtcttataacattatatactttgtagaccctgtcgaagtagatcatgtgaagtgaagttggtagctctgttatttgtgaaccaataccggaggtgcaaatcatgcaagattatgcaaatgtctaaaaaaaaataaaggctt

SEQ ID NO: 7729 - DNA, 1768 bp, Oryza sativa
  Clone ID: PAT_MRT4530_14297C.1
cccacgcgtccgcccacgcgtccggcttgcctaggaagcaaggaattagccatggcttctgtttcgccgctactgcttctcctcttgtgcagctaccactctgtagttgctcatgcaggagatggacagagttacaaggttcttgagctgaattctgaggccgtctgctccgagcgaaatgcgatttcgtcgtcgttgagtggaaccacggtggcgttgaaccaccggcacgggccatgctcgccggtgccgtcgtccaagaagaggccgaccgaagaggagctgctcaaacgcgaccagctccgagccgagcacatccagcggaagttcgccatgaacgccgccgtcgatggcgccggcgatctccagcagtcgaaggtgtcgtcgtccgtgccgaccaagctgggctcctccctggacacgctggagtacgtcatctccgtcgggctcggcacgccggccgtgacgcagacggtgaccatcgacaccggcagcgacgtgtcgtgggtgcagtgcaacccgtgccccaacccgccgtgctacgcgcagacgggcgcgctgttcgaccccgccaagtcgagcacctacagggcggtctcctgcgccgccgccgagtgcgcgcagctcgagcagcaaggcaacggctgcggcgccaccaactacgagtgccagtacggcgtccagtacggcgacggctcgaccaccaacggcacgtacagccgcgacacgctgacgctgtccggcgcctccgacgccgtgaagggattccagttcgggtgcagccacgtcgagtcgggattcagcgaccagaccgacgggctcatgggcctcggcggcggcgcgcagtcgctcgtgtcgcagacggcggcggcgtacgggaattccttctcgtactgcctcccgccgacatcgggctcgtccgggttcctcacgctcggcggcggcggcggcgtgtcggggttcgtgacgacgcggatgctcaggagcaggcaaatcccgacgttctacggcgcgaggctgcaggacatcgccgtgggcgggaagcagctcgggctgtcgccgtcggtgttcgccgccgggtccgtggtggactccggcacgatcatcacgcggctgccgccgacggcgtactcggcgctgtcgtcggcgttcaaggccggcatgaagcagtaccggtcggcgccggccaggagcatcctcgacacgtgcttcgacttcgccggccagacccagatctccataccgaccgtcgcgctggtgttctccggcggcgccgccatcgacctcgacccgaacgggatcatgtacggcaactgcctcgcgttcgccgccaccggcgacgacgggaccaccggcatcatcgggaacgtgcagcagcggacgttcgaggtcctgtacgacgtcggcagcagcacgctcggcttccggtccggcgcgtgttgaccggggcgggcggcgcgacgccggcgcctggcgggccgggcaacacgacacacgtagaggccaagagggtagcagtaggttgctctcatgtggtcgtctacttgtttgtggttgcgaggtaagagtcgtgacgtgtgatgatgacaagatataatgatatatattgcaattgtaatccaacaaccaaaatattatattagtccctagctctaaaaaaatattatattaggagtgaacttttcatgattttttatgaataataaagactttatactgattaattcgatcgtttgattcccaatcgacggatgcatcattagtgatc

SEQ ID NO: 7730 - DNA, 435 bp, Oryza sativa
  Clone ID: PAT_MRT4530_14298C.1
gggccccgattccgagttcgagccacgcgccacgcctaggattgcttgcatccatccttccatgtcgcggcctcatcaggtggcactatgctggctcacacactggagacctctctatactgggagcgagctgacaacggtgcttgctgcctggatcactagacagattcagtgctgaaccgtactgctatgtcaccgacgcatgcactgatgagccgatccagcacggcggtggacgcgaagtacaccaagtatactcatcaatggcaactgcacagatgcactatctgggaagacgctctcgacggtggatgctctcactgcatatggcattgtccctacgaccataggctacacgtatgactataactaggtcacctccgtcgaccgccgggacatataataggtccccatgacgccgatgaccgcctacga

SEQ ID NO: 7731 - DNA, 725 bp, Oryza sativa
  Clone ID: PAT_MRT4530_14299C.1
cggaattcccgggtcgacccacgcgtccggaaaaaacccctacattcctccctcttctttgccgcggcgccgacatcgatccatccctaacaaataacacgatgtcgcgcgccacggtcgccatcctcttctacatcctcacagccgccgccgccatcagcgcggcggcgcaggccccagcggagtcgccatcgccaaagccatcgaagagcacggcagctgccacccctgcaaaggcacccaccgtcgcatcggcaccgaggaaggccggaccagctgccgcgccgacgaccaccgtggctacctccgcgcctgctggtggcgacgaggtgtccatcccccctacgccgttcgccaccgtggtgtctcccgtcgccgatggacctgccgatgcggctgacgccgatttctccggtgccggtgctctcaagaggtgcgctgccgttgccggtgtcgcggctgccattgccaccgtcaccttctactaagatgccggatgcagagatgtggagtgtcatggtgagctgttagggtggacagcaggaggaaggcgttactgtcgttgggaggggccacatatttcctggttttgctcatctcacttgcttgtgcaacattatggggtcgacactatatcaattgaatgcatttgaacgactgataaaacttttctgacgacaaaaaaaaaaaaaaaaaaaaaaaaaaaaaaaaaaaaaaaacaaaaa

SEQ ID NO: 7732 - DNA, 3039 bp, Oryza sativa
  Clone ID: PAT_MRT4530_1429C.1
gggcctgaattcaaaggcgaagcaagacgccgtgaaaattattttgcaacaatatggtgctactattgtttgtctccaagaaactaagattgcctctttaaatgatcgtgttgttctcaacagtttgggccaaaattttatgcggcaatatgtggcccttccggcggatggcaccaagggtggtctgttgttagcttgcaatgagaatttcttttctctttctgatgttgtccttggacaatactctttgtctgcaactgtgaccatgcgagaagaggggctacagtggtcaatcacagttgtgtatgggcctcaactagaagctgataaagtggtttttctctcggagatagagagcctgcagccctccatgaaatctgaatggctgatcatcggagattttaatctcatctatagagcatctgacaaaaacagtgatcgtctaaatagacgaatgatgcagcgctttcggggtctgctagacaaaattcaggttaaggagcttcaactccctgttcgtcgttttacttgggcaggggaaggcgcaaaccctactcaaaccaagatcgaccgctcttttgtcacgactgactgggatttgatgtttgagagttccaatttgtatcttttgtcttcagcatgttcagatcatgcgcctctctttctggtaggaaatgagcaaagatcgaaattcccaagcttcagatttgaatctttttggctcaaaattcctgggttcttggaagcggtgcaagactcatggcaacggccgatccttgccactaattgcctagctattttccgcatcaaactacgatgtctcgctcgagatttaaagagatggagtcggagtcaagtgggtgatattaagttacaacttgcggttgcatctaaagtggtctttcagctggacatagctcaggaaactaggactttgtcagatgatgagcgcctcctggtgtctaacctcaaaaataggattctggctttatcagttctaaacaaaatccagatcagacaacgctctaggcaaacctggctcaaagagggagatgttaattcaaatttttttcacatcaaggccaattccagaagaagaaaaaactatattcaatccctgcacacgccatctgggattgcaatttcagcacaagacaaagaagaggaactgctgcgtttcttcaaggaaagaatcggatctcgttttcaaagaacgtcagggattaactggaatatgatggatttgccctcccttgaccttggcgatttagaagaagacatcacagaagaagaactgaagaaaactgttttctcaatgccacccgagaaggctccggggccggatgggttcattggtgcattcttcaaatcagcgtgggagatcattaacgaagatctgttatcgacagtaagatcgttttttgatcttaacactttgcagataaaggatctaaactcagccttcatttgtcttcttcccaaaaaagaagatgctttgggagctgaacattatcgaccgataagcctaatccatagtttctctaagataatttccaaaattttggcaaacaggctagcgccaagactgtgcgagcttgtctccaccaaccagagtgccttcgttcggaaaagggctatccacgataatttcgtcttcgtcaaaaacatggtacaatatttacatagaacgaagaaaacgagtctgtttatcaaaattgatattgccaaagcttttgacacggtttgttggccctaccttcttgaagttcttcgtcagtttggatttggaatccgttggcttaactggatttccaatttacttgcaacctcttcctcccaaatgcttctcaatggatcttcggggcaatcaataaaccatgtccgaggccttagacaaggggatccgctctcgccgatgttgtttatcctagcaatggaaccttttcaccgaattattaaggcggttgaaaatgcatcacttctctttccgatgggtgggagttttgacagattcaggtgctccttgtatgtagacgacgtggcagtttttgtgaagcctcaggcttcagacttatcggtgcttatgaggctcctaactttctttgcgcaaacctctggccttcacacaaacatcagtaagacagagatctacccgatcagatgtgaaaacatcaacctcgtatctcttcttgcaaatttccctggaatggtaaagcaattcccttgtcgctaccttggcctgcctctccatatccgaaagctaaggaaaattgacttcctgccgctaatcgaaaaaattggctcgcgaattcccggctggaaagggaggttctttacttcggccggaacaaaaactcaggtccaatcgatcctaagctctatgccaattcatcacttcaccgcattgcaagtgcccaaatgggtgataaaaagaattgatcgctttaggagatcttttctttgtaaaggagaagaccctgacaaaaccaatccaggcagcagtttagtcaattggcagacggtgtgtaagccaaaaattttgggtggattgggcattttggatttagagaggttttcgcgagcccttcgtcttcgttggctttggcttggttggaaggatgaaaacaaaccatgggctggcatgagcgttccctgtgatgatacagataaaaggttgtttcaggcagcaacgacaattgagctaggtaatggcacaaaaacaagcttttggcatgacaattggctacgaaacaactgcccaaaagacattgcaccactgtgtttcaagttggcaaaaagaaagcaaaaaagcgtccaacaagagctccataacaataactggttgatctctttcaggcaaataacatcagtagaagaaatccacgaacttgttcaccttgggagcatgcttcagggagtcctgcttatcccgcgtcctgatgacatctcttggaactggaatgaatccaaagtttacacaagtaagagtgcttatcttttccaatatcaaggatcttttgtttccttagatttctcttc

SEQ ID NO: 7733 - DNA, 1202 bp, Oryza sativa
  Clone ID: PAT_MRT4530_142C.1
atgtgtacaaaacaatcacgaccttccatttctacaggcagaaccttgctggagggtacaattcggaagagttgattgacttgtatacgaagtagcttacagaaaacaagcttccacgtacttaattaattgcatactaacattttgaaactgaaggtaaaaaaaaagggaacatggtttgcttcacgtgcatatctcttcaacccaaaggtcagcggaagcaatttgatcagatgtatgtcgtcctgctgctctagaacagctgaccgcccacagcttcgtgaatgacagataggcaccagcagcactgactattcagctattcaatggagcttcctatcaacttgcctggcaaggaagaggccaatagaggaccttttttcctctctcttcagtctttttgcatttgccatggttatatcagtggcatgcatactgctccgttttaacaagattgggcctcttagtagatactttcgtttctttctctttgcttgtggctcattggcaattgaacttgtatggctactctgcaatggatgatatattgctctcttcaatgcttcctcatactcattcagtttttccttctccttgttataaatgttcttataagttgctatttgttgcttacaaactttcagctccatgtttacatcactaagacgggaatcaactggaactgtgcactgttgaaccaattgtttttgacgtccacgaacaacttgtggttgccatacatttaatgccactgaagctctcctgaccctctcgaggttgtccagctcctgcgcggcggtcttcatcttctccccttcctcctgcaacgactcttccagctgcgtcagccgcctccggcacgccaacacgcggccctctgcctcgaacaccacccgccgcctcgcctccgccatccgcaccttatgcctctcgaacttagttttgtagacggatttggggtggagctgctgctgagaggaagaggaggaggcggaggagggctgcgacgattgggtggggaagtcgcgggagaggagcgcggaccagagggaggggtggagggagaggcggcggaggcggcgggaggcgatggcgagggcgcagaggtcgcggaaccccagcgcggaggaggccgcgcccgcgcccgcgccgagctccagcacgcgcgcccacagctcgtcggggagatccgacgccgacat

SEQ ID NO: 7734 - DNA, 204 bp, Oryza sativa
  Clone ID: PAT_MRT4530_14300C.1
atggcgccgtggactcctccggcacacatggctggacgacgagctcctccccccgcgtgcatctggctagtgactcatttcactggtcatggcccaccgggagctcctccctctgtgcgtggccggccggcgagctccctccccagcacgtggctggccagtgagttcctctaccacgtgaggccgaccaactccttcttctag

SEQ ID NO: 7735 - DNA, 3082 bp, Oryza sativa
  Clone ID: PAT_MRT4530_14301C.1
cgggtttacgtgtcctggcaaacaatatcttgggcacatatctctgctttccagagtgcagctttgaagatctcgttcagatttaagaagcaatctcgaaaaccgcaggagcctaaacttcgcgctagctttacaaatctgacatataatatatccacggatctgatctttccagcagctatacgaacgttgatccagttgcgtttgacctcgccaaggaccaattctcctcctgcacgtggcatccagtacattacacggacgatacgcgtcagcaatacggcggacggaggagagcgccgttgtgctgcgtaagtggacagctttccgagtggccattggggagaggcagcaggaagtccaacaccggaactttgccaagctattgttcatccacatgctcgtataccccacccatagcggtcagaaggagtgcatcaaaatgctagccgtcctgtgttacctcgtgaagcgtatcggttatctctgcctcatactgcgtcacgtcgagcagcaggagggttttgtgcattcattcttctgctttaaacaagatcttaaccggtcgaaccagttccttgtggggcttgctttgtgtactctagtcaaatggtgctgcgcttaaatggcgcgtgatctgtcacctgaggtggagaggctattgcgaagtagggaaccaaataccaagaagaaggctgccttatgctctataaggatcgtacggaaggttccagatttggcagagaacttcatgggctctgctgtttcactactgaaggaaaaacatcacggggttctcatatctgctgttcagctctgcgcagaactttgtaaagcaagcaaagaggcattggagtacctgaggaagaactgccttgatggtttggtcagaatactgagagatgtgtccaatagttcatatgctcctgaatatgacattgctggaattacggatccgttcttgcatatcagagtgcttaagctcatgcgaattttgggtcaaggagatgcagattgcagtgagtttgtgaatgatattcttgctcaggttgcaacaaaaactgagtcaaataagaacgcaggaaatgctattttatatgaatgtgttgagactataatgggcatcgaagctactagtggtttacgtgtgctggcaatcaatatcttgggtagatttctgtccaaccgtgataataacatcagatatgttgctctgaacatgcttatgaaggccatggaggtagacacgcaagcagtgcagaggcatagagcaacaatattagagtgtgtcaaggatgctgatgtatctattcgcaaaagggcccttgaacttgtttaccttcttgtcaacgatgcaaatgcaaaatctttgaccaaggagcttgttgattacctggaagtaagtgatcaggacttcaaggacgacctcacagcaaagatatgctcaattgttgaaaagttttcccaagataaactttggtacttagaccagatgttcaaggttttatctctggctggaaattatgtgaaggacgatgtatggcatgctctaatagtcttaataagcaatgcatctgaactccaaggatactcagtgagatcattatacaaggcattgctagcttgcggtgaacaggaaagtttggttagggtagctgtatggtgcattggtgagtatggtgaaatgctggtgaacaatgttggtatgctggacatagaggaaccaatcacggtaacagaatctgatgccgtggatgctgtagaggtctctcttaaacgatactctgcagacgtgacaactcgggctatgtgtctagtatctctcttgaagctctcttcccgattcccaccgacttcagagaggataaaggaaatagttgcacagaataaagggaatactgtgcttgaactacaacagagatcatctttgcttgagcggatgcctgtgatagatgaagctagttacttggctaagagagctgcttccacacaagcaactatttcatcagataaattagctgctgcagcaactcctggaagctcgcttaagcttccaaatggtgtagcaaagccaccaccggctcctctagctgatttgcttgatttaagttctgacgatgctcctgcgactacttccgcccctactacagcacctaatgatttcctacaggatcttttgggcataggcttgactgatacatctacagcaggtggagctccatcagcaagcacagatattctgatggatcttctatcaattggttcttctccagtacaaaatggcccaccaacagtatcaaactttagccttcctggtcaagctgagactaaagttgcacctgttacaccccaagttgtggatcttcttgatggtttgtcctcaagcacatctctttctgatgagaatacagcttacccgccaatcacagctttccagagtgcagctttgaagatcactttcaattttaagaagcagtctggaaaacctcaggagactacaattcatgctagctttacaaatttgacatctaatacattcacggatttcatctttcaggcagctgtaccaaagtttatccagttgcgtttggaccccgctagcagcaacacgcttcctgccagtggaaatgattctgttacacaaagcctcagtgtcacaaataaccaacatggacagaaaccccttgcgatgcgtatccggataacttacaaagtgaacggtgaggacaggctggagcaagggcaaatcaacaattttcctgctggattgtagctggattgtagtttgacctgtgtctataatgttgtgatagctcttccaactgctgcaagcaaaggcgagtttttctttttacttttttctgctcttccccttttgcttgccttctagtgagttatgtacacgacttagctggttttggccattcattcttcctttctatattgtatagtagccggcagcaattaatgctacatcttcagttttggcaaaatgtattcatatggtgctgtatatcacttgaggataactaaaattttcagcctccccctcatttcaggcagcaaaggaatgtgttgtatc

SEQ ID NO: 7736 - DNA, 833 bp, Oryza sativa
  unsure (1)..(833): unsure at all n locations
  Clone ID: PAT_MRT4530_14302C.1
tcatggttttatctctggctggaaattatgtgaaggacgatgtatggcatgctctaatagtcttaataagcaatgcatctgaactccaaggatactcagtgagatcattatacaaggcattgctagcttgcggtgaacaggaaagtttggttagggtagctgtatggtgcattggtgagtatggtgaaatgctggtgaacaatgttggtatgctggacatagaggaaccaatcacgcttggtttttttgtgtaacctgttcaggtaacagaatctgatgccgtggatgctgtagaggtctctcttaaacgatactctgcagacgtgacaactcgggctatgtgtctagtatctctcttgaagctctcttcccgattcccaccgacttcagagaggataaaggaaatagttgcacagaataaagggaatactgtgcttgaactacaacagaggtcaattgaattcaactccattatacagaggcatcagtctataaaatcatctttgcttgagcggatgcctgtgatagatgaagctagttacttggctaagagagctgcttccacacaagcaactatttcatcagataaattagctgctgcagcaactcctggaagctcgcttaagcttcaaatggtgtagcaaagccaccaccggctcctctagctgatttgcttgatttaagttctgacgatgctcctgcgactacttncgcccctactacagcacctaatgatttcctacaggatcttttgggcataggcttgactgatacatctacagcaggtggagctccatcagcaagcacagatattctgatggatcttctatcaa

SEQ ID NO: 7737 - DNA, 534 bp, Oryza sativa
  Clone ID: PAT_MRT4530_14303C.1
atggcagtccagagtagaggccggaggagggcccccaggtcccagccaccggagttggcgaggaaggttgccgtggtggagcttgccgtacaccgtcgacgccgcgacaccaggaggaaggagatggacgagctccacccgcattccatgtcagcatgtaggcgatgtcttccctctgcgcaagcccactcctcgacgcagaagccgcgcatgtgccaccgtcgccagccaaccatcgcggagaaggaagcaaagggagaagtcgccatcccagacatcaccagccctagtaacaatggtggcggcgggggagaaggggaccaacatcgaggctggctggtcagtatggctggggtggtggacgaggcagtcgaggaggagggggtcgtggagttggtggaagcggtggaggaaggcgacgcggaggaagggcctgcagacaagaaaggagcggacgaggttggtgccggtggggagcaggaggaaaacctcccaagggaggtcgttggtcagcgtggcgatgatgatggttga

SEQ ID NO: 7738 - DNA, 873 bp, Oryza sativa
  Clone ID: PAT_MRT4530_14304C.1
atgggttccatgtatcagacctctttcacctctatccctatcttcctccctcgtttccatctcagcggcggccgtcggtgcaaaggagtagtcgacgaggatgggaatggcatgtcaaccatcatcatcgccacgctgaccaacgacctcccttgggaggttttcctcctgctccccaccggcaccaacctcgtccgctcctttcttgtctgcaggcccttcctccgcgtcgccttcctccaccgcttccaccaactccacgaccccctcctcctcgactgcctcgtccaccaccccagccatactgaccagccagcctcgatgttggtccccttctcccccgccgccaccattgttactagggctggtgatgtctgggatggcgacttctccctttgcttccttctccgcgatggttggctggcgacggtggcactggcaccgtggcagttatcggactgtcacaatggccacgtcctaatcacaggagctcgtcatcgccgacccattggctccccccccccaattgctcagcttcgacaccgtggagaagagggaggacggcggcattggacactctacctactcaccatgcgcggcttctgcgtcgaggagtgggcttgcgcagagggaagacatcgcctacatgctgacatggaatgcgggtggagctcgtccatctccttcctcctggtgtcgcggcgtcgacggtgtacggcaagctccaccacggcaaccttcctcgccaactccggtggctgggacctgggggccctcctccggcctctactctggactgccatcgtcctcctcaccacccaacgccagctgctgtcctcctcatattgggggggggggggggtgaagagatag

SEQ ID NO: 7739 - DNA, 153 bp, Oryza sativa
  Clone ID: PAT_MRT4530_14305C.1
aaaagttgaagggatacctcacacgcctcacaagtcgaaaccggacccgaaacggagagtccaaacaacacagagcagaagggaggattaaacaaaaacgagtaagataacgagtgccaaagccgggcacaaaacatgcgaatcgaacgagga

SEQ ID NO: 7740 - DNA, 422 bp, Oryza sativa
  Clone ID: PAT_MRT4530_14306C.1
gctcaggctcagccatggaatgcagctcctttgaagcaatctgcaatgagtcggagatgattgcgcatttgcagtcattgttctggagcagcagcgatgctgatccttgttttggtagctcatcattttctctcatcagtagtgagggctacgacacaatgaccacagagtttgtgaatagcagcacaaatgtatgttttgattaccaagatgatagcttcgtttcagcagaggagactaccattggtaacaagagaaaagttcagatggatactgagaatgagctgatgacgaaccgcagcaaggaagttcgcaccaagatgtcggtgtcaaaagcatgcaaacattctgtttctgcagagagctcacagtcttattatgcaaagaacaggagacagaggatcaatgagagattgagaata

SEQ ID NO: 7741 - DNA, 442 bp, Oryza sativa
  unsure (1)..(442): unsure at all n locations
  Clone ID: PAT_MRT4530_14307C.1
gggaaaatcctccgaacgcaaacacagaggatccacacgcttccagccaggggagcaagcgaatcagcctgcgcaggtgaccngatgactaccgtgaaccgcccctccaccgccggggaccccgggagccaggacgccgccgtcgactcatcaagccggcggtggttgccgtcgcttgcatggcatctcgccggcgcatcacgtgatgcgatgcgcacctcctcttctactaccagcataaattcttctggcattcttctcaacaaacacaggaaactaggaaagggaaagatggattttcacccgcacaatgtggtacctgatttggtaaattcttgggaaattaattctcacattgtcacaaatttaaggggtaacctgaaaggaccatgaagatgagacttggacacgccaatagtattagtttngtagaagattttnt

SEQ ID NO: 7742 - DNA, 895 bp, Oryza sativa
  unsure (1)..(895): unsure at all n locations
  Clone ID: PAT_MRT4530_14308C.1
attatcgtaattcatttatgtattgattggtttaaaccttgtattttgcgggctctcaacatgaatgaaacaagctaagagttgtatgacatttagttgaggactagtacaaaactatacagctttcttgtagttttttgccgcaagctttcttgtagttgtatacatgtttagggtttagatgggattactttttacgcatttgcttaattgttcaatatatattcataccacatttgcatccaaacatttggattctctagataagatatagtagtcagggaggtattgttgcttatattccacactattgttctaatacatgcacgatacaagttatatatgcgttacagtacatttctgagtaattgaacttaacccactgtttgcatgaatagatattcacccatctgttttgttcatgtagttggtttcttctgtattaaccaataaatactattttaccatcaagaaagaggtagaagaatcacacgaagcaaggaagcaacagctggaagatattgaaattttaaagaagtcaccgaaggagacaaatgaccttcgtcggctgattggccttaacactcttgtggttagcctcatgctgattcatgctgagatgactagttttgtggttggtgtgatctggacatgtgactttgtttttgttggtgaatgtaaacgactatttggacaagtgacgtcattttggtcacaatgacgttggctggattttggtcggcgatgatatgctcaatgtactgatgttgtatcgatgtaattgaacctgttttggttnanaaaaaatnaannaacncaaaaaacaactccagaacaataaaaattaaaaaattattacattgggacgcccttataaagggggcggtctttttaa

SEQ ID NO: 7743 - DNA, 607 bp, Oryza sativa
  Clone ID: PAT_MRT4530_14309C.1
aaccaacccttttatgtaaaatcaaagtgttttgattattattttgtgatgaacaattggcatatgtgattattggttttgatatttggagattattggcgaagtggttttggagatgattggattttacagatgttaaacaggagctgctgagttttgggtccggttagaccgggcatgggttgccagctagagttcaatgcacgtggttggtgaagattccatatggcatacgatggaggcattgtgtgcgtatgggatacggagtcgaatttggaaggagtctaaatttggtatgattggagtttgtaaagtttgtttcttgtacaggaaggtttcctaagtggattaggacttctagtatgagtttggttcatggctttaggctgcctacctcatgtataaatagagagggagcgtcagaccagtgacattgcggcggtcagaccggcgggtacactacggtcagactggcgacggcaacaggaggcagaggcgattttcaggcggtaggaccgggctttcaacgccggtcaaaccgacggcttccaggcggttaggccggcgcatcacctacggtcagatcacgatccatcgaatttaaggg

SEQ ID NO: 7744 - DNA, 394 bp, Oryza sativa
  Clone ID: PAT_MRT4530_1430C.1
tggtccgcctgcaggtaccgcgccctgcatatttggctggtcgccccacgcttgtcggcttgtcctcttgatcccctactgttgctccttcatctttgcctctgtgtttgtgtgtgtgagagaataaaaggggagaagtggtggtggtgggcatggaggagaatggacattggccatgatttcacctcatcatcaggcttgcctctgtctgcctctaaaacacttcccaatagattccatcccctctttatcatccttggtatccaccccacttttctgttcttaattgcaaaggtccctgcagggattacattttggtgggtttagctcgctagctttggtgccatgaacaagctgaagaacactcaatacgttgtccagctgatacttgtag

SEQ ID NO: 7745 - DNA, 510 bp, Oryza sativa
  Clone ID: PAT_MRT4530_14310C.1
taaaaatactcgccttcttctccacccgagccgagcagagcagcgaagagggcagcgaagtcgccgacgaggaggaggagaaggagccatggccgccaggagcttccaggcccggtcccccaaggaggagtccgacgccgccgtccatggtaatcaaatcccatcccactcaccaagctccgaaatccccatccatggtagcgggatttcatcttcttgcgcggaggaggaggagggatgaggtttagatgtagtagtagtaggaaggacggtgtgagatttcttgggagaaagagagagagagagagagagagatcagatcactccccttgattgggggtttttgggttcgccgcgttgtcttcccaagctgtttatagtggctatctgatgatcatggttcaattcggctctgtttatctaaggcttcccacttctgggtgcctcaaacacaaattcacttgtgatgttgctagattgtgtgtgatatatggtatgcattgttggttg

SEQ ID NO: 7746 - DNA, 1069 bp, Oryza sativa
  Clone ID: PAT_MRT4530_14311C.1
ttgcaaggagtggacagaagtctaattgagcataatttggcagttaaaccagatcaaaattcgaagaaacagaaattaaggagaatgtcgacagacaggcagcaagccacaaagattgaacttgtgaaattgctcaataccaaggtgatcagagaagtaatccatcctgaatggcctgcgaacccggtgttggtgaaaaaggtaaataggaaagcggcgaatgtgcattgattttacggatcttaataaggcatgcccgaaagacgattttcctttaccacgaatagatcaattagtagatgccacaacttgatgtgagctaatgagttttctagactcatattccggttatcatcaagttttcatggtgaaagaagatgaggaaaaaacatcattcataacactatttggaacatatttttttattagaatgccattcggtttgaagaatgcaggaacgacatttgcaagattaatagggaaagttttggccagacaattgggcagaaatgttgaagcatatgtagatgacatagtagtaaaaagcaaacaagcatttacacatggcaaagatttacaagaaacatttgagaacttgaggaagtattcagttaagctcaatccggaaaagtgtgttttcggtattagagcaggaaagttgcttggttttttggtgtccaaaaggggaatagaagcaaatcctgacaagattgcagccattcatcaaatggaaccacgaaagaatataagggaaatgcaaaggctaacaggccgaatggcatctttgagtagatttctttctaaatctgcggaaaagggtttacccttcttcaagacattaagaggggcaaatacatttgagtggacgaatgaatgtcaacaaacttttgatgagttgaaaaagtacttgcaagatatgccaacgttagcaagcccgcaaaaaggacaacctttattgatgtatgtggcagcaactccggtgacagtaaatgcagttttggtactagaagaggaaaatagacaatgcagacgcgcacacgcacacgccgccgccacccacagttttgtg

SEQ ID NO: 7747 - DNA, 296 bp, Oryza sativa
  unsure (1)..(296): unsure at all n locations
  Clone ID: PAT_MRT4530_14312C.1
ccggccgggaaagaagagaacctcccgtctcattgtctcctccgctccttgcgccgctgccaagacgagtcgcggctgaacgggggaggggcggcgatcttcatctggcgagcagagcatgggaggggatcctggtgagcatccacatcctctttctgattcatctctctctcaccccaccaggactacttatgtctggaatttgcttgcgttcgttaaccctactagcnttctcttctagatctggaagaagctcttctcctccttaatttgagagccttaaacctcttcttaat

SEQ ID NO: 7748 - DNA, 502 bp, Oryza sativa
  unsure (1)..(502): unsure at all n locations
  Clone ID: PAT_MRT4530_14313C.1
aacttttacaagaggtacgtgatacacatcaaggccggggcgtacatggagaacgtggaggtggggaagagcaagaagaacctgatgttcatcggcgacggcatcggcaagaccgtcatcaaggccagccgcaacgtcgtcgacggctccaccaccttccgctccgccacagtcgctgtggtgggcaacaacttcctggcccgcgacctgacgatcgagaactcggccggcccgtcgaagcaccaggcggtggcgctgcgcgtgggcgccgacctgtcggcgttctaccggtgcagcttcgtcggctaccaggacaccctctacgtccactccctccgccagttcttccgcgagtgcgacatctacggcaccatcgacttcatcttcggcaactccgccgtcgtcttccagagctgcaacctctacgcgcngccgccgctccccaaccagagcaacgtctacaccgcgcaggggcgggaggaccccaaccagaacaccggca

SEQ ID NO: 7749 - DNA, 2309 bp, Oryza sativa
  Clone ID: PAT_MRT4530_14314C.1
ctccccctccagctagctcttgctgctcagtgctcagtgctcactgtgacagcacaatgccacccttacatgccgggagaccggggcctctgctcgtgctcctcgccgtcacactcgccgccgccgccgccaccgccgtgggtgcgtcgtccgacacggcccccttctacccgtccgcggaggaggccgccgccgcgcactgcgagggcacgctctacccggagctctgcctgtccacgctcgccgacatcccggacctccacaccaagtccctcccggacgtcatctgcggcaccgtcaaccgcaccaaggacgccgtcgccgccacctcctacaactgctcgcactacatcaacagcaagtacctcacgccgcgcgaccgcctcgccatctccgactgcatggagctcctcgacaccaccatggacgagctccaggccaccaccagcgacctcgagtcgccggccgtcgccggcggcaacaatggctcggcctcgatggccgccaagcgcgtcaccatggaccacgtcatgacggagctctccgccgccatgaccaaccagtacacctgcctcgacggcttcgactacaaggacggggagagggtgcgtcattacatggagtccagcatccaccacgtctcccgcatggtcagcaactcgctcgccatggccaagaagctgcccggcgccggcggcggtgggatgaccccgtcatcgtcgtcgcccgacacggcgacgcaatcggagtcgtcagagaccacgcagcggcagccattcatggggtacgggcagatggcgaatgggttcccgaagtgggtgaggccgggagaccggcggctactccaagcgccggcgtcgagcatcacgcccgacgcggtggtggcgaaggacgggagcggcgggtacacgacggtgtcggcggcggtggcggcggcgccggcgaactcgaacaagaggtacgtgatacacatcaaggccggggcgtacatggagaacgtggaggtggggaagagcaagaagaacctgatgttcatcggcgacggcatcggcaagaccgtcatcaaggccagccgcaacgtcgtcgacggctccaccaccttccgctccgccacagtcggggttttgatcgttatttccattgccggacacttcgttgctaagaagctacctgctgtggtgggcaacaacttcctggcccgcgacctgacgatcgagaactcggccggcccgtcgaagcaccaggcggtggcgctgcgcgtgggcgccgacctgtcggcgttctaccggtgcagcttcgtcggctaccaggacaccctctacgtccactccctccgccagttcttccgcgagtgcgacatctacggcaccatcgacttcatcttcggcaactccgccgtcgtcttccagagctgcaacctctacgcgcgccgcccgctccccaaccagagcaacgtctacaccgcgcaggggcgggaggaccccaaccagaacaccggcatctccatccagaagtgcaaggtggccgccgcctccgacctcctcgccgtccagtccagcttcaagacctacctcggccgcccctggaagcagtactcccgcacggtgttcatgcagtcggagctcgacagcgtcgtcaaccccgccgggtggctcgagtggagcggcaacttcgcgctcgacacgctctactacggcgagtaccagaacaccggccccggggcctccacgtccaaccgggtcaagtggaagggctaccgcgtcatcaccagcgcgtcggaggcgagcaccttcaccgtcggcaacttcatcgacggcgacgtatggctcgccggcacgtccgtccccttcaccgtcgggctctggcgaacaagggagcagtggcaggtggcggcggtagtcagtggtgggcgccggagagggaagggagattgccaccggcaggcacccagcgggatcgtctttgtcgtcgttgccgtcgttgtcatcgtcgacctccacggggcgcgccgtctcgcaggcggagccgcagagcatatgccggagccgctcgggttgaggagcgtagattatcagttagaatccgctcacccaatcatcaagacaaggcaatgcagctccatcccattggagatgaagaccaacgcggcgctggcgcgagagctctggttgaatgcgcgggcgcaagatttgagtagcgcagggaaggtgggaagcgaggtggagagggagcacgaggaggcatggttgaagaggaggaacgcggacaacggggccggggaggaagagaaggcgacgatgaccgggtag

SEQ ID NO: 7750 - DNA, 241 bp, Oryza sativa
  Clone ID: PAT_MRT4530_14315C.1
gtttgttcttgaatgaaattggaaaatgtttaactaaacgggcaaatacataatgaacaaaatacaaactgttgcctggcccacgatagattgttgtatctgaggccaggaagagtgcctcattgaatatttatctagtcttatatggtttcggtatattgaaatataacagaaaagagagggtagaggataggctcattacctccaaaatatggaagtaccatagcaaaaaaaaaaaaaa

SEQ ID NO: 7751 - DNA, 900 bp, Oryza sativa
  Clone ID: PAT_MRT4530_14316C.1
atggcgctccaatgctcggttgcagcccgttcccctccactcccttggctcactctcctccatgggaccttcctcagcatctctgatggtaaaattcaccgcatgcctttaccaaatgatgcctcttgccatggctccattgacaactggctcttcctcagggatagtaatggtgggtgctcactgatgaaccttttctccaaggttacattacatcttcctaagctagccagcatttggcatgataagatggaacgtgcctaccgtggatctggtatacttctctgcaacgaatatactctactttcctataagtttgcagttcccttgcccttggactcatcaccagttccccttgtcgctgtgctgatcaatgacccccttcatctgtatgcactgagtgcttctgggaagctctacatccttgagatcagtgagggccatgaaggaaaaccagaggtttcatgcattaattccatggttgacttggcagaagaaccggtgattcggcttttcggttacccattccctctgtcacatgatgatgtccttgaagatccgcgtactctttcatttgtggtatatgaggcagatttgagcaatggctctcgcatgtggagaagggtagaatctttgggaggccaagctctctttgttggcacacatggctccaagtctgtccctgctgtggaatgtggagctcaggaggactgcatctacttcatatctgactacaaccggccttattctgcaaatcctcttggcgactctggcatctacaacatgagaaacgagatgataacgccgttggtgcgtttggtaagtggtaatcgtcactctggcgtctactaccagtggcgacatccgagatggttcttccctgcagatggtgctatataa

SEQ ID NO: 7752 - DNA, 4316 bp, Oryza sativa
  Clone ID: PAT_MRT4530_14317C.1
gggtacgggccccccctcgaggtcgacccacgcgcccgggcatccagaatcagatccacaaggcagcagctgcagcagcatcgaccatggcgatggcgcgatccatcctcctcctcctcctcctcgccgccgccgcctccgcctccgccgacgcgcccttcctcgtcgcgcacaagaaggtttcgctctcccgccccaagcctggcgtcgagcgcctcgccgtctccctcgacctctacaaccagggatccgcaactgcctatgatgtgagcattaatgatgatacttggccaaaggaggcatttgagcttgtctctggagagatgtcaaagacattggaaaggcttgaccctggtgtcactgcttcgcatgcatttgtcttggagaccaaagtacagggcaggtttcaaggttcacctgcggttattacctatcgtgttcccacaaaggctgcgcttcaggaggcctattcaacccccatccttgcacttgatgttcttgctgagaggcctccagaaaagaagtttgaatgggctaaggtgactagctccatggaggacgatgacgatgaccaacgcttgcttcacagccttggtgtcacgtccgcagacatccacgatattgaaaggagaatcatatcacaggcaacaactgatcctgccgactcatctggaccaaccatcaatggaggtcatcagcctgatgatgctctcgccaaactgcatcacaaactgcgctctgtgcaaattgaaattgatgctgtagcctccaccatcaaaggagctaagcttaagcaaccatccggaaataaaccacatgagcataaaggcaaggaccagccagatcatcatggagcaggacacctccagcaagcccttgctgccgaccgtcttacaagcctcaggaaagctaaagcacagatacagaaagagatactacagtcacatccttctccatctgcctccaatcgaaaagataaaatgctggccatgctggtccaagacgagccgaggcacaaaaagccacccgtagggcctaaaaacatcgtgaaacgcccgatgaaaactgtcacctatgatgatgacaacaacttcgatgcagtgcttgatggagcctctgcgggatttatggaaactgaaagggaagaactgatcaggaagggtttgttgacaccattccataagttgaagggcttcgagaaacgtgtggaactacccgaaccttctcatagacaagatgattctgcaggacaaactgaagaagccatggaagcttccaggattgctagagttgctcagtcgctaaagcagattgcacagaaccgcccagcaaccaaattgcttgattcagagtctttacctaagctagatgcacctgctgccccatttcagagacttggaaaacccctaaagcgtcctgtctctcccagttcagatgagcaggaaaagaagagaccaagaaataagaccaaaagaccactgcctggcaagaaatggaggaaagcaaactcaattaaggaatcatcattggatgacaacgatgttggagaggcagctgtgtcagtttcagatgatgatgaagatcaagttacagaaggctctgatgagttaactgatgttacccttgaaggaggtttgagaattcctggcacactttacacgcaactatttgactaccagaaagtgggagtgcagtggctatgggagttgcattgtcaaagggctggtggaataattggagatgaaatgggcctgggaaagactgtgcaggtcttgtcatttcttggttccttgcataacagtgggctctacaagcctagcattgttgtttgtcctgtaacccttttgcaacagtggcgaagggaggccagtagatggtatccaaagttcaaggttgagatcttacatgactctgcaaacagttcatctaaaaagagcaagaggtctagtgattctgacagtgaagcttcctgggatagtgatcaggaagaagcggttacatgttcaaaacctgcaaagaagtgggatgacttgatttcacgtgttgtgagttcaggatcaggtttgcttctgaccacatatgagcagttaaggatcctaggggagaagttgcttgatatagaatggggatatgctgtattggatgagggtcaccgcattaggaatcctaatgctgagattactcttgtgtgcaagcaattgcagaccgtgcacaggataattatgacaggtgcacctattcaaaacaaactttcggagctttggtctctctttgattttgtgttccctggaaaactaggtgtcctgcctgtgtttgaggctgagttttctgttccaattactgttggtgggtacgctaatgcaacaccattgcaagtgtccacggcgtatcgatgtgctgttgtcctacgtgacctggtcatgccgtaccttcttagaagaatgaaagctgatgtcaatgcacagcttcccaagaaaacagagcatgttcttttctgtagtctaactactgagcaacgtgctacttatcgtgcatttcttgctagttcggaggtggaacaaatctttgatggtaacagaaattccctttatgggatagatgttctaaggaagatatgcaatcatcctgatctacttgagagagaacatgctgctcagaatcctgactatgggaatcctgaaagaagtggaaagatgaaagtggttgagcaagttcttaaagtatggaaagaacaaggtcatcgtgttcttcttttcactcagacacaacaaatgcttgacattatggagaacttcttgacagcttgcgaataccaataccgaagaatggatggacttacacctgcaaagcaaagaatggcacttattgatgaattcaataacacagatgaaatttttattttcattctgaccacgaaagttggtggactgggtacgaatttgactggtgcaaaccggattattatatatgatcctgactggaatccttcaactgacatgcaggctagggaacgtgcatggcgaattgggcaaactagagatgtgacagtttatagactgatcacgcgtgggacaatagaggagaaagtctaccatcgtcagatatacaagcatttcctcacaaacaaagtactgaaagaccctcagcagaggcggttttttaaagccagagacatgaaggatttgtttacgctgcaagatgatgacaataatggctcaactgaaacatcaaatattttcagccaattgtctgaggatgtgaatatcggagttccgagtgacaagcaacaagaccagctatatgcagcctctgctacaccgacaacctctgggactgaaccgagctcatccaggcatggacagggtaaagaagaccattgccctgaccaagcagatgaagaatgcaacattttgaagagcctttttgatgctcaaggcattcatagtgcgatcaatcatgatgccataatgaacgctaatgatgaccagaagctgcgcctagaagcagaagctacacaggtggcacaaagggcagctgaagctttacgccaatcacggatgctcagaagtcatgaaagtttttctgttcctacatggactggaagagctggtgctgcgggggcaccatcctctgtccgcaggaagtttgggtcaacactcaatacccagttggttaattcttctcagccatcagaaacttcaaatggcaggggccaaagtcttcaggtgggtgctctaaatggcaaagcactgtcctccgctgagcttctggccaggatacgtggaacccgagagggagcagcttcagatgcactagaacatcaactcaacctgggatcagcttccaatcacacatcgagttcatcagggaatggccgtgcatcaagctcttctactaggagcatgatcgtacagcctgaagtcctaatccgccaattgtgcaccttcatacagcagcatggtggttccgccagctcaacaagtataactgaacacttcaagaaccggatactgtccaaggatatgctgctgtttaagaatctgctgaaggaaatagctacgttgcaaagaggtgcaaatggtgcaacgtgggtgctgaaacctgactaccagtaatattagctatagctgcaaagttttggctaggtgtagcgaacagcataaattaatttcattcagattggagatgcaaaaatcgatgagggaaatgcctctaatgcctttttgatgaagactgaattctttttgtaggcaatatacaacttttgtagggtagatatacaaatctgaaacaaaaacatgtaggtcacaggttgt

SEQ ID NO: 7753 - DNA, 226 bp, Oryza sativa
  Clone ID: PAT_MRT4530_14318C.1
agtaatatatcgattgctcattacatgggaaagagcacaagcgcacaacagaacggcggcaaacactataaccgctcaaccaacatatataggctgaaattcatcgagccaacagctacacattatcctaattagcacaacttcatctttagtgtcggaaattgataccaaaattcaacagctatatagcttagctccacccataggattcatcaccaaaccttaa

SEQ ID NO: 7754 - DNA, 677 bp, Oryza sativa
  unsure (1)..(677): unsure at all n locations
  Clone ID: PAT_MRT4530_14319C.1
ccacgcgtccggcctcgccaccgcctccgtccgcttcgcttctcttctctgccgcgaatccgcgcgcatcggaacgcgcgcgcgctcgatcaaaaacggcgggaagagcacgaggcgcagccagccaagaaggaggaggaggaggagctgcgcgccgcgccggcgagcgcgtgcgtgcgtgcgtaggaggaggaggaggaggaggggcgcatggggacgaggcggcggcgtcaccagcaccacggcaggtgggtggtgcccgcggtggcgccggccgcggcggcgttcacggcggcgggactgctgctcgtcgtcgtcgctttccactgcttcctgtcgccgccgctcggcggcggcggcggcgggggtggcggccaccgtgttgtgcggcgaccgaacccgccgttcctgttgaacaagccgagcgagctgcgccgaaatgtagttggcaccgtcgattttgccgttcctagcggcgggagcaagctgggcgaagagctctgggcgtcgaaactggccagcaacttcttcggctgcagcaacgcgaccaaggcgttcgccgatgccaaggccgtcacggagccgaatcggtatctgatgatcgcaacgagcggcggcctgaaccagcagcgaacagggatcatagatgctgntggtgcagcccgtattctgaatgc

SEQ ID NO: 7755 - DNA, 334 bp, Oryza sativa
  Clone ID: PAT_MRT4530_1431C.1
agtgtgtaaagaaggccccaagagtaaggatgtgcttaccttgcattcaagacccatcctaactttatggtaagcccccttgcacggaaagagttccatcttccgtgctctccccaatgatgtttctagccaatgcatatcgcatctccagagaagaggctcagaggctcaatgcatttacagaggagatgagttcggtgcattcactcccatcccataccagagctacccagacgttgtataatgcggcagaatcctcttaggtcggcttgcggataaagaataacctaaatgaaataaattgccagccattggtgtttgctgctatgtactg

SEQ ID NO: 7756 - DNA, 357 bp, Oryza sativa
  unsure (1)..(357): unsure at all n locations
  Clone ID: PAT_MRT4530_14320C.1
cctttgcggattcggccgagctcgtgccnaattcggcacgagctctcacccccgcgccgcgccgcacacaagccaaaatttcccaccaccnccaccaccaacaccaacaagcagcaagaaganggagctttaagaacncntggattttgtttttctatcccaaattggtcggncgattgccacccggggggtgcatnctnatactncnggggggggggggcngccgaagcngaagccgaaccgcttgaagggaacaaaatngggganccngcggaatnattnacccnttgattttggngcnttgggggatttccttnngaaagcngccgaaggangatcngncccnaaanaaaacca

SEQ ID NO: 7757 - DNA, 504 bp, Oryza sativa
  Clone ID: PAT_MRT4530_14321C.1
tccatctaagagcgagtcttcgagcacacagaggtatatgatctgaatctcctctccaaggcaggtatggattctaagttcgatactgtttttaatgttgtggggtggctaggtttttgccgtgttcaagaatttgagtgtagacttcttaccatagagtttttatgctctgtgtaaacatatcaaaaggaagttacattccggatgtttaagcaagagtatactcttacttggggtcaagtgagtgtagttctttgttttgatgtgagatgctatcttaacttagaacaagctacacatggttaaagttgagttttgggaagctataactggccatgatgactatggctaccctagactgaatgagatccataatcctaccttgtgttttctgcaccattgaataggcatgttcttgtttcctagatctaatattaggcctataagaaatgatgagctacgttgctttatgctatggtccataaaattcatgtttctccagtt

SEQ ID NO: 7758 - DNA, 903 bp, Oryza sativa
  Clone ID: PAT_MRT4530_14322C.1
ttcaacgcattggttctggttaagccaatcacagcagtggcaattattgatcggattcgctggagtgcggggttaatcttagtgagtgtattgtttcatttattcatttttagtagtaaaaaaattgaatggattactttcgatgttgggcaaggcctatcacaagcttttgtttattaacaaaatggacagaacaaggctattttttatgataccggggtaagctggggcgcaagtggtaattcaatggcaagtcttgagatcttgccttatttaaggcgacataatattgaggtagaagcaatttttttaagccacgatgatcgagatcatgcgggcggaatttctgatttgctagcagtgtatccaaatgtgcgcttgatttcaagcagtgctatgccttatgcaaataaaatgccagaagcttgtattgtgggaaagcagtggcaatttaatcaattgatttttcgaacaatttatccgcctaaattgacaccaagatctaaaaatgctgattcttgcattataattgtggaaatagaccgctttcgtatattgttgacaggcgatgcaactgcccaacaagaaagcatcatagccccatcattaccacggattgattttttacaagtgccacatcatggtagtaagacgagtagtagccaagcactattggctaaaattaaaccgtatttggcaattgcttcggtggggcgttggaatccttggcgaatgcctcatcctagagttgtagaacgttttgaacaatacaacattcctttagtcactaccgcaacagatggcatgataaaggttatttttgagcataatacctgggaggtaatcactaacagaaataagttttctgcgtggtatcgacagttatatgcaacatcggctaaa

SEQ ID NO: 7759 - DNA, 267 bp, Oryza sativa
  Clone ID: PAT_MRT4530_14323C.1
gtgtttgcttatacaattactctatgtcatgacgatgatattagagtagtatctggtagtttaggcgtggtgtctagattacgggatatcattatttggggttatatgctgcggatgagaggtgggccgctgatggtgacaactcagtacgggtactccttcgtatttagccccggttgtatggtcatgacgggctgccgtaaggaactcggcagtcaggggtggcttcttgaagtaccaggagggcatcggatagagggtataaac

SEQ ID NO: 7760 - DNA, 424 bp, Oryza sativa
  Clone ID: PAT_MRT4530_14324C.1
tcgctctacgaatccaatccgaattccccccccccccccatctcttctccccttctccaaaatcctaacccccactccccatcggagagagatcgagaggaggttgccatggcgaagtgctcctcctgcgacgactgggtcatgctggactccgacaaccccgcggactcctccgacgacgacgactacgtcctcgcgctctcttcctcctgcaacacccccgcctgctccgacgaagaggaggacgacgacaacaaggtggggagcgacgctgtcggtgacgacctttacgggggagaacttcaggaggaggactcgccgcgcccggcgccgtcgaggccgctcttgggcctcttttaccacaccggcttcgacaaccagtccgggtacctcgcattcgacgtgatccgtagggccaagcacc

SEQ ID NO: 7761 - DNA, 1067 bp, Oryza sativa
  Clone ID: PAT_MRT4530_14325C.1
gcacgaggctcccaccaccacaccttcgcccctcccgcggcaaccaccgctcctcgccgccctcggatgctcccgccgccgcctccgccgcaatccgagtcatcggcggcggccgcgctctagccgctcgctcgctgttggcacggtcccggagcggagccggagcgcatggcggaggccctcctccccctgccccggcgcctcgtcgtcaccgcctccacgcccgcgtgctcctctgcctcctcctccacgtccccgtcgcctcactgcctcctctcgcgcgccaacccgcgcccgccgcgcttggccgccccctcgcccccgcgccaccgccgcctcaaggattttatatatgttttggcaactgcccatgcagccgtctcagacaaaagtgagcaaccaaaatggtgggagaagaatgctggtccaaatatgattgacatccactctacacaagagttcttggatgcactgagggatgccgccggcaggcttgtaattgtggagttttatggaacttggtgtggttcttgcagggcactcttcccaaggctctgcagaacagctgtggagaatcctgatatcttgttcttaaaagtaaattttgatgaaaataaacctatgtgcaaacggttgaatgtgaaagtccttccttacttccatttttaccgtggagctgacgggcccttggaggcgttctcatgttccttggcgaagtttcagaaactgaaggatgcaattgctgttcacaacactgctcgctgtagcatcggtccaccagtcggagttggggatgtgctggatagccctgaggagaaacctgcagaagctagtccccggtagatttgttctgttacagtgcgtctcgctctccattgctatatctgctcattttttttacctcgatagatcttactgtaaccaactcaggagaatattcagttttcctggataggggtggccaggcaacgggccagcatcagatgttgtaagcattactgtttaatttttttgagaaagaaaaatcgtgtttttaaaaaaaaaaaaaaaaaaaaaaaaaaaaaaaa

SEQ ID NO: 7762 - DNA, 249 bp, Oryza sativa
  Clone ID: PAT_MRT4530_14326C.1
atgtctttcgtgattagtttcacacttctcaccatagtaaatgatgcttaaattggtaataatttgattagctcctggtttggaatggaatattcctggtgtggagatagaactgtgcagccggggtggttgttcagaatggttgggcctatacaacagggtatgttgtatagcgttggattaatattgtttaattacttaactgttttatcgaattctcaaatgtttgctaaatgctgcttttgcaaa

SEQ ID NO: 7763 - DNA, 282 bp, Oryza sativa
  Clone ID: PAT_MRT4530_14327C.1
acgacggttgtgacggttggaatggtcggtaataccctccaaccgtcattggggcttcatctcaaccgtccagccaaaacctggatccaacggaggcgagggaggttcggccgaacctggggacggcccaatccagcccaatttcggctggcggccttctccattgttcttctccgtagacttgtgaattttggcccaatgtgtcatgttatttctgagttcttggcccattcatacataagtttggttctcgacatcgtctgattgatttatcgtttgtgt

SEQ ID NO: 7764 - DNA, 429 bp, Oryza sativa
  unsure (1)..(429): unsure at all n locations
  Clone ID: PAT_MRT4530_14328C.1
atgaggttcagggacaggcagtgccagcgggaggtgcaggacagccgtggacgcgtgccggcggtgctcgaccggagctaccggcggagaggttcagcgatgttccgcgccggccctggctggatgcaggctgcgactgagacgtgagccggagtgcgtgccgctcgcgatgggagctcaggagcatgcatccctgagcaggtggcgcgcgcgcgagtactacggggagggtcgcgcgacaggactacggaggggtcgcgagaggctctcgcagacacacagcgggatgaccgggagtgacggcaggaacgcgcactgcgcatggcggtggccacaggacatttcgcgcggcagactagcttactggctgctatagtagangatcacaccgtgtgtgttgatgcacgagataggacaaacaatatgata

SEQ ID NO: 7765 - DNA, 725 bp, Oryza sativa
  Clone ID: PAT_MRT4530_14329C.1
ccacgcgtccgctttttggttctttctatataataattttttttaacacgggggcctcccctgctgtgatgttttcaaaaaaaaagaacaaaaatatacaactaacttttcaggttgtttgaactgttattttatttataagtgaataaatagttcatgatccatattaccaatgggagaatatatatgactcctaaagaaagttcactagattgaaccaattggagaaaatatctcaaattcattaaaaatgcttcatattttcacttaaattggaacaaacattgcctattctattgccataaccatcttaagtgtttatatactaataatgtaattcaatctatcatgtaccgtataccatagacttaggtgtttattaatatattattgcatatatacaagccgcactaaggcagcaagtagttggtttagaagttatatttgttactataaaatttaaattttagcacttatgttgaatacgtatttaaataaattctatagatcacatatcatatggaaacaagatatgtggatatattttctttattcattcatatatatgtaagaatgtaacaaattgtgtgagcatgaaccaattagaaagaggggcagctttatggtacaaaataaactcattggtagtaataataattttctaggatttgttcaaaatagagcaagtaaacattcaacttgcaaggaaaacaccttatttttaa

SEQ ID NO: 7766 - DNA, 389 bp, Oryza sativa
  Clone ID: PAT_MRT4530_1432C.1
atgattcgacccatcgggtcttaccagagcagagaagcaggatccttcggagacgacgaccccggtcacctctcacaagtcacaccccttccgactgttccatgctccaatatgcactacaggtatacgggagtcaacgccaaatgcattggcgctgaccccacgccatctgtggatccatgtgggcaagggttcaacgccaaaggcactagcgctgagcccacggcctattttttgttaaagtttttggcgagggaggcctactggaaacggtgcacggcggcggggaaggagcatctccaacaggttgtggcggtagtcggcggaggaggtgtcatggggaaggagcagatccaagacgttgcgcacggtcgccaaccgaagcagct

SEQ ID NO: 7767 - DNA, 663 bp, Oryza sativa
  Clone ID: PAT_MRT4530_14330C.1
atgggcaagcacaaccaccacgacgtggaggcgccggccgccggcggcagcagcttcccgccgccgccgccggcggtaggcgtcgccggcgtggcgtgcacgtacatgatcgagaggccggagctccggtgggcgttcatccgcaaggtgtacgcgatcgtggcgacgcagctggtggtgaccgtcgccatcgccgccgccgtctactccgtcccggccatccgccgcttcttcctcgcccgcacgccggcgtcgctcgccgccttcgtgctcgtcatcgtcgcccccctcatcgccggcattgctataatcgaagcggcatccctaacgttcgggctggtgttcggcctgacgctctacacattctgggcggccaagagaggccatgacttcagcttcctccgccccttcttggtcgcggccttcctcgtcctcgtcctctacggtctcatccagatgttggtgccaacggggaaagtggcgacgacggtgtacgggtgcgtggcggcgctggtgttctccggcttcatcatctacgacacggacaatctgatcaagaggcacgcctacgatgagtacgtcacggctgccatctcgctctaccttgacaccgtcaacatcttcattgccattttcactgcactcgacgcttcagattcatag

SEQ ID NO: 7768 - DNA, 664 bp, Oryza sativa
  unsure (1)..(664): unsure at all n locations
  Clone ID: PAT_MRT4530_14331C.1
ngnncgcnaccgaaattgtaatacgactcactatagggcgaattgggtaccgggccccccctcgagttttttttttttttttttgaaaaataaacaaataaatggtaatgccactatattttctatgggaattaattaattataaaacatgtacatacgcggttgttttgagaaatatgtctaaacttaaatctgatctcgtanaattttttcacaccctatcctttattccaacaatgatgaggttgggtacttatgcatggaggacacctcatgctagctacttaattactcaattctaaaataaacttatgacacattttgatactacgaatctagatatactatatntcgtactaagttgatttattttagatatgtctggctgcnttcaacgcgccgccggtgtgtcngctcctttgttgcacggtgtacccgccgtcgacnacaaggttgtggccggtcacgtacctgnctcgtccggaagggaagtacnccgccgccatggcacctccccccggccccancatcagtcgttcncnttcaanttcatcnctgctcnctcgtcnncatgggtggaaananccnacttcnccanccttgcctncagancggttctnaangggccggnaaatgnttcacccaggcttgccccnagggnncc

SEQ ID NO: 7769 - DNA, 779 bp, Oryza sativa
  Clone ID: PAT_MRT4530_14332C.1
atctcctccccccgcttccttccggtgggagacgaggcgagacgcgcctcggttttatccgcgtccctagcttagagagagagagagagagaaagagagagagaagggcgtttgacctgtgaccccggcggcggcggcggcgacgacgagcgcgccatggcaggttcaccaccaaagccgtgggaacgtgctggggctgagggaacttctggcccagcaccttttaagcccccatctggtggcaccactagcgatgtagttgaagcttctggtacagctaaacccggagaaaccgtcaccgcgacagagaggaacctctctgccaatgtaaataaccctgtctcgaggcctatgccacaacgtccgtggcagcagacatctggctatggaaatacttatggaggttatggatccaatatgtacagttcgtacggtggatttggcaatacctatggtagtggtggactctacggaaatagcatgtattctagttatggtggaggttatggtggtagcctttacggaggttctgggatgtatggtggaggcatgtataacagtgggttgggaggctcttatggtggttacggcatgggtggcatgggtggcatgggtggtatgggcggtattgggcatgggcccttacggtaaccaggatccgaattcatttggccctcctgcaccaccaccaagtgtctgggtgtccttcctacgagtgatgcatggtgttgtcaatttcttttgggcgagttgcattccttgttgaacacaacacacaa

SEQ ID NO: 7770 - DNA, 154 bp, Oryza sativa
  Clone ID: PAT_MRT4530_14333C.1
ctggggctgggcgggctggggggtagcccgcgggcgtctgcggcgtctgcggcgctggcgcatggccccgatgaggaccgtccggctgccgggtacgagttcgcgcagttcggcgccgggtgcttcttgggcgtgtagcttgcgtttcagatca

SEQ ID NO: 7771 - DNA, 341 bp, Oryza sativa
  Clone ID: PAT_MRT4530_14334C.1
ggggacccccaaaaaaaaaaaaaccggggtttaaaaaaaaaaaatttcccggaaaaaaaaaagctcaaaaataaaaagggtttttaaaattttaaaaattaaaaaagggggcaaatatacaagggcaacttttttaaaaaaaggtttagggggaaaaggaaccctttttaaaaacgggaaaaaaattgggttttaaaggaaaccctttgaacaaaataaaagggaaaaaaaatagggggggcgtttcccccccaactaaaaaaaaatggacctttgaaaccaaaaaggggtttggaatccaatagacccggaaaacccttttggggaaaaggcttttgccc

SEQ ID NO: 7772 - DNA, 309 bp, Oryza sativa
  Clone ID: PAT_MRT4530_14335C.1
atgccgcctgcagaaggccggatccagcagcccccaatgtctaggcagccggatccggcgcggtacggcgaggaggatggaggggcacggccaccgccgctgctgaggtgcgccgcctcccctccagccggatctatcggtgaggagggcgtggccccctccgcagggccgtcatcgccacccggccgccgctattgccactccgccgggcgagagagggcgagagagatcaagaggataaggccgctctatcggcttggtgctgggtttttgcgatctcaacccgcggaagtaggaaaatgcctatag

SEQ ID NO: 7773 - DNA, 482 bp, Oryza sativa
  Clone ID: PAT_MRT4530_14336C.1
acattaaaatacggagggagtatatcagatcttctcaacaacaaatggacaaaaaaaaaacaactagattcaatctaacactaactgaccaacagataggtccccaatctacaatttctaaatggctaaataagaagactagttttataaaaaataggcattgtagaattcataacatttgcctaataaattgacaagcttaaagttctcctttgctattaggattccctgttcagcagcaggtttgcagtatccttttcagtatcacgtaaatccttcacatcataggtcagttctaattcaccattagctgagtcaaaaacctgaaaacgacaatccccatcttccaaacaaaaactttcctgctccatctgctgcaattcagattctatcagagattgcatacgtgcacgctctctatcccggggataactgcagtacaggaacgagtatatggaggtgcaaattgtaaatggtattgc

SEQ ID NO: 7774 - DNA, 368 bp, Oryza sativa
  Clone ID: PAT_MRT4530_14337C.1
ggcgagcgagaggcgacgcgcagaaggaggggggccacgcgtggggctgcggagggggcaagcaggacgcggcggtcgagagcgctagggggggcggcgggggaagtacgcgggaggccgggcagaggggaggatgggaacagggtggcgcgacaaggggcgaagagaggagggagagcaagagggccggagggcaagtggctcggcgagcggagggcggcgccggcaggaggtccaaggggaaggccaaggcgcaggggggggtcgtcgcggcatccgggcgtgggcgcaggcagatcaggcccggaggagggaagggtggaggccgatggcggtcgaggcgtggtcatcaccgtctggagcagtag

SEQ ID NO: 7775 - DNA, 698 bp, Oryza sativa
  Clone ID: PAT_MRT4530_14338C.1
atggctgatccagttaagctcatcggcgcatttggcagcccgttcgtgcaccgagccgaggttgccctgcggctcaagggagtggcttacgagttcatccacgaggaccttgacaacaagagcgacctgcttctcgccaaaaaccccatccacaagaaggtccccgtgctcctccatggcgaccgtgccatctgcgagtcgctcgtcatcgtcgagtacgcggacgagcctgctcgaggtcatcgtggctggcattgtggttggacggcgaggagcaggaggggcttctgaaggagacgaaggagaacctggcgcttctggaggcgcagctccatgggaagaggttctttgccggtgactcggtcggctacctcgacattgttgccagtggactggctcactggatcagcgtggttgaggaggtgaccggagtgagcttgatgggcggcgccgacgaggatgacgagtatcctgctctacgccgttgggccaaggagtacaccacggatgagaccgtgatgcagtgcctgccgagcagagagcacctcgctgccttcttcgctgcgaagaaggacaagctgaagatggtggctaaggcgatgctgcatcagtgattgtgagtgttgtgggggccgacagtgggagtgtatgtctcaggtgatggtgcttcttaaataaaatcgaatcagaacataatt

SEQ ID NO: 7776 - DNA, 524 bp, Oryza sativa
  Clone ID: PAT_MRT4530_14339C.1
gaacacacttggaagcaaacaaccaaatatggctgatccagttaagctcatcggcgcatttggcagcccgttcgtgcaccgagccgaggttgccctgcggctcaagggagtggcttacgagttcatccacgaggaccttgacaacaagagcgacctgcttctcgccaaaaaccccatccacaagaaggtccccgtgctcctccatggcgaccgtgccatctgcgagtcgctcgtcatcgtcgagtacgcggacgaggtgttcgacggccgtcccatcctacccaccgacccctacgaccgcgccatggcccgtttctgggctcacttcatcgaacacaagtgctcgaggtcatcgtggctggcattgtggttggacggcgaggagcaggaggggcttctgaaggagacgaaggagaacctggcgcttctggaggcgcagctccatgggaagaggttctttgccggtgactcggtcggctacctcgacattgttgccagtggactggctcactggatcagcgtgg

SEQ ID NO: 7777 - DNA, 299 bp, Oryza sativa
  Clone ID: PAT_MRT4530_1433C.1
cacaaagggaggaggcctcacgatctctcgctagagagggtcactcctcgacagtattacgtacagctgagttggttttaaggttcattattggtactcattgctcttctagatgaatagtggtatgcataagatgagttaccctgacaaacattgctctgtggctgcagtgaactgtgttagtgctgtagctaagatttcagaactgaatgtatcttgtcgtttcctggcctggagcagtcgttcgctaatagtatatctttgtgtcactactcaaaaaaaaaaaaaaaaaaaaaaaa

SEQ ID NO: 7778 - DNA, 3024 bp, Oryza sativa
  Clone ID: PAT_MRT4530_14340C.1
atggcggagacggcgctgagcatggcgaggtccatgctggggggcgccatcagcgcggcttcggcggccgccggcgaagagatgagcttgctcatgggtgtgcagaaggagatatggttcatgaatgatgagctaaaaacaatgcaagcgttcctaatagctgctgaaacaatgaagaagaaggacctgctgttgaaggtgtgggctgagcaagtaaggagcttgtcctacgacattgaagattgtcttgaagagtttatggtccatgtcggaaaccaaagcctcttgcagcaattgacaaatctcaaagatcgccaccgaatagctgtcaagattcgcaacctcaaatcaagacttgaagaagtgagcagcagaaacacacgttacaactcgatcaagatggaggcgaacaacaccttcgatgagatcgagtccatggaggatgttcggaatcattctcgtagcaacatcgacgaagcaaagcttgtaggctttgacacccccaaaaaggagttacttgacaagataaacatggatgccaatgatgatgaccactgtcgggtgctttgtgtggttggcatgggaggattgggtaagactactctggtaaggaagatctttgaaagtaaggaagacatcataaataattttccacatcgtgcttggatcgttgtgtcacagtcattttcgatgatagagatgctcaaagatatgattagccaacttctaggtcatgaatcattgaaaagatttgaagggaagccgatccgagcacacgaccttggtacgcacctacgagatggactgaaagaattgaggtactttgttgtttttgatgacttgtggaacacagatcactgggaatggattagggaatttgctttgcctagtaaaaacaacaaaaggagtcgggtgattgtaacaaccagattagatggagtagctaatgcatgcaccactgaaccatttgtctaccgccttaagctcctagagacggaatgtgccatagatttgctactaaggaagatgggggaaagtaaagaagatatgaagaatgataacaacctgaagagcatagttacacaattagtaaaaaagtgtggttgtttaccactagccatagtaacgataggagcaatgtttgctaataaaccttcgtcgaagtgggaagaaatgtgcagacaacttccttcagagcttgagaacaacccaagccctggagtcgaagcaataaggagggtggtgaccctaagctatggccatttgccatctcatcttaaaccatgctatctatatctaagcatttttcctgaggatattgaaattaaaaggaggcatttggtaaacagatgggtagcggaggggttggttagagctagagttggaatgaccattagtgatgtcggagaaagctactttgatgagctaattagccgaagtatgattcaaccatcaagggtgaatatggaaggacatgttaagagctgccgggtccatgatataatgcgtgatattatagtctcaatttctaaagaggagaattttgtttactcaacaggagataatgtatctacagtaatagtggagaagttccgtcatctgtcatgccatggcggcaactacccaatagttggaatggatttcagtcgtgtccgatcgttaactgtatttggtgagtttgatcagagacccatgttggtgggctcttcaatttgttcagctcaattcacgatgctaagagtcttggatctagagaatgcagtattttcagtgacacaaaaagacataaacaaaattgggttgttgcggcacttgagatatttgaatacgcatactagaagacggtccactatttatgcacttccaagctctatcgggaaattacagaacttacaagttttggacataagagagagtgaaatttctacactaccaactgatatcagtaagctccttatgcttcgtatcctccgttgtagcaagggaccgtggtacttctacttctattttgatccagatgaaccaataaaatgcttgaagcatacgttgcgcatgcccttgatgttgacaccattagttggttctgcagcacgcaattatactattgctgagctacacagggcctactctagccattggtcagagacaccaggcgtgagggttccaacaggaatcagcaaactaaaggagttgcaggtcttagaggttgtagaccttaaactaactaaaagcaaagcaattgaagagctgggtgaacttcgctggctacaaaaattacgggtgtcaacaaagggggcccaggacaagaagcgcaagacactttgtgaagccatcgagaagctatcatccctccaatctctctgtgtttatgagggttactacttcataactgggacacttgagtggctgggtccttgcaatttctcccctcctcccctgctgagaaagctagagttgcatggacgtattcgcgtgatgcccgactcttttaggaaccttaagcagctgcggaagatttttttgcggctaagcgaactagatggtagagccatagagatacttggaacactacccaacctcatgctcctgaatctcgatggcagagcatatgttgggaatgaattagcattcaaaaagcacgagttcccaaatctcaaggagcttcgtatcagtatgctgtccgaactaagagggataagatttgagaaggacgccttgccccacatggaaagaatggaaatcgaatgttgccagttgagatcagggattgttggcatcaagcacctcgaacagctcaacgagatttcacttgggtgtgatgtggcggggcttgatctgctggaacaggaagtaaaggcgcaccccaagacacccgcattgcggctgcttcaagaccgaagcaaaatcgacttggggctccctgtagtcctgacgaaagacgaaggctccaatgttgaagaggaagcaaaggaatccgtccatgacgatgccggggagagctcgcaagtgatctcatcaccgtga

SEQ ID NO: 7779 - DNA, 354 bp, Oryza sativa
  Clone ID: PAT_MRT4530_14341C.1
atggcctttgctgagggatatcgtaagaacatgaatttgcttagggacactcaaaaaatgtgggagaattttcacaacatgggagatttgcccctaggaccaattagtacaaagagttttgttttctttacaaatcaagtccctggtgctttgatggagtggagcccgtgtgtcattgtctcgaggagggagagagcagtagctgaggcagagccttgccggctggcactccttcacggcgacgctgacagtgaatggcagctccttggacgatgcggccaaatagagaaagatgtgcaggcttcttgcgaacccgacggtggtcgtcttttagccggaggtggccagaattga

SEQ ID NO: 7780 - DNA, 518 bp, Oryza sativa
  Clone ID: PAT_MRT4530_14342C.1
tgtatagacatcattggcgatctaccgcccaatgtcatcgtgcatgatatgagcttcgactggacaggacgccgacttgcagccgtgtgtagtgacaagaccattcgcactttcatcaagcggggcgagaaatggatgaaggaggaagtgctcaccatccagggagctgccgcttggaaggtgaagtgggcgagaccggagttcggcactatcatcgctacttgctcgctggacacacagattcgcatttacgaactaaagaaagtggacaagggagagggagagaagagctcctgggtgtctgtccacaacattcaatagaacaaggctatttaggacatcaagtttatccccagcaagatctatgggctctgcctcgccatcgtctcatctgatggatacctcaaagtgcttatggctgaagatcccctcaagctaaggagtggggcaatcactacagtctacatgttagcgagctagggctaagctgcctctccttgagcaaaaacttggtgaag

SEQ ID NO: 7781 - DNA, 552 bp, Oryza sativa
  Clone ID: PAT_MRT4530_14343C.1
gtggatttacgagtgattactgattagaaactctaatgcacatacacatgccatgtatcattaccctgatggtgccactagaataaccaacaaagagctgccctccgaagaatattatagcggttgctgctccattgccaggttgaccgatttccaatatctgtgtatgaacacatgatacacgctgcactgacaacttcagataattagatttcgtgtaaaatgatgttccaaaagtaaggaccctgtgcaagtgataattataatcttaaatgaactggtatacttttgtatttcttttttctattacttaactaagtttagaagatgttcattgtgtttaacggagaacatgaatggccaagatttcacattatttgtggttcagaaaggaagagaaaagaaaagtggaaaggagttagatttgaacaatactcactggcttgctgggaagataataatctgtaacttgaagcaactcttcagccatccatgtgaatgatgacagcctccttagagattctcgtgaaccctctgacaagcctcgtgccg

SEQ ID NO: 7782 - DNA, 353 bp, Oryza sativa
  Clone ID: PAT_MRT4530_14344C.1
gcacgaggagcaaacaagacagcgaaaataatcagagagagaaactagagagagagaagagggagagatgttcccatcaccagggagggcggtgatggcgctaggccaccacggcgccgcccgccaaccgccgaccaccatggcggcggcggcctcctcgtcgacgaactccgccgccgacgccccggccacggacaccaccaccgtcgccttctccgtccagcatcccacgcccacgccgtctcaccaacaacaccaccatggcgtcctaggttacagccccctcgtactcgagcaccaccacccaaccaccgacgccgcctcctcgcacgcgccctctcctcccaccctcc

SEQ ID NO: 7783 - DNA, 1931 bp, Oryza sativa
  Clone ID: PAT_MRT4530_14345C.1
gctcgtggcttgtctcgtgtttttttttttttttttttttttttttttttttaataaattaccgtatttattgaggtcgaacggtccgtagcaaaatttgccaagccgttgagcaggtgctggcgcgacgccagcacggcgtcgttggtggtgagcgcggggcgggcgaggtttggcttggagatcaccaccgccggcatgctcccggcttggagatcactaccgcgccgtccgatgatttctttcttttgctttggaccaacaaatggcgggatgctctgctcgttcctgaagtagtcggtcggatccatcgccgccttcaccgcggcgagcctctcgaagttgccggcgaagtacttctccccccacaccttgccgctctcgaacgtgctcacgtcgttcggcgccaccgcgttctcgccgatgtccaggtcccggaagttcacgtacgcctccctcgggtcgctgctgacgtacggctccatgaacgcgtacaggccactgatccacctgttcgccgccgttccgtcgccggaccagtacgcgatgtactggatgttgtacaggacgccgctccggtgcgggtacggcgtcgccgcggcggggacgccaccgacgaacccgcccatcggctcgaggagcatctggccggagccgttcatggtgaaccacgggaggatgttcttccacacgtccgacgggatggctcgccggacgtagtcggacttggccttggtgaaggtgctcaggctggtcctccggttgaggagcgcctccaccggcgtgcttgggttccagaactggatgagcgccgccgactgcagccagctcatctcccggcagtcggcgctcgtcatcccgagctccgggaacatgctgctcatcgtcggcaccaggtcggcgcacgagccgaggtacagcgactggaacgtggcgcgctgccctcgcacgatcacccgtatggtgagctcgggagggaggctcggcgcgacgtcttgccatctggcgacgacgtcggcggcgccctggtcgacgttcctcccgacgacgaacaccgtcaccgtcgtcggaacctgcacgaggcggaccttccaggacaccacgatgccgaagctctctccgccgccgccgcggatcgcccagaagaggtcctcccccatggcggccctgtcgacgagctcgccgttggcgttcaccagcttggcgtcgaggatgttgtcggcggcgagcccgtacttgcgtgacatcatgctgatcccgccgccgctgaggtggccaccgacgccgatggtcgggcacacgccggccgggaacgccagccccgggttgctcttcgcgacggtgtagtacagctccccgagcgacgcgccggactccacccacgccgtggcgtcgcccccgccgctgacgctcacggcgcggagcctggcgccgaggtcgaccaccgcgaacacctcgccgcggcgcgcggaccggtacgagaggccctcgtagtcgtgcccgccgctgcgcgcgcggaggcgcaccccctcggcgcggccgcagagcacggcggcctggacgtgcgacgcgtcggccggcgtgacgatgcagagcggcctcgccgtggcgttgttgaaaaacatggggttccggatggaggagacgagcacgtcggcgaagctgctcgagctcggcgtgagcaccagctctccggggatcttcgcagccgcctccatgccgcctgatctggcggaggcgaggtccggcccgctgcccctcccacccccactgggccgcagctgcctccacgccgccggatctggtggaggcgaggtcctctagggattctctaagttatcggggtcatcgtagtaatagtcataggggtcctcctcttgacccaaatcttcggcaaggtgcagaggatacttgccgacgagcgcctccat

SEQ ID NO: 7784 - DNA, 210 bp, Oryza sativa
  unsure (1)..(210): unsure at all n locations
  Clone ID: PAT_MRT4530_14346C.1
tgcccttttttttttgntantttggnttggggntaantatcncantcntttcctgtatnataanantggtggtgntcgatcgancgatncatttggnaanaanttnanctgtaantttttttttttntatatgtnctnccccntnatnatnatttanaanatnactnattagttttcaaaaaaaaaaaaaaaaaaaaaaaaaaaaaaaaa

SEQ ID NO: 7785 - DNA, 536 bp, Oryza sativa
  Clone ID: PAT_MRT4530_14347C.1
atcgggtggattcatacaatagaggcacaattctgcttatgctttggcgggcatggtacttgaggaataacgtggttcacgataagggcaatctaactattactggttctgtcagcttccttcagagctatgctgaatccctgttgcttgtccgacaaaaggtttgcgatcccaaaggtaaacaggttgatcagcagcataatcaagcccctccgagatcagtgacgaaccaagtaaaggagaataatatgaggtggagagctcctccagtagggtgggcgaagattaatgtggatggagcttttaatcctgaagatggtttgggtggtcttgggatcattatcagagactcatctgggaaggttcttctatcatcttggcgttttattcggcgatgttcctcggcattagagtctgagctgctggcatgcttggaaggattgaaactcgctgttgaatggattaaaatgccgtggagagaatgtcaagcaaggaacatgacagatctcaatggtcttttctgctccgagagatga

SEQ ID NO: 7786 - DNA, 624 bp, Oryza sativa
  unsure (1)..(624): unsure at all n locations
  Clone ID: PAT_MRT4530_14348C.1
cccacgcgtccgcccacgcgtccgcatggtacatgacgaggcggctgccgtaccagacgttgaaggcccagatggcgaaggtgatgccgttgctgccgacggcgatgcccttggcgagcccctgcttgagcccgagccgcgccgactcctcgagcgctgccgagaactgagccatggtggtccgctccgccacgaacgagtacaccgtgcgcgccgacgacacggcctgctcggcgatggcgccggggcgggtgtactgctccctgatccggcgggcgaggccgacgaggatgcggccgtacatgaaccccgggatgatgagcagcaccaccgacggcagcgccaccagcgtcagccgccacagcagcgcgaacccgacggcgtagctgccggcgaacatggcggcgttcatgacgaagttgggcaccttctcgctcagcacgtcctgcaccacgaggctgtcgttggacacgctggtgatcacctccgccgtcgaccccttcttcaggtcgaagtactccacgtcttgccggagcaccgcccgaaggtaccgtgcccgcatccgcgatgcctgccgctccgncgtcctcgcccagcaatacccctctgctcacacacacgaca

SEQ ID NO: 7787 - DNA, 1524 bp, Oryza sativa
  Clone ID: PAT_MRT4530_14349C.1
atggaggggcggacgagaacggcgacggcttggcgaacccggcggtggccttcccgagcgacgacgacgaccggagcgacggcggcgcacagctggacaaacggcggcgacgtttcagcgatcttcggtgaagaaaaaccggtggccgggcttcaccttgctcctgcgaacccaaggattcgacggcgaccgagggcgacgacggacgacaacgaacggcgcgactgaagatggaacagatcggcttcacggggacgacggtgctccgatggcttgcgtcttcgcggaggtggctgccgggcttctcctcactgctgcgatgccgacagtggatacggcgaggtccggcgaccacggagtcgacggcaaagcttggttggagatcaaaacatggcaacggttcggccttcacggtgacggcgacttccggcggggttcagcgcaaaagaacgggtggccggggtagagctcgacttggcggggccgagggaagtggcggcgctgaccggcgacggccggggcgacggcgcacggcagctggagcggctgccggagctagtcgcactgtgggaagcggtccgaaatgtgcacttagacgttggagaaccggatcagattatttggaagttcacaaacaacgggcattacacggcctcctcggcttaccatgtgcagtgctgcgggacgccgagtacaaacttcaattccttgatttggaaagcctgggcgccggggaaatgcaaatttcatgcttggctcatcattcagaacagagtctggacttcagaccggcttgcgaccaggggatggcagaacaatggttgttgccctctttgccgccgcgagactgagacggcattgcacctcgttgccacttgtagatacaccaagaggatctggcacctcgtctaacattctatttgtttgaatctttataacaccaaatccacgcctagatctagcagggaggcggtcggaggcggggtcggcggcgggcgaggtctgtctccgcatcggctggatctggctggtcgacgacacacggcggcgggagctcctatggatgtgacagccggtgctgtgggcgacggaggaagcggctggcggcgatgatgcgacggcgtggaggcacgtgcgacggcgtggaggccctggagaccgcgccagtggtggggagagggggataggaggccacgtcagcggcggaggtggcgccatgcgcgtgcgctggtggctgcggttggccggagaggtagaggctcggccgacagctcgcgacggcagaggtagcaccggcttgccgaaggagttgcggctggcagccgtgcagcgcgagtaggcatggccggcggcgttgaggacggccggcgcgtgatggatgcacagcgggaggtgatgttggcggaggcggagcccggtgaggtggaccggcggagtttttgatggcggtggagcaatggagttttcagtggtagattggcaggtggtgaacggcgggtgaaaacttaggacagcctcggccat

SEQ ID NO: 7788 - DNA, 551 bp, Oryza sativa
  Clone ID: PAT_MRT4530_1434C.1
cgccgcacggccgcggccccacctaccgccgcccacggccgctcttgtccgctgccgccgcacggccgcctgccgcgcggccgccttcgctccgaccgcgccgcgcggccgcctcgctccaccgccgccgcacagccgcggccccaccagccgccgccgcgcagtcgcctcgctccgtcgccgccacctcgctccgtcgccgccgcccggccgcagtagagaggggaagaaggaggaggaggcggggatagaaagggggagcagagaggggaaggaggaaggggaagggcctggggaggaaggggatatcgaggaggcgctggaggcggataccgagagacttaaagaggagagaaaaaaaaggggacttaaaggcagggatagcatgggaatctttactccggactgtggaaccgagactattgtggattttgggtgaccaaccaaagatggtttctccaccagttcttcagtaggaataattttccatgtaggtatcacgttgctaagcttgcttaggattgttatcacaatgggacgaggcttcatat

SEQ ID NO: 7789 - DNA, 403 bp, Oryza sativa
  Clone ID: PAT_MRT4530_14350C.1
acaacgattgtaactcacatttgagctatatatgttacacggaacaagatgaattacaggcttaatttacagcataacaggaccctccagactaagatgatgcttagccttggaatgtgaagacgcaggcaacaacacgcttaaggtccaccttgtgactgacataccgataccgcggcgatattgttggattctcaattggccatatgcacaactttttattattacactccaaactagctggattcattcatattcgtggcgattgagctggaccaatatacacgaacagctgtgagtatggagaatcaacttaggcactgagctggtagaagtagaattcaatttttacgaaacttgatcatatattgcttgacaatgcacgcaagcagctcgtgctgcc

SEQ ID NO: 7790 - DNA, 1176 bp, Oryza sativa
  Clone ID: PAT_MRT4530_14351C.1
atgcggaagctgccgccgaggggcgtggcggcgtccgccgccgtctgccgcgggtggcgcgggtgcgcgcgccgcgtgtggcgcgccgccgacgagctccgcctccgcgccgccggtgtccgccccgtcggcgccctcctcccccgctgccccgcgctctccaggctcgtgctccgcatggaaagtgatattgatgctactatgctcgcatgcgttgcattttcttgccctaatttgcaatatctggagatcagcatggtcggaagcgcagccaaccgaatgacaggggatgagctaactaggtttgtctcagagaagcgatctctctcggttctcaaattagatggttgcagtaatctcaattttcttaatataagctcttcaagcctttcaacgctttggctatcagatctttcttccctttcgaaatcggtcataaactgtcctaatttgaatgaactctcactgggatttacccaacaaaataatgattctacggatctgattagtctgatggatagtctgggtcgtacctgctcaaatttgagaaacctgcacatatcctcaattcatttatgcaatgaagctgtgttttctctagagagtgctaatctcaggggcctatgcatgctatccttgattcttggttcaaaaataacagatgcagctgttgcatctattgttcgctcttacgcaagcttggatttgcttgatttaagcggatctagcattactgataatgggcttgggatgatctgcaaggcattccctcatactctaaccaggcttctccttgccctttgcccaaatatcacctcatgtggggtgcaggtggctacttcacagttgccacttcttcagctcatggactgtggcaagagcttatgtgctaattcgcagcctgaagcagagagatcatattttgaacggttgcttcttcagtgcccaagcttgaaggatgtacatgcctctgggtgccgtgacatgctgattggagcaatcagaaaccaggttctgaatgagtttgcttcagcagagcctcgggttccttgcaagcggctagcggatggttcaaaacgtgtacaagtcccacacttcatgctcgaacagcaattcgaggaggagaaatggggcagcgggtcgaagcggagccagtgcaccgttcacctgagctaa

SEQ ID NO: 7791 - DNA, 3177 bp, Oryza sativa
  Clone ID: PAT_MRT4530_14352C.1
atggcgtcgtcctccaccggcgctaccccaactattaatgggaacactgtctctgagaaactgaccaagagcaactatgtgttgtggagagcgcaagtgcttgcagccctgcgaggtgcgcagatggctggcttccttgacgggagcaccaaggcgccggaggcaaccaccgtcatcaccaaggatgatggcaagaccactgagaaggtggccaacccggcactacctcagtgggtggcacaggagcagcagtctcgtgccagggtgattaacactcgcctggcactctccaacaccaagaagggaaatcgaagcgttgctgaatatgtgggtaagatgaaagctcttgcagatgaaatggcttctgcaggaaaggcgctcgacgacgaggaactggtctcctacatccttgccggtctcgacttcgactacaactcggttgtcacgactgtgaccggccgtaccgatccaatctcggtgaatgagctctatgggcttctggtgggcttcgagtcgcggcttgaactcctccagaacgcgttgcaggcctctgccaatgccatgtcgcgaggagggtgcggcggaggacatgggcaaggcggcaacaacaatcgtggtggcggctctggtcgcggccgcggtgatggcaagcccaagccaacctgtcagctgtgcgggaaggttggtcacaccgtggccaaatgctggaagaggtttgatccctctttcactagagaagagaagagcgccaacactgctgctacatcgagctcctacggcattgacaccaactggtacgtcgacagcaacgcgactgaccacatcaccggcgagatggagaagctgtcggtgaaggacaagtaccacggcagtgaacaagtccacaacgctggtggaacaggtcacgaggacgccaatcctgcgaggcagccaaacctgcgcccctacaatcatcgaaagcttgaattccgatccaagcaatgtgcttttctcggttatagtactttacacaaagggtttaagtgcctagatatctccacaggccgcgtctatatatcccgggatgttgtgttcgacgaacaaatctatccctttgccaatcttcatccaaacgccggcgcccgactccgctcagaagtccttgttcttccacctgatctccttccgccaactcagtttgatcaagggggtgcaatagttaatgatcaacctatgattgatgatcctaaccatactaatcaaactgctgagactgatgcagatagaggtgcagtacaaaattctgagcccacaggagaaaacaacgcctcaaatggtggagaaacagaaccgggtggccatgatttcatgcatggcacggaatccggctccggcgggcagcacaccggaagccatcccgaggatgatgccctagcggcgtcagatgctagcgtcgcggaatctggcaacgacacaggcacaagccccggggccgggccaacggcagccggacacgcggaagaatcgggacaggagtcaagctccatcagcgcaccgcacgattccccatcggccagtactcccggatcagatgcatccagcgacggtgtggccgagtcagggggagaacagcagcagccgatgctaggccctgcgacaagatctcggcacggcatccacaaaccaaagaagtatacagatggtacaattcggtatgcagctttggtaagtaccgaggaaccaggtaacttgcatgaagccttgaaaaataaacattggaaattagcaatggataaggaatttgaggcgttagtgcataataaaacctggcatcttgtgccaccacagaagggagtaaatattatagactgcaaatgggtatataaggttaaaagaaaagctgatgaaagtatagatagatacaaagctagattggtagctaaaggttttaagcaaagatatggtattgactatgaggacacctttagtcctatagtcaaagctgcgactatcagacttgtcttgtctctagctgtgtcacagggttggagcttgcgacagctggatgttcagaatgccttcttacatggtttcctggaagaagatgtttacatgaggcaaccaccaggatatgaagaaccaaaggcaccacagtatctctgtaagttggataaagctttgtatggactaaaacaggctcctagagcatggtactctcggctaatctatgttgatgatataattgttgccagctcttctgcacaagctgtcactgccttacttaggagtcttgaaaaagagtttgctcttaaggatcttggtgagttacactactttctgggaatagaggtcaagaaagctagtgggaatatactgttgaatcaagagaggtatgctagtgaaatcgtcaagagagttagcatggagaactgcaagtcggtaggtacacctctctcaacagttgagaaattatctgcctatgaaggtgagaaacttggagagaaagatgcaactcagtaccgcagtgtggtgggagcacttcaatacttgactttaactagacctgatatatccttttctgttaataaggtttgtcagtttcttcagaatccaacaacagtgcattgggcaactgttaagagaatccttagatatgtgaaaggaaccttggggcttggtctaaaagttgaaaaatcttcatcaaatattgtaagtgcttattctgatgctgattgggctgattgcctagatgacaaaagatctacaggaggctttgcagtttttctaggatcaaatctaatatcctggaatgctaggaagcaggctacagtgtcaaggtcaagtacagaagcagagtataaagcattggctaatgcaactgcagaaataatgtgggtgagaaaactactggaagagttaggaatctcacacccaggcccatctcagttatggtgtgataatataggtgctacttatctatctgttaatcctgtctttcatgcaaggacaaaacatatagagatagattatcactttgttagagaacaggttgcacagaagcaactagcactacagtttgtaccatctcaagaccaagtggcagatggattcaccaaagctcttcctgttcggcagctacaaatgtttcgtaacaatcttaatcttgtagacttaagattgagggggagtgttagataa

SEQ ID NO: 7792 - DNA, 680 bp, Oryza sativa
  Clone ID: PAT_MRT4530_14353C.1
ggtttgatccaattccagttgcagtgcacttaaattggagggtagaaaaagctccattctgacgatgagacggcctcacctcaactagcttcatctgaagaaatgtcaagttgtcaagtagccttacaagctgactaaacttcagctatcttgttcctcaatcctggtggctgcaatggttaggctactccatcgtttagctcaggtgaacggtgcactggctccgcttcgacccgctgccccatttctcctcctcgaattgctgttcgagcatgaagtgtgggacttgtacacgttttgaaccatccgctagccgcttgcaaggaacccgaggctctgctgaagcaaactcattcagaacctggtttctgattgctccaatcagcatgtcacggcacccagaggcatgtacatccttcaagcttgggcactgaagaagcaaccgttctggatgaagatttgtgcaacagttgagattgagatcactcagctctggacaatttacatacagggcatccagagctgaacagccccaaaggctgagtttcttcaggttagcatgttttattatcagcttttggtaattaggctgctgctttctctggataggtaattttgaacaaaacttaatccctccataaatttcaccaaaatatgatctctctgcttcaggctgccgc

SEQ ID NO: 7793 - DNA, 380 bp, Oryza sativa
  Clone ID: PAT_MRT4530_14354C.1
cgacaaatagaggggccaactaccctatgcagcaagatgcacaagtgcaaaatcaaaatgctcttcttcatgcacaacaggtaggaaactgctgctggctcaccatacttgtattatgtatatcttaatatttctatattctaaagcatatatgcttccttgctgaggaaatggtttagttagactcttaagaatttctacccatcaactgtgcaaggaggggtggttttagccaactaaaagaggcataaggctgtttgattcagaataatttatacacttagccatccaaggatagatcactgattaaacaagcccttcggtgtcttccactttaatttggtttaatgggagtgaataactgcctgatgatcactgga

SEQ ID NO: 7794 - DNA, 1663 bp, Oryza sativa
  Clone ID: PAT_MRT4530_14355C.1
actagtggatcccccgggctgctggtcgtggtctttggtttcttggctctgtattgtcccgattattttttaatatatacagttatcgtctaaaatgaatattatcagagtacaaagctggtttcttattgttcttcagaagtacacaagggaaaggctttccaagtacagggaattgaatgatacagagtacagaataacaagctacacaaattcacacatgacacatttgacaattggtttgatccaattccagttgcagtgcacttaaattggagggtagaaaaagctccattctgacgatgagacggcctcacctcaactagcttcatctgaagaaatgtcaagttgtcaagtagccttacaagctgactaaacttcagctatcttactcctcaatcctgaccgctgcaatgccatctcctcgccacttgttagctcaggtgaacggtgcactggctccgcttcgacccgctgccccatttctcctcctcgaattgctgttcgagcatgaagtgtgggacttgtacacgttttgaaccatccgctagccgcttgcaaggaacccgaggctctgctgaagcaaactcattcagaacctggtttctgattgctccaatcagcatgtcacggcacccagaggcatgtacatccttcaagcttgggcactgaagaagcaaccgttctgcattttcaggaagagacatcgcacctggatgaagatttgtgcaacagttgagattgagatcactcagctctggacaatttacatacagggcatccagagctgaacagccccatagactgagtttcttcagattagcatgctttatgatcagcttttggttagtagactgtttttctctggataggtaattttgaacaaaatctaatccctccataaatttcaccaaaatatgatctctgtttttcattctgcaaactagcacataaggtcattccacagtccatgagctgaagaagtggtaattgtgaagtagccacctgcaccccacatgaggtgatatttgggcaaagggcaaggagaagcctggttaaagtatgagggaatgccttgcagatcatcccaagcccattatcagtaatgctagatccgcttaaatcaagcaaatccaagcttgcgtaagagcgaacaatagatgcaacagctgcatctgttatttttgaaccaagaatcaaggatagcatgcataggcccctgagattagcactctctagagaaaacacagcttcattgcataaatgaattgaggatatgtgcaggtttctcaaatttgagcaggtacgacccagactatccatcagactaatcagatccgtagaatcattattttgttgggtaaatcccagtgagagttcattcaaattaggacagtttatgaccgatttcgaaagggaagaaagatctgatagccaaagcgttgaaaggcttgaagagcttatattaagaaaattgagattactgcaaccatctaatttgagaaccgagagagatcgcttctctgagacaaacctagttagctcatcccctgtcattcggttggctgcgcttccgaccatgctgatctccagatattccaaattagggcaagaaaatgcaacgcatgcgagcatagtagcatcaatatcactttccattcgc

SEQ ID NO: 7795 - DNA, 2036 bp, Oryza sativa
  unsure (1)..(2036): unsure at all n locations
  Clone ID: PAT_MRT4530_14356C.1
ttttttttttttttttttttgcncatgggttgtnggtcatgagcttcattgnccaagacatatgtaatataaagctactaaactgtgaaaaagttcttgcctcctggttgcttcgatggccgcagcgcacactgacatcaaagggtagcaaagcatctccagactgcagtacagatttgatcactctcaactcagaagaaattagaagtctgatatacctttttgggggtgctttggcacaaatgctcacttttcatttcgcaagtgctcagaaaacaatgcacaactcttgccatgataagatgtcattgtagaagcatcaggtagaagcacaaaaaaccagtgctgcaccatactctcgaacaacatttacaaacatcaatctgtacattcacgagagaggtgtagcaaaggcatttttcctttccttgatgcatatcagattgagtgatgatcttgtaccttgctttgttgttagcgaaactggactgtgttggcactcttcttatcactagaggtttggaattcaaggatatcacaggtggcacctttagcagctgaagagttgataaacctgctcaaacatcgccataggtgaatatatcctgaaaacaagggagatcaggtgttttgatccttgtaagtctgccctcggagttttgcaatgttcttccgtaattcaatgctcgatatttgctctgcctccagtgctctttcaagctttgctgctcgagcgctccattctccaagaatggctctgagtctatcattttcttcaatatactgattattgctcacacgaatgcgctggatctctgagtccttttcatcaatcagactacgtgcaagttgaagctctgaatgcacttgattcatctcagcggagagtgctctaagttcttgatcacgcgatgctaatagatgagcaagatcggcctgaggagtgctcccaacatcagttctctggtatttgcttaagcattcttgcaagcggagcacctcctcactcaggtaatgaatattctccctttggtactgaagcagagccatttgctggtcagaaaaacgaccatcataataccttcgttcttccaaagaactagatggttggagttggagtgcagaatataaggaccgcaaaatatcagggtgcccattcagagagttgtacttgtggatatgccataagtataagctcatgaaacatccagctcatatagcttcaaccacaatagcaatccttagcaataaagaaaccgatagtatgtgtactagaggttgccagactatgattaagagcattgaagcaacgccactagcaacggtggcaaatggaagtcgagcaaggcgcttcaatttctcactaaaatcgtaatacccctgcaatctcacttttctgacctggtgaacccaatattgttgaaaaatacctgttagaatcagaaggataacattggagctgcatagcaatggggggatcatgtctggtacaaggtaaaatatccatggggctgacactgccacagcagcataacctgccaacaagatacagtacaaggtgccaccaacaatgcttctaggctctcgatgaccagagagaggagcttcatgtagcaagtcaataaacagcgcatcctcctcggtggcgggagccgcggcggacgacgcggcgccgccacgctcgtgcgccatcagcgccgcgcccgcagccgaccggtgcagaggggacctcccgcgggtgacgcctccggagtccgtgccctccaacttctcccggtctccggatccaaatggtagtagaagcttaaggcttaagcgtgcaaagtctcgcgagggataggggattgggcggttgggggcagagaagaagcggcggtgccgatcctgcgtggaggttggtgacaacgggggaagcgagcgcgcggctcggggaggatcgccggggagagcgggcgacggcgggtgatggatctccggcgaccggccacgagaggggtaatggcctagacttggagatctaaagatccacctcgtgc

SEQ ID NO: 7796 - DNA, 1447 bp, Oryza sativa
  Clone ID: PAT_MRT4530_14357C.1
ccggtccccgaggttcgccgtcgtcgacgtcgcggcgctccgggcggtgcgggtggacgcggcgaggggcgtggcgcgcgccgaggcgggggccacgctcggggagctctactacgcggtggcggaggggagcggcgggcggctcgggttccccgccggaatctgcccgacggtatgcgtcggcgggcacctcagcggcggcgggttcggcccgatgatgcgcaagtacggcctcgccgccgacaacgtggtggacgcggaggtggtggacgccgaggggaggctcctggacagggcggccatgggggagggcctcttctgggcgatcaggggcggcggcggcggcagcgtcggcatcgtcgtctcctggaccgtcaacctcgtccccgtcccggccgtcgtctccgccttcaccgtccaccgcctcctactccggcgaggtggccacgacgagcaatctctcctccgcctcctcaccaaatggcaagccgtggcgcacgctctccccgacaacctgttcgtcaaaatgtcctggaggccaagaccacaacgacggcgacgactcaactgtcatccattggtgacgttcaaatcattgtttcttggaaattgcagcgacatgatcacccaaatcgaccaccatttgcccgaactcggcatcaaaccaaccgattgcagggagatgaactggctgcaatccatgctgtactcctacggctacaccaatggccaaccagcagaggtgcttcttgacaggacactgcaacccaaggactactacaagatcaagctcgactacctaacctcaccaattccgacacccggcctgatcgaattgctcaccaagatcgtcgaagacgaagacggctccatcgacattgacccacaaggcggcgagatgagccggataccggaatccggcacgccgtacgctcaccggagcggatacctctacaacctgcaatactttgtcaagtggggaggtgacaagaatgtgtcctatgaggatgatcatctgagctgggtgagggggttgcatgagctgatgacaccctatgtgagcaagaaccccagggctgcatacatcaactacagggacctggatttggggcagaatgtggagggaaacacaagctatgaggaggccagggtgtggggggagaagtacttcaggggaaacttcaggaggctggcaatggtgaagggtgaggtggaccctgatcagctgttctggagtgagcagagcatccctcctctggttgtgagcacaagggatgctggattggtttcagatagctgatgatggttcagtctgcagcttgatgtatagtaagaatctgtgccttttcttcagcatatatttctccaataatgtgtgctagaaaatcaaatactcctagttcatcgaatagacaatctttttttttaaaaaaaaaaaaaaaaaaaa

SEQ ID NO: 7797 - DNA, 1141 bp, Oryza sativa
  Clone ID: PAT_MRT4530_14358C.1
tctacaagagagatggatgaaaaggcggatggtgagcaccatgagttcatcaggtaaataaataccaactctatacttgtcattcttcaagcatggctgcattttctctatagtaataatccacttgtgatttttcagagaggggatgatacctagtacactacctcaacttggaacgaagttttaggatgagatggaggcttgggagttttggaaatcttatggaggtaacatcggtttggaggttaggaagaggtacgcgaataagaggaagtctgatggtaaagttagatcatttagatatgtttgctcaaaagagggtcatcggaaacaagataaaagatatcattaaataaaatgtcctagagctgaaactagaaccggttgtcaagtaagaattggccttatactagaccaaaaagtaggaaattatgaggtgactgatcttgttctagaccacaatcacatcctttatccaccggaaacattccacctaatgtcatcagaaatgaatatttcagatttgcaagcttttgaaattaagacaattaaccgatgactccggaattggaccaaaagctgcacatgagctagctagccgtcaagttggtggatcatttaatcttagctacacccttcgtgatcaaaaaaaaattattcgtgtaccaagcaacagagggaggtggcatatggtctaagtcggaagtatgttgaagtattttcaagacaaaattgctgagaatccttctttcaaatatgctttgcaaatggattgtgatgagcaaatagcaaacatattttggactgatgctaaaattatcatagactatgcacattttgatgatgttgtcattttttatactacttttggaacaaataaagagagtagatctttcagtgtctttgttagtgtcattttcgagaaacatttgagtctttcaagtggttgtttgagacctttgtaaaagcacataatggctaacaaccgcaaacaatttacacaaaccaagatagtgcaatgggcaaagttgttgaagaagtgttcacagaagaatggcatggattatgtacgttccacataatgcagaatgctatcaagcatttatctcaaccggagaatagggagatgccggggtcgtcg

SEQ ID NO: 7798 - DNA, 437 bp, Oryza sativa
  Clone ID: PAT_MRT4530_14359C.1
cttgtctgtcccgaactgcgccgtcgacgaagtcgtcgccatcctaccgtcggactgcggcgaagcaggcccgatcggggagccaccctacagggcattgcacctgcactcctatgcttccttgcgcgtcgcgcgcgcgcgcgaagctagtctctaggaggggggcgactctagcctgcctgtccccccacacccaagcctggactgggatcaagctgaaccgtgctcgatgatgaataggaggtgcctaaagcagaccacgacatcgtagcctatggctgctcgatgagcagggcaaatgctgctggctgtactaggaggtggctttctctcggcaccggcttcagggcacagccatggccttgcccttgtgcttcttggcaggaaagatgaagagaaccctgtccaggtattcccgtggaatcagtaccgactag

SEQ ID NO: 7799 - DNA, 225 bp, Oryza sativa
  Clone ID: PAT_MRT4530_1435C.1
atgaggaagggattggcgtgggctaggcgtgttgatgctgccattgatggaaatcgacgcaaggaagaggaggaagaggcagcgatgcacacacgcaccagcgacagagatgcagacaatggcggtgcagaggaggttactgaactcaaagatcgcctccccttgccagttccaagtcctctcgagcctaacagtaacgttgccctgttcacttatggccattga

SEQ ID NO: 7800 - DNA, 585 bp, Oryza sativa
  Clone ID: PAT_MRT4530_14360C.1
cccgggctgcaggaatcggcacgagggtaagggaggtctcatgggtgagtatagccttccacttcatttcaatttacttttttgtgcattaaccaagatcaattcacatggttaaactgtctttgttatctcgcgcattctgaaaccatgaatttatgaaggtgtatatccacaatcccacataatgtgtacatagtaatcatttgaagttgttcagccatttgcttgtgcaaaaccgtattgtaggtttgtagctttcgctcattaaaattgatcatgcctactgtgattcgggtattgtgtatgacattggcaatttgaccaaaatagtgatcgatgaattggatttgattggcaacacatatgttattatttctcttatgaccaaatcccaacttatattttagcttcttgaagtataccatgaaaaagtgctaaaatgtttggttttcgcaatgtacgcatgctgttaaaaactagtgactcactttaagctgttcgtgtcaaccttttacttgcataagtttgacaacgaggggtagttgctaaaagcctaaagctttacactggggtttcacatcttat

SEQ ID NO: 7801 - DNA, 666 bp, Oryza sativa
  Clone ID: PAT_MRT4530_14361C.1
atggtgaacactggcgaatcgagcaagatcaaagaacatattggccacattataccatgcaaagtctattcacatcacaagacattggccttgatgaggaagcacacgaagaagagagataccataaggccgggtgtgactagatttgctttagcatttctaaccttgcaaagcttgattgagaagaagcgtgagctaagggcaatggcgcttagtgtggagtgggattgtgggaacaatgcacccgcactaaaaaaagcaaaaggcaagatagctacctctacactaatgagtaggaccttttggaatgatgtttctcagtgtttgaaggtttttgagccattagtcaaagtacttcacatggttaatagtgatgaggcaaagaaggaaatcatggtagctgcaaaaaacttggagaacacctacaatcccatctttgaacatattgctaaaaagatggagggacttccattcagtctcatctatgaagcaagtggggctactaaagccatgcaacctcgtaggagtgctagagtgagggagcttcatgaagatgatttcaattctggagaagaagatgaggccaatgaagagggtattgactttgagtctgacaaggatgagatcgttccaactaaagtttatgaccaggaggatgaagattga

SEQ ID NO: 7802 - DNA, 708 bp, Oryza sativa
  unsure (1)..(708): unsure at all n locations
  Clone ID: PAT_MRT4530_14362C.1
ggggggggggttccgggctgcgccttcggaacgagagactgaccnatagngagtaaantcnagncgntgtgcttgtggattgggtanataanctnctgctgttctattattnatgtggccggtcaaccantgtaactaaagtanatntactttataaaataaaaaanaaaaaactcgagggggggcnnggtacccaanccnncctatantgagtcgtatnacaatncactggcngtcgttttanaacgtcntgactgggaaaaccctggcgtaacccaanttaatcgccatgcancacatncttttttcttnatgtggggtnataacaaaaaggcccgcnccgatcncccttcccaacagntgagcancctgaatggcgaatggcanaantgtaagcgtnaanatctagtnaagaancccntttaattttcgtcnantcagncatatnttaaccaanangccnaaaatcggctaaatcctnataactctcccaatggaccnanatacggttnagtgttggtccnnttcgggaaacnagaatcncctattaanggaanntgnganttccaacatttaaanggngnaanacccgnctacctggggngnatggcccctaantttnannnannacctatatcgggttcntngggggtcnaagnncccttaaactntntaattccaatnccctaaagnggatccctnatattn

SEQ ID NO: 7803 - DNA, 480 bp, Oryza sativa
  Clone ID: PAT_MRT4530_14363C.1
aaaaataaaaggaaaaaaaaacccgggcgcaaccaaaacattggaattgaagggttcaaagaattaaaaggaaccacaagggtaaaggggaacccgatttaatttaaaaaaaatttattgtttttcccaacaaaaaggggggggggcacggcccggcccaagcgaaggggaacggggaccaaaaaatgctacggactggtttaaaaaaaggccccccccttgggggcgggaagggggtttacccccaacccgggaatttttttaaacaagctcgccgggtttgtccggaggagaaaaaaaaaaaggcccgctgcaaaaaaaaccaaaaatcggagcccggggaccttttttccgaccccggccgggtggggcataaaaaaaaaaaaaagggggggggcccccaaacaaaaaccccccccgcccccccttaaaaaataagcaaaagggtgcaaaaaacgtttcctttcttttccttttcgg

SEQ ID NO: 7804 - DNA, 643 bp, Oryza sativa
  unsure (1)..(643): unsure at all n locations
  Clone ID: PAT_MRT4530_14364C.1
ccggccgggaccatagcagcggttaaatatttatatgagcgagaaaccgctcacccaagcggccatgaacccgctcccatggcgcccctccgaacactcgttatcttcctcctcctcctcctcgcgctcgtcccggcactctcgcgcccggatggcggcggcggcggcttctatgacccggcgcgcgtcacccagctatcctggcgccccagggcgttcctgtacagcggcttcctctcgcacgacgagtgcgaccacctcgtcaatctggggaggatggagaagtcgatggttgcagacaatgattccggcaagagtatcatgagccaggtgcgcaccagctccggcaccttcttgtcgaagcacgaggacgacattgtttctggaattgaaaagcgtgtagctgcttggacatttcttcctgaagaaaacgccgggtcaattcagattctgcattatgagcttggtcagaagtatgatgcccacttcgattatttccatgacaagaacaaccttaagcatgggggtcatcgagtcgccactgtgcttatgtacttgaccgatgtcaaaaagggtggagagactgtatttccaaatgctgcgggaaggcatttacaactcanggatgaaacttggtctgatt

SEQ ID NO: 7805 - DNA, 348 bp, Oryza sativa
  Clone ID: PAT_MRT4530_14365C.1
atgcgggagaaggcgagggcggcctccacctcgctctgcgatggcggtagcgacgcccatgactccgaccaccatgccccgcccatgccgtgcgccgccgtcgctccagtcgtcgccgtcagtcggggaagtcaccgtcgtggtcgccgtctcgtcgccgtcctcgtccgtcccttcgccgtcgttgtcaaccgccggagcaccgtcgtcgccgtcgacccgatcgtctccgccgccttttcctcatcgccggcgccgtccgttgctcctccgccgctactttggtcaccggagactgcgcaggcccccctttgccggttcggccgggggccctgggtgaggttctaa

SEQ ID NO: 7806 - DNA, 231 bp, Oryza sativa
  unsure (1)..(231): unsure at all n locations
  Clone ID: PAT_MRT4530_14366C.1
atacaatactagagtaattaaaacacttatatgcccacctacaaacataggggtacttacatatgtacggacccctcctttnttattccatctacacttattaccagttanctctggccaacctgagtaattaattaattatttaactgcttcatgatctgattaactatttaaacactcactaattaaaacacacctaattaattaactgacctgcccgctatgctaact

SEQ ID NO: 7807 - DNA, 460 bp, Oryza sativa
  Clone ID: PAT_MRT4530_14367C.1
ctcacaacttaaacacaatttattcaactggtactgaaaatgaaattaaatgatacaaaaacgtcacaaagttagattttcgacattatccgagtaagtacgaaggacatctcaaatataattaagttgcacggcagcatcgatcaccttatccggatcttccaaagctgcacgagcagtttggggagttcccgggtggcctggtcctgatcagcgggtttctctcaaagaagttgaatggccggagctcgaatgcaccactaatcatcggcatcacaggaaagtcctcctggcacggaacatggtgcaggccaaccgtgtaccagaggacgatgtcctcgtcctttatccttctgtttctcttgctccacgcagccaagttgtcatctcccgtgctttgctcggcgtacagcccggacacctactttttcgacttggtatatggcgtaacccacacctg

SEQ ID NO: 7808 - DNA, 3487 bp, Oryza sativa
  Clone ID: PAT_MRT4530_14368C.1
acgactgaatcagctacacactgggattaatgtatttatcgatatctataaccgaagatatcactccatcaaaatttaatcagatacttccaaagaatcctataaatctcgcaatatttctgcacaaattgcacacttctttaatttcctgacaaataatcttcctgcctcttagctaaattcctagctatttacacatcatgcatgattcatatgcgtccttaggagatgctgctgcctgctgctagtcgtcgagatcttcaaatgttgaggatgagaagcccagcgacgacgcgaacgtggccgtggtctcaccgccgatgtaccgcttgagccggtccaggtcgtcggcggcgtccatcatggtcgggcgcacggccgcgctctcctgcgtgcagaggatgccgagctccagcagctcgccgatggccacgtcggacatcctcctgacctccggcgtctggtcccgcaccatgcgcgccagagccgggtcgaccaccgcgtcggcccggccgtggtagtggttcttcacccacttgtgcaagctcagccccgcgtcgaacatgtcgtcgatcggtttcttcctcgtcaccatctccagcaccagcacgccgaagctgtacacgtcgcccttcgtcgtcgggttcgagccatacccgtactctggaggaatgtatccgatggagccgcagagcatgttggcggtggaggcgccgacgtcggcggcgttggcgacgccgccgacgctcatgacgaggcgggagatgccgaagtcggagacgagagcggtcatgtcgtcgttgatgagcacgttgctgggcttgaggtcgcagtggatgaccttgaccggggagtggtggtgcaggtaggccatcccctcggcgatgtcgctgcagatgttgacgcgctgcacgaggctcagctcgccggccggcggccccgcgtagaggcaccgctcgaggctgccgttcgccatgaacggcagcaccagcgccttgaagtccggcaggctgcacgccgtgacgatccgcatgaggttccggtggcggatgcgcttcagcacctggcactcgcggttgaagctcttggtggagttcccggactgcagctggagcaccttcacggcgaccatggtgccgtcgcgcagcgtgccgcggtacacgcggccgtagctgcccgtgccgatgagccggtctgggctgaactcctccgtcgcctcgaccagctcccggtacgtgatccgcgggaacttgtacttcatcaccggcgacgagccgccgccgccgcggcgtcggcccctcctgaactcctcccgcaccgccgccagccgctcccggatcttccggatgctgaccgcgcagaggatcgtcagcacgaacgccagcacggcggcgcagatgcacatcacgaccaggaacttccgggactggtaccaccggtgtcgcctcccgcagcggcgcccgagcacggcgccgcagagccgcgggttgccgaggtatgacgtcgaggtgaagttggcgaagacgccggcggtgggcacgacgccggcgaggtcgttgtacgacaggttgaggtaggtgagcgtcgtgcatttggtcagggtctgcgggatctcgccggtgagggagttgtcggagacgtcgaggcgctcgatgctctcgaggccgtcgagcgacgacgggaggacgccggtgagcgagttgtgcgacaggtcgaggacctgcagctcggcgcaggcgccgagctccgggaagatcgcgccggtgagattgttccatgacaggtcgatgacctccgccatctgcagcctgctgagccccctcggcagccggccgccgagcaggtttcgagagaggttcagcgacatctggacaatgccggcgacggcgtcaggtatctcgccggtcagccggttgctggagaggtcgagccgcacaatgccgagatgctggccgaggctcgccggtatctcgccggacagctggttcctgtgcagggagaggtaggacagcttcaggctgccgatgctgctcgggatgctccccgacagcgcgttgctcgacaggtccagctcgccgaggctcgtggcgttgctgatgcacgccggcacggcgccggtgagcgagttgcgggacaggtcgagctgctgcagattcggcagccagcagatggacgtcgggatcgtcccgttgagcaggttgctcgacaggttcatcagcgtgatgtttatcacgtcgccgatgtcggcggggatcgggccttcgatggcgttgagctccaggttgaggtgtgacatgttaggcggcagcagcgagccgagcaagctcggcagccgcccgccgatgcccagtgctccggcctcgatctccagtatgctggtgcagttcgacaccgcggcgaagaagggccccaggttggtgttgccgtcgccgctcgcgaaatggacgttgttcgacaaatgcaggtacctgaggttgcgcaagccggagatgatggaggtcggcagatcgtcggcgagcgagttattctccacgtccagcaggtagagaatagtgcagttggcgagccaccgcggaagcctcccggtgaggctgttggagtagagattaaggacggcgaacctgtcggaaaggctatccgaggcgtcgccggggatctcgccggtgatgttgttgtcgccgaggtcgaatacacccatttgcgtgcaatttgtgaagatcgtggcggggatagaacctgacaaggagttcttctcgaggctgaggtagaacaagttcttcagctgggtgaatgacgccggtatgctgccgacgaggttgttctggccgaggttgaggccttcgagcttgccgatgttggagagctcttctgggattcggcctgtgagaacattgatggacatatcaaggatctcgaggttcgtgaggttgccgaaggacggcgggatggcgccggagagctggtttttcgatatgtcgagcttccggagttgcgtgaggttgccgaaagacggcgggatggcgccggagagttgattctcggacatgtcgagcatcaggagttgcgtgaggttgctgaggaatgaggggacggcgccggagatgtggttgtcggacaggtcgaggtaccggaggtgcggcagctgggcgagcgccagcgggatggagccgttgatgctcatgttggagagctgaaggccgacgacgtgctgccgcctccggtcgcaggcgacgccggtgaagccgcacacgtcggtgttggagtcgttccaatcagcaagcagcttcggcgacagcaacgtgaggccccgcttcaaggccagcagcgtggccttctcctgcatcagagcctggagccgccgccgctgccgccacccgccgacgatcgcctcggctggccgacgcctatccaccgcggcagccgctgcggcgatgacgaacacgagatgtaggaggaggaggaggacggccgtgcgccgcacgaccat

SEQ ID NO: 7809 - DNA, 758 bp, Oryza sativa
  unsure (1)..(758): unsure at all n locations
  Clone ID: PAT_MRT4530_14369C.1
ngagcgtgnancttatgcggccgagcggtgggccgtccaaaaaaaaacgccatccccatcctccctgccatcctccctgccgtgagtgccttcttgcgtcgagtttgagcaaagttgaatacagtatctgctgtgttttttaggacaagttgatactgtggaggagatgaagaggttacttgttcgtgggctgttttcttctccatccaggggtttgttgggcaaatctcctgtcaggcctgcactttgcaacgatgctcttctctccaggttcctctcaacggggaaagatgagaacacagtgaccgaaatcggagagaaggcaagatcaacagcggaacaattcctcaaggtggccaaggagaagactgacgaggtaagcgagaaaacaaaggaaacgatgcacgaaacaaaggaagcagtggtcggggagtcagatgacgagaaggagaagttcaagcagagggttgaggaggggaggtaccatcagaattaagtggctagtgctcaattatactccatcttgtagcttcagacttcagtgatggcctctgtcaaaagtcctagaacctgcagattgtccagtactactaggcttggcatgtactaggtagtatatgttgtttgtttcctcctgttcaatgatctgttgtagaatgaataaggtcaactttgaacttcatagtgaacttttgatgccactacatatcattttcgcagaataaataagatgaacctttgtgaaaaaaaaaaagctt

SEQ ID NO: 7810 - DNA, 462 bp, Oryza sativa
  unsure (1)..(462): unsure at all n locations
  Clone ID: PAT_MRT4530_1436C.1
agcgcttntgtgcagtctgacgttgtatgccaacgtgataggactaatcatatgcctacggcagtgctgctacagcactagtctagtctatatcagagttcgtaggctctgatggatacggcacactttagcatcaggtggatcaactgacagacaaccaaggatcatgacagctcgcgctttggggctaacactcataatataactacattaacattgctcaggcagtagcgaactaaatacaactataaatggtcagagaaatttactatgatcggaatctaactgaaccacaagctatgttgtgttgtaacgcatcatgtacatatgggatgtcgcctaggtacatatggtgcacccagcaccattaccacgcttggcggcgttacgagatgagtactaacagcatactggttctgatgataaaaaccatctcagatctcatcatatgtcacatgtgaa

SEQ ID NO: 7811 - DNA, 1503 bp, Oryza sativa
  Clone ID: PAT_MRT4530_14371C.1
atggttccggtgaatttcggggattcgtcgtcgattcccccagtggatgcggtggtgccaatggcaatggctcctcggttactctgcttcctcttcctcctcctgcagctgttgctcttcccccgcgtcgccgccatcgtcctcgccgcaacccccgtcctgcttctcgccgccttcctcctcgccctcgtcctcgtctacagcgagcccaacaacaataatgagcccgatcatctgattccgatcaggatcaggtcgcgcaatccccatgcccatgaccatgcctcctcctgcaccgcctccggatcatcggacgacgacgacgacgcccaagactcggactcggagtcggtctcggagcctgccgatgatgagaaggctgcggtgtggacggcagaggacgagaaaagcatccagaacatcggctcgctggagctggagaggaatgccgctgtggagaagctcatgtcctcaagaagcatgcaccgctactacgccgccgaccgcgacctcatcgacctcgacctcgacggcgatggccaccagctgccccccggctccgctccctccatgcaccgcaaccccttcttcttccacgatgaccaacaagcagcagcgtcaacggcgaagctgttcagccgacacgagagcttcaggccatacttcgtcgccgacaagacgcagcagccggtcgtcctcgagagcagcggtggcggcggctcttcctcgtctttgtcttcgtcttcctctgccagcggcgaccgtgccggccagcatatgaagcaagaagccgtggctgacttttcctccagctccaaggccatggtggtgacggtggatgcagagctccccaaccccaagtccatggtaacggtggatgtagagctcatcagcgactcctcggatgatgacgacgacgacattatgtcgttgcccggccagcaaataactaaggtagcgagcagcatgtcagacgacgacgatggggaatcctcctttgaggtggagagcatcacacgacagctaaggcctcagaagcgccgcctgcaacaccaacaacagcttctgattgttggcaacaacggggcaataacaataggaaagcaggagttcgtgctaaagcctgtacaagcaacactagggccaaattcaactggtggccgcgggggttcgcccctacccgatgtgatccagcagttctactcctccctcaacgagaaggacagcaaacgtcttgaaaacctgattgctcctgactgcatcatcgacgacaacgcatactataagctgctggacatcaagagtacccaaacctacttcaggagactgatggatgcaatgggaaagaatttcaaatttgccatcgatgaggtttctcaaggagtggaacccactttcgcagtaatgtggcatcttgaatggaatggtaaaaccatccccttcaccaagggctgcagcttctacatatgttcaagaaaagaagcagcacttgttattaggtag

SEQ ID NO: 7812 - DNA, 1409 bp, Oryza sativa
  Clone ID: PAT_MRT4530_14372C.1
agaggggacaacttagttatccttatttcatcagaatcaatacaaagtttctcatcatccgctagagtttgatgctaccgagtggttagtagattggctatgaaatctatggattactgagtcaggcgaatactgtaggctgtccttcagcagatgcgaatcttcctttggagacgcattcttgttcatcttttccgctggacattccccgttcttgatacaattcaggacctccactacctccttaattggtggcctgctctttatctgtgtccatctgcaagcactgaaaggccagctcggccaccagatagcatcctctttgtttcactgtcagtctcacaaccgatctctgggtcaaccaactcaacttcatggttctgaattctgttgagagccatgttagccaagttaatgtcactgtggctcctggacatgtccacagctggttttgaggaaattagctctatcaacacaacaccaaagctgtagacatcactcttatcggttagcttgtagcactggtggtacactgggtcaacataccctggtgtgccctgtggaacagttgagacatgggtgacttcaaacgggaacaggcgtgatagtccaaagtccgcaacttttacatggaagttgttgtctagcaatatgtttttggtcttgacatcacggtgtatgatttcaactgcatgaaggtatgccagtgcctcagccgtttctatggcaattgtcattcttacaggccatgtgaggcctcgttctcctgcacggggtccatgaagatggtctgcaactgttccgtttgggatgtactcatagaccacgagaaggtcacggctagaacgagacgtgcagccatatagggtaacaatattctggtgcagtaggcgggacaagatgtctacctcatttaggaattgctctactcgtctgtagttgttcttgtaaaggcgtttcactgcaactactctcccatcccggagctttcctttgtaaacagttccaaaaccaccatcaccaagttcccttgtggcgctaaatccagcagtagcctcttcaagttcctcgtaagtgaagatatggggagaaccacccaactcaaggtatttgctgtatgattgcattgaagatgaactacgcatgagatctttcaaatctcgggtttgtttctcttcttgcgctattgcaattttctttagattgcttcttgcaccacacttctcagggtgcagcccgtcggtgcaattgcaggcgaatcgcaggccgtcgccatatgtgcattgccctccgcttgctacgcatttggggcaatcacctgatgcccccgcccaatccaggagaaaaccactcatgctggcaacgtaaccatctctactcccattgggatgctcaaggatcggcaccat

SEQ ID NO: 7813 - DNA, 312 bp, Oryza sativa
  unsure (1)..(312): unsure at all n locations
  Clone ID: PAT_MRT4530_14373C.1
gtacccngaaaccaccctgaagaccgacgncagccagcnnctgctcactncgngtctcggaggcgtctgcgnccacnnagtgagtcaatggtccaaatganagaacctgtcgtggnagnnactgncangtacctttaaccatggagtaaagcttccatctgggacggagcatattgttttncccaatggattatgatatgcaatgcgcaggggntcgtcttcactgttggtctttgnnttgtgggcacaatgagaatttttagtttatgaaattnaagctgaggtngttctagananggctagtcgttaatg

SEQ ID NO: 7814 - DNA, 463 bp, Oryza sativa
  Clone ID: PAT_MRT4530_14374C.1
aactaaattcattaaatcgacgggggacaaataaaaaagctaggcctaaaaaagggggttcgttacaaaatgaacagttaacggttaccttttgggggggggatcaggatgtgtaacccaacatcacttttgtttgttacccaaaatcattgggctactgactaacttttttttttttttacaacaaaaaaaaaacctaatcgaattgctttttgcctttgccatgggggggctagccaactggggggaaaaatcaagggagctttcaaaaaaaaaatttaacagtctagccttgtccattcgaaccgcccaaaaagggggcagtctttcacaggacaaaagttttacctttttttaaaaccctgatgttgcttgttgttcaacaactgcaaaaaactcttccttttcaaaaaaactcggaacggaaccacaaacagaggtctcctttttgccccggaaactg

SEQ ID NO: 7815 - DNA, 702 bp, Oryza sativa
  Clone ID: PAT_MRT4530_14375C.1
gcacgggctttctcttctcatgtgttacaactttgatttgtcattcgtgctgctatacatgttcatgtccgaagatctgtagtttatcaggatgcaatcgtgactcggaaaatataaagtagagtgtgattccttatacaataagacccaatcttagattcgatgttcacatgctcatgaaccaaatattattggagttgttggtttgaatgatgtgcacattgaactgttactaaaaaagcatgttctaaggggctgttctgattttttatgtgcgacttcatgcattatctttaggatggtaaatttgtaatggtgagtgagttttgttctcatcagaatctttagcaccatttctattaaattagtcatcaatgggtaacctgtgtatgctgtttgattcatgtgctacaactttgctcgatagttctttgttggttgtcttagacaatcactgatttagtctgaaagcaaatgatttaacctaatcaaccgagttgtatgccgccacaggcagcgcggcatggcgcgccccagcctctagtaggagtccatgagtagcatatttttaataaagagatcaatttgaataattagggagtctatgaacagaaatatagacctttataattatagcatgcatgcaatcatgtgcgggcatttctcattaactttcttagacttattactgggattttgcac

SEQ ID NO: 7816 - DNA, 216 bp, Oryza sativa
  Clone ID: PAT_MRT4530_14376C.1
atgaggatagaggagagtggtaggttagcattggtggtaggggcaaaacgaacttgtagttacaaggtgtcgaccaaggacagtggacccaacaggatagggcacctctctgtcaccggcttgaggaggaggaaggagaagagacggcaagggggcacttgccagcgccattggcaccttctagccagctgccaaggctgggcggtggtgtcctag

SEQ ID NO: 7817 - DNA, 1320 bp, Oryza sativa
  Clone ID: PAT_MRT4530_14377C.1
atggagccgccgccgccgccgcaccgtcacaagaagtgtcggacggcggaggctgctgttcccgggggggaggaggaggaggaggcgaaggacgcgctgatctccctgccgccggacgtcctcgacggcgtcctgacccggctcggcctccgcgacgccgtccgcacctccgcgctctcccgcgcctggcgccggcggagggcgcggcgctggccgccgtcgacggcgtcctcctccgctgcctgccccggccgcgtccggagcttcagcgcatacgtcgacaagctcaccacccgccgcgcccatgactggatcctcgtcctcgcgcgccgcggcgtcgagtccctcgacctcgcgtcgccgatccacaaccacctcgccgtccactcctccgtcttctcctgcgaccgcctcgcctacctcaacctcttcgcctgcgacatcccgccgctcccgccgggtttcgccggattccccaacctgaggagcctaaccctcgaccacgtgtggctgcgagcgggcggggagtaccaactggaggagatcatcgagaattccccattgcttgagatgctagtgttatctggaatcttcatcgatggagacgatatcataaattgggtgattcgagcgcccaatctccagcatctaacgatttgttcgccgaacgattatggatggaaccttttggatttgccacgcctgcgttctgccgtcatcgatttgtgggattatcttggtggccgtgatttcgccgagtttctcggcaagcttcttcatgttaggaagcttcacctctttgtgtcctatcaaccgtcaaatggagctaagatactagagacacttccatgcacctttgacagcttgaagagcttgaagagcttgaagttatacatggacttctgtgaactgcccgcgattttaacgattttttgcttactaaggaatgctccgaatctcgaaaaactcaaaataatgatcactgataacgagcagaaagttgaggcaaatggggtgttccaaaatgcagagtggactggtggcatgtgcgccaaccttcaaattgtacagataacgagaattagttggcttccaaatgaaatgtcttttatagagctgattctctctaaagcaagtcttcttcgcacaatatctgttactcatggtgataaatgcctaatgtctaatgaggatgcgctcagtgagttactaaaatacaaaagagcttcaccccaagctcagatcctgtttaaagagcctgataattgtgatgagcatggtggcatggtgagaatacagagcctgaacatgggtatttaa

SEQ ID NO: 7818 - DNA, 438 bp, Oryza sativa
  Clone ID: PAT_MRT4530_14378C.1
atggcggtggcggcccggcggcagaaggggatacggcagcggcggcccggcgacagcgacagcggtgctgcggcagcggcgccctcctctccatccgatgacggtggcagcggtggagacgttagtggcggtagtggcggtggtggccatgcatctttagttacaaatttgtctgatataaaggatccaaagtcacagatatggtacagtgtggtcgtgcccaggttggctagtcgttgcttctttgcctcttgcgagattcgacgcctgttcaactttgtgttcaactttgtgttcttgatatctccgacgattaatatccctggccggctcccaggaaaagcaggcagtgtccctgtcctttttcattggcttcctaacatgatatcctcaaaaaagcaatgtgcttatttcctcatgccacctattcccaaatga

SEQ ID NO: 7819 - DNA, 2187 bp, Oryza sativa
  Clone ID: PAT_MRT4530_14379C.1
ggtggttgcctgcgggaccgtcgccgacgatgccgctgccgccgcgggcgccggagacgcggcgggcgtggtggtggctgcgtgggaggaggagttcgagagcacggtgacgctcgctgccgcgtcgcaccgggagcacgccgcgttccagccatgggagctcgccttctccgtgttcactgctgccaacagaggaccaaagatcaagccatcaattcttggaactgcttcccttaacctagcagattatgcatccgccgccgaagagaatattgagataattctcccattgtccgtgccaaatggttcagctgagtcagctccctcgctacatctcaccctgggtatggtggaattaagggcttttcaggaaacatctgatgcttcacaaaggtctgctatggccgctccattatccccatcctctggtgattctgctccagtaggaaaagatgaggtttcagttatcagagccgggctgagaaaggtgaaaatcctcactgatctggtgtcgacacgaaggtccaagaagacatcccaagatgatgaaagcagtgaagaaaaatgctatgttaacagtgatggtgctgaatatccatgtgacatcgagtctctggatgacgatttggatgacagggcacagcaagatgaagttggggattcaactaaagaggaagttgagtttgcgatcactgaaggcaaaggcgaacctctgttgaagaaagcatatggagaagagggaggtgatgatattgactatgatcgacggctgctaacctcttctgatggatctgtttcagagggatcaaggggtgaagatgggtccattaatggtatggtttcagaatttggtgatgacaacttcgttgttgggaattgggaattgaaagagatagttagccgtgatggccatctgaagctctcttcccatgttttctttgcatcaatagaccagagaagtgagcgggctgctggggagagtgcttgcacagcacttgtggctgttattgcggactggttccaatcaaaccaggatataatgcctatacaatcacaatttgacagtttaatccgtgaaggatcattagagtggagaaacctttgtgagaatctgatgtaccgagagcgttttcctgacaagcactttgatcttgaaactgtccttcaggccaagatccgccccctcacagtttcttctagcaagtcttttattggattcttccaacctgaaggtgccgatgacatgcacagatttgatttccttgatggagcaatgtcatttgatagcatctgggatgagattagcaaagcagctgagtactcatcaagtgataaccctaatctatatatagtgagctggaatgaccacttttttctgctcaaggttgagcgtgatgcgcggcacgtggttgacacccttggagaaaggctctacgaagggtgcaaccaagcctacattttgaggtgtgacaacgacaccatgattcataagctacctgagaaagcaccatctagtcctaactcaagtggaccgctgaaggattcttcaaggagctcctcggttgagcaggacagtgaagatggcactgaagagaacatactggtttcaaagggcaaggaatcatgcaaggagtatatcaagagtttcttggcagccatcccaatccgggaactacaggttgacatcaagaaaggcctgatggcgtcgacgccattgcaccgccggcttcaaatagagttccactacactgcatcatccccaaaggagattacctcagcccctcaaattctaaccatcgaagccccttttgagttctcatggcctgagccaccaccggcaatggagatcgcgctagcaccagctgttgctgttgtatagcttcctgatggtgatctgtcctgacatcagtccactgcatgcatacttgctggagattttgtgtcctttatgtttgcgctcgtatcctgcctaatatgaactaactactataggtttttgtccaggcctaggagctttctgcctgcattttgtataaataggtgtttgctcctacatatttttctcaagtgccggatttgtaaccatcaagaaccttgtgttactaatcaatgagtaatgcacatgtgttagctaaaaaaaaaaaaaaaaaaaaaaaaaaaactcgagactagttctccctcgtgccg

SEQ ID NO: 7820 - DNA, 381 bp, Oryza sativa
  unsure (1)..(381): unsure at all n locations
  Clone ID: PAT_MRT4530_1437C.1
atccggtacgagtntcanggggctcngtggatctctctccttcaggcccttgcnnccatncctgntggaccaccaactgtaangatcactggtatagatnactcngtgtcngcttangcnccaagcagcaggctatanctggtctgaaagangctgtcccncntcccctgcctgtncaaggtgcnttgaaattccncccacttganatctccgncancaaggtggnggcngancatcncgnaatcatccccggggaatccctcgccntgaactncaccctgcnagctgcaccacnttccagacgactcngtaagcncngccaacnnccntgacttnntcctaatgatcgtnaanancctgtcccctaaggtacccaccctg

SEQ ID NO: 7821 - DNA, 432 bp, Oryza sativa
  Clone ID: PAT_MRT4530_14380C.1
atggcggaggcggaggctgaccgcgacgggttgccggcgggagacatggcaggacactgctcgccgctggcccgctgctgctgcggagcggcggcgtctctaggcgagtgcggctgcggcaagcggcgggcgagtgcgacggcgggcaagcggcggctccgagagtgggcgggccgaccacctgactacccgagcccggagctccgtccgctcccgccgatacggcgcaccaccacgctaggctcctccgatgagtacgatggcagcggtgggaaccagcggcgagaagaacagtgggcaaagcgacctagggctaggagtagaggtgcgtggcatacccgctctccactccacgtcgacggcgccgtcgatctggccgtgctggtgaagtttcccgtcgcccggccgtcgctgttgccgtctggcttctga

SEQ ID NO: 7822 - DNA, 962 bp, Oryza sativa
  Clone ID: PAT_MRT4530_14381C.1
ggccgcccctttttttttttttttttgcatactaacccacatgattgctaccaaccaataaacttgaacagaacaatgtagccaatatatcaagcttaaaggtacagaactgaaatcataagcaaacatcaagtaaaaaacatccgataactaggcagcatcatcaatagtttgatgcaatgtgcacttattcttaaaggcaacatgaaaatggtatgtagcaaagtattaggtttattttctgttgctctccctctcaccagttcacatatgcagttccaactgaaactaaacaaaaccgtgaggcagagttggcttcagcatcatagggtcatctccaatactcgagggcttctgtcttttagtattggtattctttttctctcccatggaagatgtacttccaccactgccttcaccataggaacccattgccttcttcttatgtagtttacgtccgttgaatatatctgtcccgtgcagcagggttctttccataaatagttcaacttcaggcttggagcggaatgtttttttgtattcccgatgattgtagaaccaatctttgtgtccattagccctaatagaaatcgaaaccttccagtctccatctttgtagagcttgtgtaccttcaaccaatgaggaacaaaaacctcttctttacccgaaatcactttccgatttaaaacctgcacttgactgaatggaatggcactcaaaggcacaacatttagtggttgattgccaagcggaagggtcatagcagatgtattttcttcatcctctgaatctgcatcaatccctacgaaaggattgtctgtcagagtcgcatcagagtcatattcagaatcactcatcggggctatgctctttggggcctcactactcatagatctattgtcccaaaggaatagaagaatgaaagggatatagcccgggccggtctcctagccttgaatat

SEQ ID NO: 7823 - DNA, 292 bp, Oryza sativa
  Clone ID: PAT_MRT4530_14382C.1
atccatcacttaaggtattctaggctcattctgctctttccccacaaccttttctacctaagggggtgactgtcaacacaaattcttctgttaacaaaacactttcaactttattatcctccaacgtaaaaattaaattttcttttcgaagctctgagctgacctctttcaataacacaccttttcaagcttttggcaacatatacagcacaattaaccaatctctccctttcaccatggacaatgctactacaccaacgattcaatcaattgatgacagatctttatcaac

SEQ ID NO: 7824 - DNA, 2797 bp, Oryza sativa
  Clone ID: PAT_MRT4530_14383C.1
tgcggccgcccgggcttgttttttttttaacagctcacaaaatcgcaatacattcttgtttaagcaaaacgggtcattctcaaaagcaatcggactgcagtttcaagacatgtacatacatttttcgtgtccatgcaatcaactgtatttagtagtgtagaatgcactgctgtgctcccctggcctccttgggttgagatgataaaaccgcaaatcttctatacaaccatcatataagctgttacaaaaaaaaaatgaaataaaacatattctacagcgtttcttacaaacaaactccctgggcccaaaatcccataaataacctctggctggggccattgaatctccgtacatcagatggggaagggcaagcttacaaaaactgcaaggcgcttcggtctccaaaggctcacccgttgaaactacaactgctggggttttcagctaaaagctatagatgaactgatcagtgtgcaatcgggcttgaatattcgggtccactctccgaagaggttatgctggatgaccctgccgatgtcacgttgctgtgtgaaccattccttgtggattttggttggagttccatctctctttgcctctctggggctgcaggtctctgcccctcatcagctaatctcttcaggatgttcattatcgtgggaacgaatttcgtcgaaagtgataggacggctggaagaaatccattttggaactccttggcaatgtctagctgtacccacatggcttttccaacaaggaaaacaacaaatatgactcccaggtaaaggggattctttaacaatgtcatgaactcgttgaatccaaggatagccattgcggcaagtgcccatggaggtggcagccagttgttgttcctcttatttgcctcctgagcagctatggcctgtgtgacagtatattcagtttcagccttaaattgcctccataaagatttgcactggacaggtgtaattaaagttttctcctctggaaccctttcccatgagctagaggcaagtggatcgaacgattggatgctcctatctgtagtccctggccttgctgtgtcaactagagcaagggacagggtgttctcaatgttgtcaccatcctcatccaatcgaattgcagccattgtagaaagcaacttcatagaagctgaacgagcagttttagtaatggcctttatgtcctcctttccggtccacactcttggcattgagtcagcatcacggctgaatagtgttgagaacctgtccttcatccgaatcaagacccttgcagcttcctcttttgcctttgattcaacaacgctctttccgtgactctccagctttgaaagtaattctttctgagtcacctcatcaagctcaaaagatgccatggcagattcaaaacccgaaacagcagattttgtctcgcgttgaagaagcttcctaattgctggccaggtttcttcactggctgaatctagaagagcttcaactggttctgccagtgccttggtaagttgtccctcgtatttggaacaaagttcagatagttttttggcacgaactgatgccacatgcgcctcaatgtcacgcttaagcttatccttaatttttgatgggtcccatttcacttgttggatagcagcatcttcggatcctttgtcaaacttctccaagaaaaccttagtacagtcacgagcagcaacagcaaaaccctccttttctagggacttgtcaaaggactccttaaatacttctaaagttctagtccgtaaatgatccaaaatattttggtatgcagggttgacaagctgcaaaagtttagactcaagttggtgccttttcgaagttctgacaccttcatcaaaataaatagcctccatgtcatactctgataagcatctgtcaagaaggttgctgatcttcttcccaaacccaggcacgtaatcatgttgaacagcttcctcaaattgttgccactcctcatcagctgtaaaactggcaattttctcattaccgatttcctcacagcgtacagtagcgaccataactttatgagctggtagatcaaggtctttattctccttaatgaccttccaaaattgttgtgaactgaaagagaaaccagatgcagggacaacgccccgccgatctccagcaagtccaccaggagcaatagactgttggaacctatctcttaaactggcaacctgctctttgaataactcctccttttcctcataactagatagggccacaacttcgacattgaaaaattcactcagtggagtttccttgtgggcatggggtttagggacaccatcccatatcttctgaatatcttcccttagaatcggttcaagattttccagaggtgtctggaaaacagtcttcaaaagaggtttgttcgcagcctgttctctaccaatgtcatgacaccacatattgatcaacacaatatctgaaacagccaaagcaaacagtgcactttgcttttcaaaggctgtgtcatcctttggtagtctgtgaccccactactttgtggacccattattgacacaacagcatatgaaagcccacattcgcccattttaacttccttcatgaagttctccaatccagaaacattgaaaacgccatctccatcaataagctgtgttgaaaaacaggcgtccatttctgggagatggcgccggggacctcccctcccgcggcggtcggcggcggcggcgacggcaagggaagcgggtgggggaaggagggaggggagggaggaaggaaggaaaggcgtgcgtgcgtgcgtg

SEQ ID NO: 7825 - DNA, 242 bp, Oryza sativa
  Clone ID: PAT_MRT4530_14384C.1
tctacggctcctatgactactgatctagggcccagcccgcctatggcttccgacccaggccgaggaggagaacacctacagctccggctatggatctgggtacggaggcggaggagggaagcagcatgatgaggagagctacggctccggctaccgtcgcaagctctaggtcgaggagagctatggttacgcgggctatggctgcaggaagacccaggacgagagctatggtaggtggttct

SEQ ID NO: 7826 - DNA, 603 bp, Oryza sativa
  unsure (1)..(603): unsure at all n locations
  Clone ID: PAT_MRT4530_14385C.1
cccccncaaagtcgttcnacgtgcactnaccattctcatcataaccttgaaaacagtcttcaaaacaggtttgttcgcagcctgttctctaccaatgtcatgacaccacatattgatcaacacaatatctgaaacagccaaagcaaacagtgcactttgcttttcaaaggctgtgtcatcctctcccctctctcgaccatccgtgccttccaaatccattacaagagtgcatggttcaatattatgggccttcgccatccatatacctttggtagtctgtgaccttcctttgaaggcatccatttccctgaaattggtgcggaaaaggtgatttaaaagtgtactctttccactactttgtggacccattattgacacaacagcatatgaaagcccacattcgcccattttaacttccttcatgaagttctccaatccagaaacattgaaaacgccatctccatcaataagctgtgttgaaaaacaggcgtccatttctgggagatggcgccggggacctcccctcccgcggcggtcggcggcggcggcgacggcaagggaagcgggtgggggaaggagggaggggagggaggaagaaagaga

SEQ ID NO: 7827 - DNA, 516 bp, Oryza sativa
  Clone ID: PAT_MRT4530_14386C.1
gcgagtgatacctgagaccccaccaccggagaggttagggagagaggagtgcgcctggtgaggcaacaagagtaggttccattccatatcatcactaggatagcgtattttggaggctgcatctgcatctccatcgccattgattcgcattgcctccatcattttaggatgttctacctacggccttgattcttcttttggtttgtggttgtgacgaatggagcgttctgttgggattcgccgcctgctgctcggcgtcgccgccgccgatgaggaggccgtgcggactctgccccgctgtgtgcgaacgttcgtgatttgttttctctacatgctttacggcccattggttcctgatcctatgcttagaacctttactactactgcattctaaggcgaatccacccattctttcctgcgtacatacttacaaacacataacccccatctgatctcacaaacactattcctctctctttttgtctcagttccttctgtggagacttactgaccaaa

SEQ ID NO: 7828 - DNA, 1629 bp, Oryza sativa
  Clone ID: PAT_MRT4530_14387C.1
gctgttcccttcaactccgctatcccacgcgtccgcccacgcgctctaccccgcgtgcacaaaatccccaatccacccgcgagctagggtttttccgcgccgccgcaccccactcgaccccaagatcccccaacctcctcttcctaacccctaccacccttcctccccggcggcggcgagaagcagtagcccgacagcgaagatgaggccgatcctgatgaaggggcacgagcgcccgctcacgttcctccggtacaaccgcgacggggacctcctcttctcctgcgccaaggaccacacccccaacgtctggttcgccgacaacggcgaccgcctcggcacctaccgcggccacaacggcgccgtctggtcctgcgacgtctcccgcgactccacccgcctcatcaccggcagcgccgaccagaccgccaagctcctgggacgtgcagaccgggagggagctcttcaccttccgcttcgacgcccccgcccgctccgttgaatttgccattggcgacggcctcgccgtcatcaccaccgacaacttcatggagaacgtgcccaccgcccaggtcaagcgcatcgccgaggaccccgatgaccagtcggaggagtctcttctcgtgattactggcatcaaggggaggatcaacagggccgtgtgggggccgttgaacaggactatcatcaccgccggtgaggatgctaccatccgcatttgggacactgaggaatgcgataatttgcttataactgtgactggaacatgtctgaaggagtcagacaaagagcaacatcagaaaacaattacttcactttcaaaatcttctgcagattggtcgcatttcctaacaggctccttggataagtctgctaagctatgggatacaagaactctgacgctgatcaagacatatgtcactgagcgacctgttaatgctgttgacatttctcctcttcttgaccatgtggttattggaggtggtcaagatgcgatgaatgtgactatgacagatcgtcgtgcaggaaaatttgaagcgaaattttttcacaagattttgcaagaggaaattggtggtgttaaaggccattttggaccaattaacgcgctggcatttaatcctgatgggcggagcttttcgagtggtggtgaagatggatatgtaaggctgcaccattttgattctgactacttcaacatcaagatttaaacctagaagttctgaaactctgaggctgcacttgagaaaggccaaaggtataccttctggttgggcattgttgtttaatctccatcaatctccgtcgtgtggagagtctcaggtgcagtgtttagcaactgatggagtacttgtcggactttcttgttgcactggacatccagctttatagatgcttgagagattttgtacattcagcaatcgaaggctccttatactgcaaaactagcttaatttgcttttcatcattcttggttcacttcttccatatatcaagttttgggcagatgatttgtctatacgatgttgtgtttcggttcacgttctaatcatgtgcatatgcttcacttgggtgaattgtaagatgtctcatcgcatagcaatttcataaaatgaaaaatgcacggtg

SEQ ID NO: 7829 - DNA, 573 bp, Oryza sativa
  Clone ID: PAT_MRT4530_14388C.1
atggaggatgctgatgttccgcaacgtctcttgagcgacgccaacctcgaacttgtcagtgattttgaaagacaagcctacttaatgccgaaagaccgggattatgctcacacgcagaaaaacagattttgggaagacatttctggtgctccaatttgcaagaaacctaggatgaatgatatccataatcctacacttaggcttatgcacaaatggattgctatgactttgttttctagaggtgatcttagacctactagagaggatggattgattatcatgtttgccatggttaggaagattaaaattgctcctgtgaaatgtatgataaggcaatggttagagagtataagatttactgctcctgttgagtacacttccttgattactcgcatagcaaagggactaggggttattaccaatgaccaaattgcttatatttcaaccgcttgtccctgtgttgatgagagttatctagtgcaagggcatattcttaaacatggagtagatggatctttgatataccatttccccggttctacaaatgaaatcccgttgcctaacgcgggataa

SEQ ID NO: 7830 - DNA, 153 bp, Oryza sativa
  Clone ID: PAT_MRT4530_14389C.1
gcggtgcttcaccgccttccccatggcggaggccgacacctgcgatgacacagctgcatggatatatgggcgtcaactcaaccgacattgaggatactctgtaccatggcagcgcactaaaaaggccaatgctatctacaatcgtaaacggaa

SEQ ID NO: 7831 - DNA, 282 bp, Oryza sativa
  Clone ID: PAT_MRT4530_1438C.1
gatgatattagagtagtatcgggtagtttagacgtggtgtctagattacgggatatcattatttggggttatatattgcgaataagaggtgggccgctgatggcgacagctcaatacgggtattcctccgcgcctatatataatcctaagttaatttcctggggagggtattcctccgtatttagccccggttgtatggtcatgacgggctgtcgtaaggaactcggcagtcaggggtgccttcttgaagtaccaggagggcatcggataaagggtattagc

SEQ ID NO: 7832 - DNA, 1524 bp, Oryza sativa
  Clone ID: PAT_MRT4530_14390C.1
atggcggagccggactggatcctcgagagggagcgaaagccggggaggaggtggagggcgcaagactctttcgccgaccttccccagacggcttcaccctaagccagtgagccctgggcggcggcgggcgcgcgtgggcgggaatggcggagccgtgactggatcctggagagggagcggaggcagtgtggagcagatcctggagcttgacatggaggagctccaggtcgaggaggtcgacgacgccggctcatcctcctcctccgacgtcgacacctttctcagaaacactcatggggatggaggatctagaacttctgaagcacttgcattcaatacgtctgtggtttcgctgcccacctgtgatggtgaggttcatgatgccccaggcagatttgctttcttggatggtggtgtggttctctgtttaccaatgttttatcttcaaggtgtcagaaccgttttcgccttagacgccgttggatcgatgctgatgacgttcaatggggtgaagtacaaattatcgaagaagatacacctcagagaactccaagagatgcatttggccagttagctacaaattatattttcaaccagtgtggcacatcgttactcagtttgggtacatcttgtttcagacaagatgatcatgtgaactctgatcaagattgggattctctatcatccactagtacttcaagtgaacattcagtaacagatgcaagaacatactgttcctcaaatgaagatgaagatctcatgcttgaacagtcttggcagaagtatgattctgtgaaaagaaatgctgaattagagaatccagtcaagcatagcaacacaagaggcaagggtgaaccttgctttcaatccccaaaatctttaccaacaaaaaacaaaggtgctgaacaacgcaggcggttctgtgctgcttatagttcaaagctggcattgcaggctccattgtcattttggcctcgctgggcttatgaaatgtacgattcatattcccttgctcgcagagtggcagatttgtggagacaaatagttgtaaatccaagcatggatgattatgtgagaaaaccagatattttgtcatatcacattggaagcaaacttcccatgtcatgttctgtgagacaagaattgcttgagatcgatggtatctcatatcggctacagaaagagatccagctactcaaggcctttaacatcataagatgcagaaattgcctggctcttatctcaagacgtagtgatggccctgtcggtgcttatgtcaagcagttcagctgtgggcaagagatgatgacagtgtacaatgcaactggtcttgcactccgtggcgctccttccaaagctcacagtttgtttccaggttatacgtggacgattgctctctgtgctgcctgtgagtccaacataggctggctgttcagggcggagaagacaaatctgcttccaaaatccttctggggattacgcagctcccaagtttcagatgacacacaatcaggacataactga

SEQ ID NO: 7833 - DNA, 630 bp, Oryza sativa
  Clone ID: PAT_MRT4530_14391C.1
cttcgccgtctggctgatcatcatcatcagccaccgcgtcgtcgtcggcgggtactccaccggcgcctcaacggagcagtccatgccgtcttcaaggtcactcatcttcgacaagactcgccatggcgcatgcacgctccggcaccccatcaggtgcatccgcccatcctcaggattatacacgccctccagcgacatcaccggaatcgaagtgaagaaattcctcgacgccgtgagctccgcagacacgttcagtacctgctgctgtttgcccacgccatggattattccgccaagtaactcgaccaacattccaaacctaccctgaaattggggagggtatctcccgacgagggtgccgacagacagcatctggagctcaaacatcgtctcctccatccattccggcacgaacggcggcttcttcaacacgcaaaactgaaggttaaggttgtcggcgaggccggagaggctcaccatgtcatcggcggcgccggcggcgctcggatagctgaggagtgacttcccaacgaagctgccgcgaaatccagttgcttccctgccccggagccggagctcccgagcctgctcgaccttggtgtaggtgtacgagatgcgcagcgacgccga

SEQ ID NO: 7834 - DNA, 772 bp, Oryza sativa
  Clone ID: PAT_MRT4530_14392C.1
cccacgcgtccaaggacgcaaaaaaaaaaaaaaccttccccaactcacaacaaaacccccccaaacctcgagcgcggagagcatcccacaccacccgtcccatcgcaatccaatccacgagcagccatggcgagaggaggaggaggagggcagcgagagggcaacgcgctgaagacggcggtggtcgtgaccggcggcctcgtcctcgcctggttcaccatggagtccgcgttcaagcccttcctcgaccgcctccgcggcgcgctcacccgcaacaccgaccccgcgcgcgaccccgacgaggagaactccgctgccccggcggacagggccgtcgaggagcccgccgcggcggcggccccggtggaggagggcgagggcaagggggtggagctggaggagaagggggaaggggccgccatgaccgagtagaagaagaagaagaaggcgacgtgacgttcccgactggttccgctactaaaatatgctgtgaattatgttttgtgcttcccaatcttgtcctgaatgatgcaaaattttcaattctaataccattatctgcacctgtagtactcaaaaaaaaaaaaaagtgtgcttgcgttagtttctagtgacaattactgctgctcagctaatatgtagtacttttttgtgggtgcacttgttccccttgaagctgcttgcgtgtgctattgataagaaaattttagtagaaaaaaaaaaaaaaaaaaaaaaaaaaaaaaaaaaaaactcgagactagttctctctctc

SEQ ID NO: 7835 - DNA, 1701 bp, Oryza sativa
  Clone ID: PAT_MRT4530_14393C.1
atgccagtaggatggaatgatacaaacattgttctaattccaaaagttaaaagtccatctgttctcaaagagttgcgtccaagcagcctttgtaatgtagtgtacaaaattatctctaaggttctagcaaaccggctgaagtcaatcctcccagagatcatcttagacacgcaaagtgcttttgttcctggaagactaatcactgataatgtacttattgcctatgaagcaacccattttttgcagaataagagaaatggaaaagatggctatgcggccatcaaattggatatgtctaaagcctacgatagagttgaatggcctttcctactccatatgctgcgaagacttggctttgatgaaaaatggaataggttgataatgaattgtgtcacaacagtaaattataaaataaaggtcaatggtgactatacggaagtgataaagccagacagggggctgcgtcaaggtgatcctttatcaccatatttgtttgttatatgtgcagaggcattttcagcagcaattcaggcagcagaagatgactctcttttacttttaaaagctactgaatctgtagcaaacgagatgaagcaaattattctggactatgagaggtgctcaggccagattgttaatagagataaatctgtagtgatgttcagttcaaacatggatgaggaggaaaaaaaggataaaatcatgaagccaaagagtcaaggaggtttggggtttagagacctacattccttcaatattgctatgttggctcggcaaggttggcgccttatccaaaatcctgattctctttgctcaaggctgctaaaggccaaatattttcctaactgtaatgttcttgatgcgcagtcaaggaaacaaatgtcatattcctggagaagtattctaaagggaatacaattactaagaaaaggcgtaatatggcgggtcggaaatggagagcatataaacatctggtcagacccatggctgccaagagatatgagattcgtcacaacaagaagaggggcatctttaattacaagggtgtgtgagctcattgatccaacaacaggccagtgggatattgaattaatccagcagattttcaatgagaacgatgcaaaaatcataacaagaataccactaagggaaggtcaggaagattttattgcttggcaaccagatactaaaggaattttctcggtaaaatcagcatacaagctacatgagaagatcctcaatgaattgcaaggacagataggagaaggtggttggggtgtagtggccagagatacagatggatgtcctctcatgatggctgctgggaatttacagaatttgcataatgctaatcaagcagaagctttagcatgcatccaagctttgaaattagctaatgatatgggaatgggccacattattgttgaaactgatgctcaagctctgaaagcggctttgttggatgaaacacatgatagaagtgtaaacgctgttatcattagagaggccaaatttttgcttgcaatgaattttaatgtccatcaagtcatgtattgtcctagagaatgtaatcgtgctgcgcatgagcttgctaaaattggtgcttctctgggtccacgaagccaatttgtttggcttgaaggattcccggatgatgtttgcaatttggtagctagtgattcagctggactacctgcttaa

SEQ ID NO: 7836 - DNA, 256 bp, Oryza sativa
  Clone ID: PAT_MRT4530_14394C.1
cacccacaccgactagatacagcggtaagatccccactgtggccacggtttggcggacaccttctgctgtaaaaaaataaaaatggagcagtcataaggtcccctcccgttacggggcacggcaggcgcctaccggttaggctgcatccatcatacacgttaagatgtcaaatacggcatacatacagtcgggtctctcggtggagacagcgctagacattagcgctttgccttttaaaaaaaaaaaaaaaaaaaa

SEQ ID NO: 7837 - DNA, 205 bp, Oryza sativa
  Clone ID: PAT_MRT4530_14395C.1
taatgtaccttatggactcagtggaaatatgaccatatctaacaacacatatattccccttgattccaacaagactgagacttataactggagaaacacttcattggcttacaacagcacaaacaagactgaagattatagctggagaaataacactgctgtgattttaaacaacagaaccaatgtgacaatagcagtgaatttc

SEQ ID NO: 7838 - DNA, 504 bp, Oryza sativa
  Clone ID: PAT_MRT4530_14396C.1
atggcggagaactcgaggcgctccccgatggaatccgccgacgccatagtgttcctcgtcggtggtgcgctcgctggagatctcgccggagcaaacacaagtgcgggagggggattccccaccagatgcgcaatgcgtgggagacggcgatcctcgacaattgtccacgcgcgtatcgactcggcttgggcccaaggggatccaagtggaggagcacaattcacggtgattctcgccgcttcgcgaatgtggtatgaggttggtggcaaggcatggagtatcagggtggaggatagcgagggaggttctagcccaagcaggcgttctgcagcgacggcaagcatccttcggagccatctccacaaggcggccatgaccaagtggactggggtaactagcacaaggcctcgggaggaggagaaggtggaggtcaagctctgcccatggcgtccaagacaggggggatgcagtacaggccagtgcagagggcgtcgacagccttag

SEQ ID NO: 7839 - DNA, 298 bp, Oryza sativa
  Clone ID: PAT_MRT4530_14397C.1
atggagatcgccgcccggccctcccctgttcagccgcgactcgtcttggcggcggcgcaaggaggcaaggagcggaggagacaacgagagggactttggaaggcaggagctgacccgacgaagagcgaaggcgctatatcgggctctttcttgatagatctatcgactgcatatcgacacaacccaatatgctgcagaatactaagctatgctcctgggcctaaaaatggagaccgcactgggaatcggggaactgaggcctggtgtaagggtccattggagtcacctgggagccctg

SEQ ID NO: 7840 - DNA, 267 bp, Oryza sativa
  Clone ID: PAT_MRT4530_14398C.1
atgtcgtcctcctccgccgccgccttagccagaggcaaatccggaatctctgccgctaaattcgaagcgtctaagggattgggcgccaagccgaagcgatccgcctccgccaccggcagcagagggaagaccgagaagaaggtctactcgctgccaggccagaaattcgacccccctgaggagagagagcctctcaggatattctacgagtccttatccaagcagataccctccagtgagatggctgaattctgcttcaacgcatga

SEQ ID NO: 7841 - DNA, 445 bp, Oryza sativa
  unsure (1)..(445): unsure at all n locations
  Clone ID: PAT_MRT4530_14399C.1
cggacgcgtgggttggttttccatttcaaatcaaaacactgttaatttaatcgtgccccagctgttcgtgttgctctgactttaattgtgcttaaaactcttggtcgctgtagtaatattagcttcatttccctggtgcggctgcctctgcagacatatgtcaaagacgttcttgaattgaaggactctctgaccattgtttcttcactgcctagtttcattctagttcttgatcttggcttctttcttgactgctatcctctttctaattcttagccaatatttgaacttgtttgaagtttatattggtcaattgaaggtggtatgaccttatgagcagttgaccaccaggttagatgtaaattttcgcagcattggatgaatgacatatgaagtatgcagtaaacatgtcacanaaaaaaaaagatagacactacaaaaatac

SEQ ID NO: 7842 - DNA, 523 bp, Oryza sativa
  Clone ID: PAT_MRT4530_1439C.1
cacgcgcgcacatcaatatgaaactgtagaagatacttcaaagctattgtttggcggctctgcaccaatcggtcttggcgagaacacatagataaggaactgtctcatctacatgaatgctaaaatagtcaggaacgcgatcattgcaaacactcaggcggttcaagactctgatcaccctgaatagggatactacatacggactggaattgtggtgatcctgaataatgcaaccatgaacgaccggaccgtcatttcaaagcatacataggccttggaatgtgacctgcactcatcttaaaactggcattcattgatgtgggatgttgatgcatgagacagattcaagactgatagcgcaagctccatggcgaactggtgtttttggttaagctatatacctatatgcaataagctgcctgatcaactcgcacatccttgtggggacttcatgtacatgtactaggtaaggcttggcatgacaactctcttattggtctccattacgaggatggtccacgta

SEQ ID NO: 7843 - DNA, 2520 bp, Oryza sativa
  unsure (1)..(2520): unsure at all n locations
  Clone ID: PAT_MRT4530_143C.1
gcacgnaggaaaaaacctagagcgccttcctccctctccgcctcactctcctcctcctcctcctcctgctgaggctcccaaaaccctagctcccctcgatctgatgccgtgagcccgtggcctcccccagcctcgccatggaagaccccgtggctgccccttcctcctccgtcgcggcggcgtcggcggcggccgcgcctagggttgcgccggtggcggccccgctccctctcgccgcgcagcaggcgccagccgccgcggcggggtgccggaggcaggtcttctccgtggagctccggcccggggagaccaccatcgtgtcgtggaagaagctgctcaaggaggcgggccacgcggccgcctcgccgccgcccgccgcgccggcggtggcggtggcggcgtccgacccggcgttccctgcgctccccggtcagcctggtgcggtgcatcctccagaaagtgatccaaaggatccagcacaaccaaatcggttcaatgctgttattgagaaaattgagcgcctttacatgggcaaacatagtagtgatgaagaagatcttgatgatgtaccggatgatgatcaatatgacactgaagattcttttattgacgatgctgaattggatgagtattttgaagtcaataatttgaggactaagcatgatgggtattttgttaacaaagggaagctggaacagattgaagctggtacatcagcaaatgttgcaccaaagaaaaggagaagaaaagattcatcaagtggttatattgaaaacaatcaggttgctccagctgattatccgagcattggcaatatgcctggaaaatccgctgcaagaagtggtgcacatgttgggaagaaattaaccagtagcaacataggttcttatggcgagtattaccatgatgacaacagagtggtgaagaatataactggtgctggagtccacaaaaggaaatccatggatttttccatgggttctgatactgcagcatacacgaagatatctagtaaggatatgccgtatgcttcttcggagctcaataaagctgcaggactccagcctactgattacactcataggtcaaaaactgctgaggcatatgactatgcctattcagcatacagggatagggatacttcaatgcaacttgatttccaacaaaaaagagcctatactggggaaaatcgagatccatcaaacaaaattcatcgaaaagaaaaacatggaatgggtgaattttccggcatggcaacgactggtgcactgtattctggacaagtaatgcagccaatcacttctagagacggttctggtaccaaacctaaaggcactagacttgagagagctattcgggatctgcaaaagattgctgctgaatacagaccaccagctatcgatattaacgaggtagatccaaatggccaggtagcagttaaaagacggttgcctccagaagtaaaacaaaaactagccaaagttgcaaggctatcggcaaaccatggaaagattcaagaacatgagttaatggatcgcctcatgggcatagttgggcatcttgtgcagcgaaggacactcaggagaaacatgaaagaaatggtagaatcaggtctgtccgctaaacaagagaaggctgataaattccaacgtgtaaaaatggagatcaatgaaatgatcaaatcgcgtgtggctgccaaggccaaggtcaatgaacaccacagtggatcagctgatgattttcagattgcgaatgatgaaaaaagatatttaaaaggaaagtctgtaatggatgctgctttggaggacaggatctgtgatctgtatgatctgtacgttgagggtatggacgaagataagggccctcaaagcaggaagttatatgtggagctggcggagttgtggcctgaaggttccatggataatgtcggaatcaaagatgcaattaatagatcgaaggagcgaaggagatcattatacaaccagcagaaggttcgcaacgaggagagaatgaagagaaaaaggttggctgcggcagctaaactgcaagatggctaccctgttgtaatgcaaagcgcactgatccagcaagtggcacaaccacccataacaaaccctgtcgccacataccctgtgactgaccagggatcaaaaagttttgacagagttcgtgaaataagtgcgagtgcaaatcctgacgacatcaaccggaacactggcgagatgaagaagaaaaaaagaaaaccagaatctgaccttgtagatacacaagctaacgccatgaagggcccctctcagcatgtagagaagaacaagcctcctaagcgtgctgatgaggcagttgaaaccgtgctttgtctcccgttctatgaccaacaaccgagctgattgttttggtgtatgcattgatgaaatttcaatcctcctaggcgcttgtcggatgctgtaacaaatacccttgtggagaggatgccattggtccttcgtaatttttatgatctatatagttccttttccagcc

SEQ ID NO: 7844 - DNA, 1009 bp, Oryza sativa
  Clone ID: PAT_MRT4530_14400C.1
tgatgatactttagaaagtattcgatccgctttgaattatagtgaatcggatggatcagaaactgatacccatccaatgctccacacattccaccatcttaggtcagctacaagttcatcgcgatcctctcaagacggggactccaatgacagcagtattgaagatggaaatgaaaaccaagagggcaaggatgacaatgaacatgaagagaaaaacggtaaagtcgtggcatggaccgccgatgatcaaaagaacatactaaatatagggtgtttggagattgagaggaaccagaggttagagaacttgattgctcgacgcagagcaaggaaatatattgataggaacctgattgactttggcagcagtgactccctcccaaaaattgaggagctctcaaagttcaatgttcaaattccagccatatttgctcctaggaaaaatccatttgatcttccctacaatgaagataacttcccggaatccgctccatctgcgccattgaatatgttaagtaagttcgatcttccatttgacgaagcaaatgagagtagctccactggtggagctaactcaaaccatgtggactctactactgttttttctcaatcacaaaaagatacaatgtttaggaggcacgaaagcttcacaccaggagcatcattccttagtgacttttggcaagatacgcagccttctcggttcagaccatactttgtgacagaaaaaatggctaatgagggaatctcagttcctaatcttgagggagaagcaagtgaaaagagttctgttgaagactcagatagcacttcttcagttactgatcaagaaaaccataaactagtattggaggatagcccaaaccaaaatctcggacctcagatgagtcaaatggattcttccctttcctaagtagataactattgttcaggtaatactcatacttctgatgtcgaaatgagtatggatggagaggattcaagggagaaagtagtgtataaaatagtc

SEQ ID NO: 7845 - DNA, 659 bp, Oryza sativa
  Clone ID: PAT_MRT4530_14401C.1
ctgaactcagattcagttgatgttgcacctccaacagattaggaagatgattgatcttgttgtttctctgatgagaaaccgtgctcctgactctatctatggcgtagcctttcacaagtatcctatttgggcaagcaaaagtaccagtataatagttggtagttcagagcactgccaagttaaagatttgccataagttctcatatgcttaagctcagcatggatatagcacaattggttcttacagtgagaagtaccgaagcatgcggatggtattcgcatataactacaggtctataatattgtcttagggtgtatcttatctaggcaagcaaaagtgccagcataatagtttatagtccagagcactgaagttaaagaattgtggtaacttttcatgtgttgaacctcagcttggttataacacaattggtacttaaattactgtttcaaacatttaggcattcatgtcattaatcacatagcaaaactatttgtgactatccattgtccttacaaattatttggtgatattgtaaatactaagtatccgcgagaccgtgagtctgtatattccagaatattgtatataataatgcattactgttaattttaaaaaaaaaaaaaaaaaaaacctgcagcccgggggatccactagt

SEQ ID NO: 7846 - DNA, 877 bp, Oryza sativa
  unsure (1)..(877): unsure at all n locations
  Clone ID: PAT_MRT4530_14402C.1
ctccttttggttgctcctcctcatagtaacctgtttactatacagtcacccgtactatacatatactcaattactaaattttactggccattctatttttctcacggttattccccgttttttccggatcgcaggtcggcgacgggcggtcgagcggcgggcggcctccggcttttgcttcctcggcgtgccgggtggtaggcggtggcgatggtgcgccagatccgatctcaacgcctccgaatggcagtggctggataacccctgattttttactccaatcggaggggtgtgttgcggccctagcaatttgccggcgttgtcaaggctcccctccatgaacggcagctccatctccgcgtaggcccatgtcaagaggcgctggaggcagatcgacggcctgatgatagcgcatgtctccaatgccagagatccctcactcattcgctgcctggagtactggaggcctggtcaatgcagctgagggctcctccgccggcagtggggatgccaccagatgtcagccttgtggctgtctgcttggagtgtcaatgtcgaagaggaggagcttcattcttttttgtttgattttcaatttcgtgctccaatgatctgcagctcatccctatctcgatgattacatcttctccccgcagtgagtatttccggcagcgatttcttctgtgttcctacgcctaatagagatttttggaatcggngaattagtactaatatttccgtttgattccacaccagcccattcagagtcaatttgtgatgaccaagtggagcccctttcgtctactgtagtttgcgcagtacctctcagctgaatcaggatgtttttttcattagattttttttctccattctgcaa

SEQ ID NO: 7847 - DNA, 319 bp, Oryza sativa
  unsure (1)..(319): unsure at all n locations
  Clone ID: PAT_MRT4530_14403C.1
tgttgcgactgttggcacccccaggttgattgacctacgagtgtggtgacgttgtggagcaatgcttgacacaattgcaaaccaagaggtgcaagtacctatgaggacatcgcagcttgattaggctggctaaacatgttagatatgatgatgcaatggtatggctagctatgtttctgtatacacattagggcatcccactatgctcgtaattctgtatgcaatgactgaactatatgctatgctagcttgtaggacattatatttgccggaaccnttgggaagtgtctgtttagtccaaaaaaaaaaaaaaaaaaaa

SEQ ID NO: 7848 - DNA, 260 bp, Oryza sativa
  Clone ID: PAT_MRT4530_14404C.1
cacgaggagagagagaactagtctcgagtttttttttttttttttttttctgacaaaggttgcagctgatagaatgattacttattccagcagtaacagccagacagtgagaaagtaactcacattattataaagaggtaaaagcactatacatcttccttattttgagcacaacttacaaatcaattgaccaagatcaagaactctaaccccaggaaaaggtatgtcgaaaacaaaaataacaaaaggttatcttcatt

SEQ ID NO: 7849 - DNA, 182 bp, Oryza sativa
  Clone ID: PAT_MRT4530_14405C.1
tgtgcgtgtggtaccaaataattaccgtggcttcctctttgcatctccagataacgagtagcgagcaccatccagatgtggggggggagacatagagcagcccatgatgaccaggacggacatcctgatatgtccaatcttgctgatacgaagcatgctcatgttcttaggaacagacggaa

SEQ ID NO: 7850 - DNA, 1815 bp, Oryza sativa
  Clone ID: PAT_MRT4530_14406C.1
ttaaaaaaaaatctggccaggctgacagcgtctggtctcccccgcgaacatcagtgcgctcccaatcaccaaatgttcagcgatgctgcgagccctatgaaattgataccatccatcggcacatcctcctctccctctccagccatgccgctggcttgcagctcccctgcgcccaccgccgctccacttcccctccccatgtctaccactatatcttcctctgtgcactcgcacagcaatgctgagcgacaaattatcttcattgccatgctccagcgcaagcctgcattctattctcacccttgcagttgatttcacttgttttagcaacctggcccccagttgaagatttcttcgacttccctcctgcttctgcaaagttgcccacgagtccaccaaagagcaagccataaacaccagatcagtaggatcagctgggagttttttctcaaaacaagctttattacgaaatttccagattgtccatattattgccgcaagacccactaccacaagttttttcgtaaatttatcaatcttgttcatccaagatccaaacagatcttgtctattcaacacagaatttatattaagggcacatttcacaatattccataacagtctagctaaagggcaatcaaaaaagaggtgttgtaaagtttctgtttgatcacagaattggcaattagccttcccttttctccagccccttttgaaaagattgtcctttgtgagaatcttgtttttttaaatagccaaataaaaattttgattttcaaaggcactttgaaatcccataactttttatgcgggaaaatcacctgttgcatcttcagagctgtgtgaaaggatttcacagtgaatttcccatctttggtcaaactccaccggagtgtatctctggttccatcttccagaaccaaatcaccccaggattgcttaattttcagccaattcctcagtttattccccaggacatcccttctgaatttaatagagtcaatccccccctgtttcacatctgccacagtaatctttttttgtcaaagtaatattgtacagatcacggaactgttcagccaaaggtttacctcctatccaattatcttcccaaaacaaagtattccttccattgcctactactttagtacagaatttataaaacacttctttcacatccataattccttgccagaaatgagagactctaggtttcactttcaaacctgacaaaactttgttgtgacagtacttttttgtgagaatatcctgccaccaacccctctcattttccaacctccatatccattatcccaacatagcacagttcatgatctctagatccaaaattcccaaacctccctggtccctaggtgaacaaaccaaaggccaattaaccagatgatattttcttattccctgatcctcctgccataaaaatcttcttctgaaataatccaacctttctttgactccttttggcaatttgtaaaaagagatcatatacataggtgtattgcttaggcttgagttgatcaaaatcaacctccctccaatagattggagtttgccctgccaacatcctagtttgtgttccattttgttttctgtccccttccaatctttgttcagaagtcttctctgatcaataggaattcctaaatatttcaggggtaagttgcctatctcacaagtaaaaataccactataaagctcctgtttgtcttgggcttctccaaaacaaaaaatttcacttttattgaaatttatcttcaatccagaaagttgttcaaacaaacagagaatgtacaacag

SEQ ID NO: 7851 - DNA, 728 bp, Oryza sativa
  unsure (1)..(728): unsure at all n locations
  Clone ID: PAT_MRT4530_14407C.1
ttttgttttttttttttttttttttttttgtttagacacatagacactggatgctttatttctcattaaaatggaggatttgcaccatttccaaaggaaatcagcagcagctttcctttgtcccaaacagctttgtatggaaaaactcacacagctaagtcaacaaatccttaggtcagtacagaaataacaacagccatcatccacacgacgaaaggccacaatccttagctcagcagaaaatagggttcaggagtcaggactatccagcttatcactttcacattaagtagggtaactgtatatgcttagacaactgacacttttcagcttgcggtagcaccaaccaaccaaacaatgtttttcttggagtagtgaacaacgttgagtgaattgaatctttctcatcaagcagccaaaatgcctaatccatcatttcattggcttggggccatgccttgacacctttgaatggaattgggtgtttggaagaaacttgagtaaaaagatcttcaaaagatgcgaatgcacgcataagctgtaaccgcagttgttagtagcacagatacagcattaaccgcatcattatccaggatagtcattccagaaatcttggtgactgtagggccccggtttatgggncaaccttcttccggaacactgcagtatccactggaactgggagtntngggacccaacacnggatcatcagantgacaagnaaantt

SEQ ID NO: 7852 - DNA, 411 bp, Oryza sativa
  unsure (1)..(411): unsure at all n locations
  Clone ID: PAT_MRT4530_14408C.1
ctgcttccgaattccgatcggagagcagctggactccggtgagggatcatggaggcggtgagagagcctcctcaagcccaagccgacgccgcancagcagcttcgcgagtggcagcgccgcctccgcaacgagggccgcaacatcgagcgccagatccgagatgtgcagagggaggagaagaaggtggagaagtccatcanggaggccgccaagcgcaacgacatcggatcggccaaggcgctggccaaggaggtggtgaggtccaggaaggcggtcaaccgcctctacgagaacaaggcccagctcaactccatctccatgcaccttggcgagatcgtagctactgccaggactgttggccatttatccaagagtactgaggtgatgaaacttgtcaataaccttatgaa

SEQ ID NO: 7853 - DNA, 902 bp, Oryza sativa
  Clone ID: PAT_MRT4530_14409C.1
tctttttacaaattgccaaaaggagtcaaagaaaggttggattatttcagaagaagatttttatggcaggaggatcagggaataagaaaatatcatctggttaattggcctttggtttgttcacctagggaccagggaggtttgggaattttggatctagagatcatgaactgtgctatgttgggataatggatatggaggttggaaaatgagaggggttggtggcaggatattctcacaaaaaagtactgtcacaacaaagttttgtcaggtttgaaagtgaaacctagagtctctcatttctggcaaggaattatggatgtgaaagaaatgttttataaattttgtactaaagtagttggcaatggaaggaatactttgttttgggaagataattggataggaggtaaacctttggctgaacagttccctgatctgtataatattactttgacaaaaaaagattactgtggcaaatgtgaaaaaagggaggattgactctattaaattcagaagggatgtcctggggaataaactgaggaattggctgaaaattaaacaattctggggtgatttggttctggaagatggaaccaaagatacactccggtggagtttgaccaaagatgggaaattcactgtgaattccttttacaaagctctgaagatgcaacataagcaggagggaagtcgaaaaaatcttcaattgggggccaggttgctaaagcaagtgatctcatttctagtaaaagaaataggggcttcatgccctagttcatatatatatatatatatatatatatatatatatatatatatatatatatatatatatatatatatttatttatttatttatttacttctgctttcttgatattcagttcaatgtctgtaatagc

SEQ ID NO: 7854 - DNA, 164 bp, Oryza sativa
  Clone ID: PAT_MRT4530_1440C.1
gtcgtagatagttcgcggcggagcatgccgagatccagctggttccagctgccgtagccagcgtgacctttgacgccaatgtacctcacgacgacagcctgctccgatgtgactggctcgcaccaccgtgcagacgtcgaccggagcagttccaaggtcagcga

SEQ ID NO: 7855 - DNA, 915 bp, Oryza sativa
  Clone ID: PAT_MRT4530_14410C.1
atggaggcggtgaagagcctcctcaagcccaagccgacgccgcagcagcagcttcgcgagtggcagcgccgcctccgcaacgagggccgaaacataggtcgacagagcagagggaggttgctgagtgttgactccggatctagcgcgagtgtgcagagggaggagaagaaggtggagaagtccatcagggaggccgccaagcgcaacgacatcggatcggccaaggcgctggccaaggaggtggtgaggtccaggaaggcggtcaaccgcctctacgagaacaaggcccagctcaactccatctccatgcaccttggcgagatcgtagctactgccaggactgttggccatttatccaagagtactgaggtgatgaaacttgtcaataaccttatgaaagcaccagaggtggctgccaccatgcaggaattcagcaaagagatgaccaaggctggtgtaatggaagaaatggtgaacgatgctgtggattcagcgctggacaatgaggacattgaggaggagattgaagaggaggttgacaaggtcctctctgcaattgctggggagactgcctctgagcttccagacgctgtcaggaaggaaaaggagaagatgaagcaaccttcaacaagtgaacctgcagagagaactgctattgcggaagccgtcgatgacgatgacgatgacgagcttgaacagataagggaaaggctcgccaaagtgaggtcataaaagagtaatgatgaaaagcaatcactggtttgttttactgtattatactccacttcagaatgtatgtgtgtcatatcagaaatagaaaccccttcttgttattaacaaactgatatacctgcaacctgcattcactgatacaaaattgttcaatctcagttgcaagggtaattgtgtgccctg

SEQ ID NO: 7856 - DNA, 1902 bp, Oryza sativa
  Clone ID: PAT_MRT4530_14411C.1
atggcggcggcggcggcgcaggcgcaagcgcagcaggcggcgagctccgcgtccgagggcggcgtgcaggacgcgcagctcttcgacgtcttcgcgcaggtcggcggcgtcgtctccgtgcgcgtctgcagggacgtcaacacgcggaggtcgctcggctacgcctacgtcaactacagcagccccgccgatgctgcacgagcgttggaaatgctcaacttcactcctatcaatggaaaacctatcaggatcatgtattctaaccgtgaccccagcttgcgcaagagtggcacagcaaatatttttatcaagaaccttgataagtcgatagacaacaaagctttgtatgatactttctgtgtgtttggaaacattctttcatgtaaagttgcaacagatgcttctggagaatcgaagggctatggctttgttcagtatgagcgggatgaggcagctcaagctgctattgataaactcaatggcatgcttatgaatgacaaaaaggtgtatgttgggcctttcattcgtaagcaggagagggataattctccaggccaggtcaagttcaataatgtctatgtaaagaacctgtctgagaatactactgaagatgacttgaaggaaatctttggaaaatttggaaccatcactagcgctgttgtaatgcgtgagggagatggaagatccaagtgttttggatttgttaactttgaaagtccagatgatgctgctcaggctgtccaagagctgaatggcaagaagtttgatgataaggaatggtatgttggaagggcacaaaagaaatcggaaagagagatggaattgaaagagaaatttgagaagaaccttcaagaagcagcagataagtatcaaaacactaacctgtacctgaagaacttggatgatagtgttgatgatgataagttgagggagctttttgctgagtatggcactattacttcctgcaaggtgatgcgggattcaaatggtgtcagcagaggttctggatttgttgcgtttaaatctgctgaagatgcttcccgagctcttgccgaaatgaacagcaagatggttggcagcaaaccgctctacgttgcgcttgcacagcgcaaggaagacaggaaagcaaggctgcaggcacaattttcacaactgaggcctgtcccacttgctccttcagttggtcctcgcatgcccatgtttccacctggtgttcctggagttggacagcaactgttctatggtcagccccctccagcgtttatcaacacacagcctggtttcggcttccagcagcctcttatgcctgggatgaggccaggtgcaggtccaatgccgaactttatcatgcctatggttcagcaaggacaacagccgcagcgtccggctggtaggcgtgctggtgctggtggaatgcagcaacccatgccaatgggtcagcaacagatgatggctaggggcggccgtggctatcggtatcctacaggacgtggcatgcctgatcctgcaatgcatggtgttgggggtggtgtgatgccatctccatatgagatgggaggcatgcccatgagagatgctgctgcgtcacagcctgtacctattggagcattggctactgcactggccaacgcagcccctgatcagcaaagaatgatgcttggtgagaacttgtatcctcttgttgatcagctggagcatgagcaggctgcgaaggtgactggcatgctgctggagatggaccagactgaggtgctgcacctgctcgagtctccagaggctctcaaggccaaggttgctgaagccatggaggtccttcgcacggcccagcagatccagacgaacgcgacgcctgaacagcagcttgcttctctgtcgctgaatgacggcgtcgtttcctcctaa

SEQ ID NO: 7857 - DNA, 350 bp, Oryza sativa
  Clone ID: PAT_MRT4530_14412C.1
acactatttaagagctatgacgttcgatggaccccttccttaggttggatccttttgttcgggcgcccctgaggtgggcgacggccctgtactttgtgctgtcttaagggactcatgccttaggtctggggcttccctgcaattcccgctaagaaaaagaaaggtatttacatgcgcaaactcctgtaaagaaaaatgaatcctataaaatcgttgggtaaacataatcagatgttttctcggggcttgcaccgatgatgggtataaacatttaaacatttttttcgaggtacaacttacaatcacctaactaggatccacagggtggggcaaatcacctaattagcccc

SEQ ID NO: 7858 - DNA, 725 bp, Oryza sativa
  unsure (1)..(725): unsure at all n locations
  Clone ID: PAT_MRT4530_14413C.1
agagctatatttgaccccttcatttctcccttgaagcaacagaagccagagctgcttggcctcccttatggttcatatgagaagaggacaattcatgtctcaaagtacctgaggtcaggaccaaacccatcggtatcagttgaagagcaaccgagacccgtggaaacaatccgtattgagtcacattaccccacagataactttggtggcatggacaggttcttcgcagcgcaatcctcgccaatgaggccatcttcttactacacaccaccttatgacaggccaaattatccacctccatcaccccaggagccagtgaggaactcttattacatgtcctatgacaggccaagctatccagctgcatcaccccaggagccaacaaggacttcttattacgcgtcgtatgataggccaagctacccacctccgtcgcctcaggagcaggaatcatcacagtgggacttcttctggaacccattctcatcgctggacagctntgcgtatccgcgacctcggagtagctatgacantgtggtcaccgacgatgaattggcacgattacagcgtgtaagagaggaggaaggaatccngnacttgaagaaagagatgatgagtgtcaacacatgaacaggtgcaccagaaagaggaacaagtggatgacgatgaccatgatgattctgatgatgacgacgatgatgacgatgacgatgacgatgatggcg

SEQ ID NO: 7859 - DNA, 2524 bp, Oryza sativa
  unsure (1)..(2524): unsure at all n locations
  Clone ID: PAT_MRT4530_14414C.1
cgcccccccggcgcagttgcagttgggaggcaaatctctctcccaacccttatcaaaccctaaaccgaaaaaagtttaccccccaaaaaaatccgcaaaaacaaaaaaaacccaaatcggagatggcggcggcggcggcgcaggcgcaagcgcagcaggcggcgagctccgcgtccgagggcgggtccccggcctcctccgccgcggccgctgcggcggcggccgcctccttcccggcgacctcgctctacgtcggggatctcgacgtcagcgtgcaggacgcgcagctcttcgacgtcttcgcgcaggtcggcggcgtcgtctccgtgcgcgtctgcagggacgtcaacacgcggaggtcgctcggctacgcctacgtcaactacagcagccccgccgatgctgcacgagcgttggaaatgctcaacttcactcctatcaatggaaaacctatcaggatcatgtattctaaccgtgaccccagcttgcgcaagagtggcacagcaaatatttttatcaagaaccttgataagtcgatagacaacaaagctttgtatgatactttctgtgtgtttggaaacattctttcatgtaaagttgcaacagatgcttctggagaatcgaagggctatggctttgttcagtatgagcgggatgaggcagctcaagctgctattgataaactcaatggcatgcttatgaatgacaaaaaggtgtatgttgggcctttcattcgtaagcaggagagggataattctccaggccaggtcaagttcaataatgtctatgtaaagaacctgtctgagaatactactgaagatgacttgaaggaaatctttggaaaatttggaaccatcactagcgctgttgtaatgcgtgagggagatggaagatccaagtgttttggatttgttaactttgaaagtccagatgatgctgctcaggctgtccaagagctgaatggcaagaagtttgatgataaggaatggtatgttggaagggcacaaaagaaatcggaaagagagatggaattgaaagagaaatttgagaagaaccttcaagaagcagcagataagtatcaaaacactaacctgtacctgaagaacttggatgatagtgttgatgatgataagttgagggagctttttgctgagtatggcactattacttcctgcaaggtgatgcgggattcaaatggtgtcagcagaggttctggatttgttgcgtttaaatctgctgaagatgcttcccgagctcttgccgaaatgaacagcaagatggttggcagcaaaccgctctacgttgcgcttgcacagcgcaaggaagacaggaaagcaaggctgcaggcacaattttcacaactgaggcctgtcccacttgctccttcagttggtcctcgcatgcccatgtttccacctggtgttcctggagttggacagcaactgttctatggtcagccccctccagcgtttatcaacacacagcctggtttcggcttccagcagcctcttatgcctgggatgaggccaggtgcaggtccaatgccgaactttatcatgcctatggttcagcaaggacaacagccgcagcgtccggctggtaggcgtgctggtgctggtggaatgcagcaacccatgccaatgggtcagcaacagatgatggctaggggcggccgtggctatcggtatcctacaggacgtggcatgcctgatcctgcaatgcatggtgttgggggtggtgtgatgccatctccatatgagatgggaggcatgcccatgagagatgctgctgcgtcacagcctgtacctattggagcattggctactgcactggccaacgcagcccctgatcagcaaagaatgatgcttggtgagaacttgtatcctcttgttgatcagctggagcatgagcaggctgcgaaggtgactggcatgctgctggagatggaccagactgaggtgctgcacctgctcgagtctccagaggctctcaaggccaaggttgctgaagccatggaggtccttcgcacggcccagcagatccagacgaacgcgacgcctgaacagcagcttgcttctctgtcgctgaatgacggcgtcgtttcctcctaagcataacgacgacagcaatttttgatccatatctcagttatcttatctatctagaattgaaaacgacttggttacttggtttattggagttttagttttattggtagttgaactaggcatttaggcaatgcgcgtggattgggtattttgtttgctcggatcttttattttgctttataagttatcatatggattgctactttatgtcaaaaaaaaaaaacttttattttgtgggtaatgcatgatttagcagtcttgatctgcaccaaatgaagcaaactttggctactttgtgggcttcaaaaaaaaaaaaaannnacaanctaaaannnncccttnggggggggcccgggccccaattcgccctattgggggcgatttacgccccctcactgcgcggcggttaacacgta

SEQ ID NO: 7860 - DNA, 431 bp, Oryza sativa
  Clone ID: PAT_MRT4530_14415C.1
catcataggtaagatcaaagttttcccctttttgacatcaacagcgtattcttttgtctgtagagattgtatatttgttttcattcatagaggttacatcatatccaagagagtgccaaatctgtcatgtagcatttgtctttttttttacccggcctctacatccaactggatatatgcaacctttttaaattaagaacttagccctcaaataacccaatctgaaattcgctcctatagcgatttaaattcaggaccttggggtgctactcaggttactgcaaccattaggctacatacccttttacatgttgcatttgtctagattattgcatttataagcagtaaatctttttcggagcaaatagcatttgtgcagtgaccaagggtactatcttcttgatttgcttgcagtctcccattgtttgctg

SEQ ID NO: 7861 - DNA, 238 bp, Oryza sativa
  unsure (1)..(238): unsure at all n locations
  Clone ID: PAT_MRT4530_14416C.1
gcatttccgggccgacggggttccgttttcatggaatgcgcagaaggagggaaatgcagggagaaaaggggacgctgggaggacaagccgacggggaggagggggcgaccccacgacggaaaggagaggggcccgcggggggaagggggagtgcgtncagtggggctggagagatggatgtcgccgggaggaaaggagggagggggatcaggaggaaggaggaatcacgccgccttag

SEQ ID NO: 7862 - DNA, 136 bp, Oryza sativa
  Clone ID: PAT_MRT4530_14417C.1
gaaagacttaacttaaactgaactgagagggcatttgccaaatgaaagattgatagacacctgattcttttatacggatatcttgaacatgctgcaatggaacataaatcatgtcattgactggatctcactttct

SEQ ID NO: 7863 - DNA, 1769 bp, Oryza sativa
  Clone ID: PAT_MRT4530_14418C.1
ctgaggaaaaaacacatcatcacgactcaagcgccagtatatactctcgaagctaacacatatatatgtctagcaattgctacttgcttacatgcattacccaaaaaaaaaaaagacagatatctagagatcgaccagatcctgatatagacatatatttatctgatcattcctttataatatataagtaaccctgatcaagaactcgtggagatcagattaaggaggagttttaggaggggagacctatcgatcgatctcttgtagtctagtacggcggccggctgaaatgccccattaattagtaacgaagttgtcatgcatgcatgggtgcttgcagttaggcgttattctatcttccatgcctgaccaccgtgcaggctgaacttcttgagcctgccgtagaacatgacggccatgagagtgagcttcccttgtttgctccacttccctgagaagccaacccacaggtctctgcagctgccgtcgggcctcacctgcctcgcgcagctgtaccccgtgctgaaccccacattgccatacgcactgataacctcgacgacgatgttgaggacgctgtagttgatggggtcgtcggcgatttgccgccgctccgtgatgcagatgacgacgatgaagatggctaggcacgagagcggcgacatgagcagcttctgccatatgctgctgctgctgctgccctcctgcccggactgtgctcccgtttgctggtgtttgtcttggacaggtacgaaagtggtgtaaggtggcaggtacatcatcaccacgtagagcacgacgacggccgacgacacggtggagaggtcgagcaccatctcaccggagtgcctcgagttgaccgccatgaagagcgcgccgacgagcttctggcccgcggtgagcccccgcagcccgtcggagccccactccatggcgcagaagagcgccagctgcgccaccacgagcacggccacggtgagggccaggaaccgcgtgcgcgagctcggcaacaggtggtggtagccctcgccgccgcccctccgccgccggatcaggagctcgccgagctccggccacccggtgaccctctcgagcgcggcgatggccagcctgaggaagaccgggaagagcgtgttcccgaggaggacgtgcggcatgacgaggaggaggagccccgggaacgacctgaacgacaccatcccttcgttcgtcggcacgaacccgcagttggcgaacgtcgagacgacggtgaagatggcgaacgtgtgcgcgctgatccccttcccggcgaccaccgcccccgcgccgccgacggcgctgaggtacacgacgatggccgtgtacccggcgacgtgcaccaccgcgtggtaccccatcaccacgaacatcagtagcctcgtcgtcgtcgtcttcgatgccgatgatgacgacgacgtgtgagtagtagtgcaggtgcagccgcgcttgttccgacgtcctaaccctagctctacctcgtcgtgcgtcgtcgcagtggtggtagggttgacgacgacgacgtccatgggaggagcgagctcgagctccactagggtagacgaaggtgacgtcgttggtggtggtggtttgccactgccaccatggtcgtcatcatcaggtaaggttgctatcatcttggaggagtacttggcgttggtgaagtagaggccaaggatgctggtgaagacctcaccaccaagcagcatgaggagggtgatgaggaggagctgggagttggagaaggactccat

SEQ ID NO: 7864 - DNA, 163 bp, Oryza sativa
  Clone ID: PAT_MRT4530_14419C.1
ctgtttttatgttttcttttcttctgtactctggaattcttggtcctctatgtgcctgtgtgcctataatagatcgccgaccacccttatgaatgagcgaattctgctatctgtccgaaattggtatccgaacggaggcacgcacaatatccacagccctcaa

SEQ ID NO: 7865 - DNA, 392 bp, Oryza sativa
  Clone ID: PAT_MRT4530_1441C.1
gtcccacaacccccaaaattaattaacggcccaaccccaacgggaagggcccaaaagggccccaaaaaatttaaagggggaggccccccccaaaaaaaaagcaaaggggaaaaaaggtatgggccaaagggggggcccaaccttaggggggcccccgttccaaagggccaaagccccctttctaaaagcccaaaaaaaattttggaacctccaatttttttttcgaaaaaaataaaagggacccccccaaatcccaaacgccaaaattttccccccccccacaaaaaccaggtgccagccaggggccccccagtgggctttaaacccaagggccatcaaggggggagaagaaaaaaattgccgacaaacgggggggaacagggggcccaggg

SEQ ID NO: 7866 - DNA, 966 bp, Oryza sativa
  Clone ID: PAT_MRT4530_14420C.1
ctagacgtcaccatcccacaaatcttcaactgatttgtaaggcccatggtcagagatgaattccaatccaggcaggcccctcagttggggcagctgactgatcctctccctctcttcatctgtgagctcccagttgaaaatgtccagattttccttcattctcttctcattatatgtctgagcaagcgtcttgcccttggctccggcgatctcctgcaggacgccggagtccatcacggcggcgctgccccacggcgtgcccttcgcccccagcggcgagtacccgcacagctgcaccccctcccgccggcacacctcccgcagcgtcctctgctgccacatcgggttcacctccacctggttcaccgccggccgcacggcggcgagcgacagcagctgctccagcttcttggcggagaagttgctgacgccgatggcgcgcgcgaggcccaggcggtggcactcctccatgccgcgccacacgccctccatgtcgaacgacggcaggatcacctccttggggaacgggaagtcgtagttgcccggcgtgaggctcaccggccagtggacaaggagcaggtcgacgtagtccatcccgaggttgcggagcgtctccctcgccgccggcacgacgcggccggcgtgcaggtcgctgcaccagatcttggaggtgacgaacacgtcggcgcgggaggcgatgaggccacgccggacggcctccgcgactgcctcgccgacgcagccctcggtggcgtaaatcctggccgtgtcgaagtggcggtagccgagctcgatggcgcggagcatggcggcggtggtgtcctccgaggaggtgaaggggaacgccgccgtgcccatgccgacgcgcggcatggtctggataagctcgctcgccggcacctccgggatggtggccattgcaaccgcctccttgttgtcatcggtggcggcggaggcggcggatcc

SEQ ID NO: 7867 - DNA, 585 bp, Oryza sativa
  Clone ID: PAT_MRT4530_14421C.1
gcacgagggttgagagaaagttagggtttcgaatttagtttgagatatttggtgagaagtgtagttggtgcactttgtaaacactagttgatgcaataaagtcgagattcaatctatatacttcgagtttgtcatccaccagtatatttctgggtttcgatagtctaaccgcaagtaaggcaacggtctgatcggtgggagtacggtggtcgaactacaggtgtataggcggtctaaccggcggagcaacggtagtctcaccggcggtaggtggacggttcgaccgggcgatacagcttcgtcatctactccgttcgaggcatacctcgataagttctccacagaccctttccatgcaaagaaaaacaagaactgaaatactcgtaacagacaatgaagtgatagccaccgctactgcctcctacataagcttcatgtccgccttgaactcgggactagggctacaatcaggagtaggcacaagagcggcggtagctcaataaggaaagccacacccggcgggtggctagtcatgggggctatagctgtgagaattgcgcgcgctctctctcttgtgaacgggga

SEQ ID NO: 7868 - DNA, 2296 bp, Oryza sativa
  Clone ID: PAT_MRT4530_14422C.1
atggcgaggaggctcgccgccgcgctgtgtctcgcggtggccgcggtgagcgtggccgtggcgacggcgaggttcgtggtggagaagaacagcgtgaaggtgctgtcgccgcggtcgctgcgggggcggcacgaggcggcgatcgccaactacggcgtgccggactacggcggcacgctcaccggcgtggtggtgtacccggcggacgcgaggctggccgacgggtgcaggccgttcggcgaggcggcggcgaaggcgctcaggtcgcggtcgcgccgccccgtcgtgctcctcgtcgaccgcggcggctgctacttcgcgctcaagacgtggcacgcgcagctcgccggcgcggcggccgtgctggtggcggacggcgtcgacgagccgctgctcacgatggacagccccgaggaggagacccccgacatggcgttcctcgccaacatcaccgtcccgtcggcgctcgtcaccaagcagttcggcgacgccctccgcgccgccgcctccgccgccgacgacgaggtggtggtgcggctggactggcgcgagtcgatgccgcaccccgacgagcgcgtcgagtacgagctctggacgaacagcaacgacgagtgcgggccgcggtgcgacgagcaggcggcgttcgtcggcgcgttccgcggccacgcgcagctgctggagaagcgcggctacgcgctgttcacgccgcactacatcacctggttctgccccgacgcgttcctggagacgacgcagtgcaaggcgcagtgcgtcaaccgcggccgctactgcgcccccgaccccgacggcgacctcgccgccggctactccggccgcgacgtcgtgctcgagaacctcaggcagctctgcgtccaccgcgtcgccaacgcgcgcaacgcctcctggctctggtgggactacgtcgccgactaccacctccgctgctccatgaagggcgaccactacacccgccgctgcgccgacgacgtcgccaagtcgctcggtttgccgatggatttgatcgacgagtgcatgggggatcccgacgccgacgtcgagaacgacgtgctcaagacggagcagattgttcaggttggacatggcaccagaggggatgtgacgatcttgccgacgctggtgatcaacaatgtgcagtaccggggcaaattggagagcacttcggttctcaaggcgatttgtgctggattcaaggagtccactgagcctgatgtctgcctgacaccagaaatggagactgacgagtgcctgaacaacaatggcggctgctggcgagacgagaagaccaacatcactgcctgcaaggacactttcaggggaagaatttgccagtgccctgtagttgatggtgttcagtaccaaggagacggctacacccactgcaaaggttgtactagactactgctaatgtttcaccttcaattcagtgttcttcagaggatcatttcatttcagctcatcttgcacctgaacatggctgaatttcctactgatgtttctgctccactgcaatcttttcagcggtcggaccagggcggattcagacttgagtgggtgcaagtgcccacctgggttcaagggcgacgggctccattgcgaagacgtcgacgagtgcagcgagaagctggcgtgctcctgccctcactgctctgcaagaacacatggggttcgttcgactgcagctgccatggcaacaacctgatgtacatcaaagctgaagatacctgcattgcgaagaacatgtcggcgtttgggtggctggtgacgacgctggtgctgtcctgcctcgccggcgccggcgtcgccggatacgtgttctacaagtacaggctcaggaggtacatggattcagaggtgatggcgatcatgtcgcagtacatgcctctcgagggccagaacggcgagaggctgccgctgagagaggaggcccagttgcagaggttgaacattttggcaatgtccattcgttttgagacgccaagacacatgacagcgacgaatgccgcgatgtacatggcgaagttcagacatcatacttgatgacaggggttcttgcagtttctgcttggtgcttttgtagagaactgaaccagataggttcagagtttctggtagaagaacgggataagtctatgtcaagccggtgcaccgcaaagtgcagactagacaagtatagctgctgtaatgcagatttgttagaatatattgtgaataatagatcaacaatcttcctaataactttgaatcttgaacgcctgatttgtggcatcacttcatt

SEQ ID NO: 7869 - DNA, 1086 bp, Oryza sativa
  Clone ID: PAT_MRT4530_14423C.1
atggcacccacgccgttgttcctcctcctgctgctcaccggcgttacggcggagccggcgcacccgggctacgcggagggcgatggcagcagctgcgacgtggcggcggtagcggtggcagagaggcgagaggagttcgacggcgggcggatcgtggacatcagccactactaccgggaggagatgccggagtgggagtcggcggacggcaccggcggcgggttcctgcggctggtgcggtcgatgcgcaacggctccgacatcgccaacttctccgagctccgcctcacggcgcactccggcacgcacgtcgacgcgccgggccacgtcttcgaccactactaccacgctggcttcgacgtcgacacgctcgacctcgccatcctcaacggaccagcgttgttggtcgatgttcctagggatagcaacataacagctaacgttatggaatccttgcatattcccaaaggagttcggcgaactctctttcgaactttaaatacagacaggaagcttatgtggaagaaagaatttgatacaagctatgttggtttcatgaaagatggtgctcaatggttgattgataacacagacattagactagttggcgttgactacttgtcagtcggagcgtttgatgaatgcattcctgctcatttagtttttcttgagaaaagagttaatgtctgtgcatctatcagctataaacttatatatattactattgtaattgactaccaatgtaacagttggatatatgacaccaatgctacctccgcaaacattgattgccactaaggttacgtggttatgaaggttccccggcaagaggtattgtaatcaagtcaacacatgcttacaaggtttacatagacatcttatatgtgttgaaatgttgaatggtgttgatggttgtcaagtcagatgcatccacctaggacctatgtatatgacaaactatgcatagtatttgacacatatatatgattgtaaaataagatcatgttgccttctaacaggttaatgtctgtgcatctatcagctataaacttatatatattactattgtaaaaaaaaaaaaaaaaa

SEQ ID NO: 7870 - DNA, 381 bp, Oryza sativa
  Clone ID: PAT_MRT4530_14424C.1
gtgaatttcgatgctttgcttgcttgcgcaaatcagcagatgtctttgatggtgagtcccaacaaccggtgcatcatcgaggacaaggatgatttggttgctgaggatacaaaccacgcactttagttcagttgtgtactccaatttgattttttttttgaaacgaagggttttttttattattttttttacgatgcttgcagcttgcagggtacctgtgcgtgcactgtgtatttgtctctgagaagttactgtgtaggaggtgacatgtaagatgctctaacatttttcactcttcactgatcctacagcttgatgttccaatgttctaagtcacttggacaagaacgacatggctgagaggattagaagagtatgggt

SEQ ID NO: 7871 - DNA, 318 bp, Oryza sativa
  Clone ID: PAT_MRT4530_14425C.1
acccgttcttttcctccaagttagcaccatcatccaagctctcatactattgacacggacccgcatgtggacatatgctgagcgccctggatctatgctggtctttggtttctaggttgcacagctgattgctacactgattgatgtgaatgctgactgggcggcaaccctaattaaaagcttttcagggggactggcaggtaatgggtggcagtacgatatactcatcttctgagcacccgccaatttcagtttcatacccacgaacgctgtgcgaagaaagggatccaatgcatgtgctgatccagatgaacgaac

SEQ ID NO: 7872 - DNA, 250 bp, Oryza sativa
  Clone ID: PAT_MRT4530_14426C.1
ttgacgcgcggggccgtattgctttcgttgtgtaggctagatcgccgcatcagcaccggatcaccaccatgtcatcaccaatctccccaagattattcaattcctcacttggattatactactaatctcgcctccccccgcgcgattaatttatcgccatggcgccatcagcgagcgtttacttctgccagatccagcgcagcatctctgctattctccagcctcgcgggaagggagggggaggccctat

SEQ ID NO: 7873 - DNA, 212 bp, Oryza sativa
  Clone ID: PAT_MRT4530_14427C.1
accgaacgctacgagtagcgaagctttgcattctctaatcgcctcgtaagacgcaaatattatataagactcctactcggtagaccatcaccttccaggttgattactcccattcgactgacacacgcaaaggctagagatccaggaccaggagggcatccctccgtaccaacaaggccttatattctctgtcaagcagccagaggatgggc

SEQ ID NO: 7874 - DNA, 1010 bp, Oryza sativa
  Clone ID: PAT_MRT4530_14428C.1
ccacgcgtccggtaataaagccagatcaggagcgatcggctccgcggcgttcgtcgctgtaaaatccattgttcatcgtctccctcaccggcgtttgtgttcgtgagtgtgagagtgttcctgggctgagccaacagtggagtggcggtggtagcttgtgacagtggctataagagaggggagataggaaaattggattcggtgggttgaggcagtgatgtggtgagaggagaaaggaagagggttaccggcagagaagattgcctggcaatagggattggctggacatggcagacagaggagagctcgaagagattgatgcatagtggggagaagggatgtgatgatgatgaaccgcagcagcagcggtgcctacggggaggaaggagcagagaaggttgcttggtcggctaagctgagcgctcgtgctcagctgtgcgttagagctatgcccgtcgctcatgctcgccgccacgtcgtcacttccgccccttcccccaatagcgatggggaatggaggagagagaggggagatggggaatcgctgaatcagagatggggaatggaggagagagaggggatgtaggccgctgcagtagttgtagcaccggagttatcttcgtcgtcaccgccgccgccaccaccaccaaaccagccctgcctccgctggagaagggagagaaggagatggacgcaaagctacggaggtggcacacgcggacggcgaggatgggcctttcgcagctgacacaaaggggacgatggccaccctcgtaaccgccggcggctccaacacggggattcagttcgctgttcgcgtgcttctctgctatgctcaccttgccttgcttgcaacaccgctgcaccaagctacaaccacttgctcgctaccaagttcactttaggagagagaagagttggctgctaatatatggggtccaagtgcgctccccacgtcagccaaaactagtcactgtactgtcaagggatcaaagttaacatggtattgt

SEQ ID NO: 7875 - DNA, 359 bp, Oryza sativa
  unsure (1)..(359): unsure at all n locations
  Clone ID: PAT_MRT4530_14429C.1
gcgcaggagnggtctggctgacttgatgctggacgccacgcaacagtttgctcaaccgtttaccctcacccgtctatttaactggcatcggtggttgtttcccgccgaggaggcccgcttttccacccacggnttgaacgtaggcgcgctaagggnnnatgagcccatgcaggttgtgtcgggncgacttggaccgacccactgtgcatttcgaggccccaccccgccaagggctagagcagtcgctggacgatttcatcgaatggtttgaagccagtcgncaatnatgcggccccttnacccaattgcttgcgcgnagncctggngnatttntggttcggtaaaccttgaatcccttc

SEQ ID NO: 7876 - DNA, 336 bp, Oryza sativa
  Clone ID: PAT_MRT4530_1442C.1
cgagaaaaagaatcgggggctaactttaaaaaacggagatgggggtttaacattgcttattggcccgaaaaaaatgccaagactttagagcttaaaagagggtctcctttcacgtaaagcaagcaagatgatgagggctggcctttaattgttttactgggccggcctttgccccagcactgatatatcttcgccccttttcccgaggtggttcatctcccaaaccttgggccccccgtagcccaccgccccctcgccggcaaaggctccggcaacaacaaaggtgacttaaaccgcgttgcggcccataaccacccgggaaagcgcgtcccatag

SEQ ID NO: 7877 - DNA, 591 bp, Oryza sativa
  Clone ID: PAT_MRT4530_14430C.1
ctgacatgaggttttttcatggagcgtttttttacgcctgtctgcctgctgttttttttgagtgcctgcagcgcgcaaatttccaccccattgccgactaatccaaagatcgacagtggctcaatcggacccaattatcaaggagcccggccgaagcaaaccatccggcggagatccgttatggtcgctataccctggtgagcacagagcccactacggagcaacgtgatcttctcgctcaaataattgatgtgagcataccgtccaaccttaatccctcggtagaggaggcgatgcattacgtgctgcagcgctcgggttattcgctctgccctaccaccgaaccagtaaagacacttttcactcggcctctgcctgcagcccattaccgactcggcccgattgcgttacgcagcgcactacaggtactggctggctccgcctggcaactcacgaccgatgaggtcagccgttcggtctgcttcgaacagcagaaagctgatgtcggcatcgtgcgggctacaccagactcgtcccatcaggcggaggcacgtccatgaaagcctcgacgtttcaaaccataattgttgg

SEQ ID NO: 7878 - DNA, 124 bp, Oryza sativa
  Clone ID: PAT_MRT4530_14431C.1
gaaggagaagtgcgttaggagcgacgtcgaatgcagtagtggcagtagggagagtggcagaggtggtgcaggtcaggggtggctctccggcgagataagctacggcggcttgacagaggtcgcg

SEQ ID NO: 7879 - DNA, 295 bp, Oryza sativa
  unsure (1)..(295): unsure at all n locations
  Clone ID: PAT_MRT4530_14432C.1
gcacgaggcgaagaacgcgcgccataggggttgatttctgggaaatcacattagaaatggctgacagccctgagatctcgtcaacacagcttcatgtacgatgctagatcttcttccacatattattactaattcatgctttcgtcatgtctgcaggcaacatgatgccgtgatcgatgcgcgcgcctgggagctagcactgccattcccttccgtaatcccctttcctatccaaattcttgccagaccgtacgtttgtgtgtaatanatcaaaaattcgtgtgtaatanatcct

SEQ ID NO: 7880 - DNA, 372 bp, Oryza sativa
  Clone ID: PAT_MRT4530_14433C.1
atggtgtgcgagacgagggcggcgaaacgggatgcggcctcggcttccatcaacacgcgggagctagggcgagctccggcgctgaacctctccggtaaccggctcaccggcgagttactggaggggttcttctcgctggcgctgctcgagaaggtggatctctccgggatgccggcgagcgccttcctcggcacgacgctctgcggcgccctgctcgccccgtgcgccaaccccgcgctgctgccgtcatcgctcgggaacagcaagggcggagggaagctcacccgtggcgcggtcatcggcatcatcctcgacgtcgtggctgtgctcatcgtcatgcttgttgggaatagtcccacgttgaaagtttag

SEQ ID NO: 7881 - DNA, 322 bp, Oryza sativa
  unsure (1)..(322): unsure at all n locations
  Clone ID: PAT_MRT4530_14434C.1
cctccggtttctccctccgncgtcgaaatggtcgcctacaggttccatcagtaccaggtggtgggtcgcgcgntcccgaccgcctgncgatgagcaccncaagntctaccgcatnnagntctgngccaccaacnaggtccgagncaantcnaagttctncgtacttcctgaggaagntgtcagaaggtnnagangagcaatggncagatgttcggcatcaacgagatctttnagcgtaacacctaacaacgattcaagtnnctactggcatatggactgtggttancaggagtagancagnttaccacagcntgtnacaagg

SEQ ID NO: 7882 - DNA, 641 bp, Oryza sativa
  Clone ID: PAT_MRT4530_14435C.1
ccacgcgtccgggaggagagcgacgccgtggtgatcggcggcggtccgggcggggacgtggccgccatcaaggcggcgcagctagggctcaagaccacctgcctcgagaagacggggaacgctcgggggcacctgcctcaacgtgggctgcatacgctccaaggctctcctgcatgtcgactgatatgtaccatgaggccaaggcgggtttagctcaccatggtgtcaaattctcaagtcctgaacgagattggcctgccatgatgtcacagaaagacacagcacacgctgggctgactaaggggattgaaggccggttcaagaagaacaaggacgagtttagcaaaggattcggaaagtcgtgtcccattcacaggtagctgtcgacttgctcgatggcggtaccactactgttaatgggaagaacataatcattgccactggctcagatgtgagatcactccctgtagttacaacagatgacaagaagatcgcgtcatctactggagctcttgctctttcagaaataccaaagaagatcggggctattggagctggatacatgagctgttagagatggggttctgtactggaacaagctagggtctgaggtcactgtcgttgaacacgctgctgacatt

SEQ ID NO: 7883 - DNA, 860 bp, Oryza sativa
  Clone ID: PAT_MRT4530_14436C.1
tcaattccaagaatctgacgactgtgggaaccagctgagcccgccttcgtccagctgcatcaggtcttgcaagccttcccagagctggtcccctgtctcgccgccgccgccgccgccgccgcctcctcctccctgcggccaccgcgtgtgctctacttgctcgtcggcgtctgcgctgcgcggcgacggagacaatgtgtcggacttggcggcggcgctggcgtcgccattgctgtcgtcgtgcgcggagagctgctcggggaacgggaagttgagcttggcgcgcgggccgcggaactcgacggcggcgcggtcgtacgccctggcggcctcctcggcggtgtcgaacgtccccagccacttgcgcaccgctcggcgagggtcgcggatctccgcagcccacttcccccatggccgctgccgcacgccgcggtacttgttcttcttcttcctcctcctcctctgccccgccgcggcgccagccgccgccgcggcggccgccgccgccaccttctccgcgccatcgaacgacaccaccccggactccccggcgaagaactcgcacccgaggcactggtccatcccgcaaaccccgcacacctccgcgcgcgccgccgggaacacctccggcggcggcgtcctgtagccggagatgacatggagcagcgtcgcgacgatcacagagtgctccctctcggccgagatcgccctcccggcgaagggacgcggcggcggcagcggcggcggtggctctgcagtggcggagctcggcgaggcatcgtcgatgtggccgtcgaatcggatcatgtactcctggttgcctcccatggcggagatccggttggtcatgtgagttatgt

SEQ ID NO: 7884 - DNA, 392 bp, Oryza sativa
  unsure (1)..(392): unsure at all n locations
  Clone ID: PAT_MRT4530_14437C.1
gaatcaataacaagaaacggaaaaagcgcccaatcgccaaccgcctctcgcgggggggaaacagctatgaccatgattacgccaagctatttagaagagggtacaagctctcgctctctctcggagtctcgggaatcctctcccctccaccacagccgccgccgccatcaccggcgctccgagccctacctccctcccctcccctcccctcccaacccggctgtctcatggaccggcaagcccaggactacgcggccgcggccatggcgtacgcgcaggcgcagcagcagcaaccgcagtacggcttccaccctcaggcgccgccgccgnnnnnnnnnnnnnnnnnnnnnnnnnnnnnnnnnnnnnnnnnnnnnnnnnaattcgccctatag

SEQ ID NO: 7885 - DNA, 457 bp, Oryza sativa
  Clone ID: PAT_MRT4530_14438C.1
aaaccacctcccctgcggtcacatcttccaccgcgcctgcctcgagacatggcttgactacgaccacgccacctgcccgctctgccgctcccgcctcctcgccgactcctcctcgccgccggccgccgccgccgccttggcccggacttagcgagtggattcgattcgactcgattcgattctccgacgagccgccccgcgccggctacgcgccaccgtctccgggtggcctccccgtgtgggcgtaggaaactagagagagagctctttgccttttttgcactttcacccctcactttgtcccttttttttccgtttcgggcggtttgtgcctgtaccgtgtaaatacctcgcagcaagagagtgctcctacgggtgtagcactttttgtgagctttgtgtataaaaccttctcggaatagcaaccaaaaaaagaaaaaatcgcatttacactgtt

SEQ ID NO: 7886 - DNA, 471 bp, Oryza sativa
  Clone ID: PAT_MRT4530_14439C.1
atgggggcgaaccctagctcccgccgctgccccttcccttccttcccctctcctcgccgtcgccggagcgcgccgccggagtccgagcggccagccgggagggcagcggcgaggcctttccttggcgaagcggcacctcagcgcgaggaccgcggcgcggcacgcgagaggccggagcgccggcatcgcagacggcggcgaccggcggcgcggctggtgttggacgacggcggcgcggccagtggcagccgctgcggtggcctgagggagcagcggcaacacccgtggtggcagcgacggtggctgaggcagaggcctcggagctcgtcgcagcggtggcatcagtggctggacgacggcagtagcggctgctgtggcacggtgagaggaggcacggtggtgcgttcggcagcagcggctgcagtggcggtgaccgcggtcaccgaaggcatggcggcctcggacggctag

SEQ ID NO: 7887 - DNA, 519 bp, Oryza sativa
  Clone ID: PAT_MRT4530_1443C.1
atggcgcggcggcggcaagggggaggcggcaaccggctgcagcagccggcgacgtggaacggcggcgggcggccggaggacagcggcgcgcacggggacggcgacgcaccccaagaggcggcgagctcaccggcgaccgaggaaggaggagctctggcggatttccggcgaagaggggcggcggccgaggtcctcctcgtccttgcggacctgagggaggtaacggcgcgagtcgacgtcgaccgaagcggcggcgcgacgcggctggagtcggcggcggcggcggagagaggtggttcgcgtggctatggcgctacggaggtggagaggggaaatggagcggtggccgagtttgcccgggcggcggcaaagctggcggtggcggcggagcagtgcggcggccaccctagcgacgggaaacggcggccggatttcgccggagtgcggcggtgcaagtgctcggcgcggggagagcgagggagggcgcggcggcttggggaaaatgggggaaaaggatga

SEQ ID NO: 7888 - DNA, 264 bp, Oryza sativa
  Clone ID: PAT_MRT4530_14440C.1
atggcggctgcgtcggtcacggcgaacgcggacgagggtggcagcggcggaggtcatggacgaggacggcagctgttgagggcggcggcagtggtcgatggcgtggtggacgcggacgagggcggtggcgacgacgacggcggcggacgcggacacagacgaaggcagcagcgtcgctctgatgtgcggatgagtactctccgtctctccgtcgcatatcgagaatgcctattgcctgtgatgccttctatgtttcggttctga

SEQ ID NO: 7889 - DNA, 1460 bp, Oryza sativa
  Clone ID: PAT_MRT4530_14441C.1
atgcacggctcggatctatcgaagctgattcaccaagagaggccaaagcggaacttcaagagcaagcaacgcatgattcagccatcaattagggtttaccggcaacataccttcgagatgctgatcctgacaatgcctctagccaccggcgaagagcgaggcaacgactgccgacgagatggaagcgggtcgcgagggcaaataatatgcattatatttcttcccgaggacccaacgatcgcgctcatgaaggtaaaatgccgagctggcgcatcgggatatgtacgtgttgtgaacgcccttagagcaaacatacatgcaactttagaccgtagattttgtgtcgatgattctcatgaactgcaaatcatatgccacgaccgctgttgccggcttgccgccctcgtctgcgttcgccgtgaccgacgctgccgccttcgtccgtgtccgcgtccgccgccgtcgtcgccgccgccgccctcgtccgcgtccaccacgccatcgaccactgccgccgccctcaaccgctgccgtcctcgtccacgacctccgccgctgccgccctcgtccgcgttcgccgtgaccgacgcagccgccatcgtccgggtccgctgtcgttgccgccgccgccctcgaccgctgccaccgccctcgtccgcgaccgtcgccgccctcgtccgcgtccaccacgccttgaccgctgtcgcctccctcgtccgcgtccgctgccgtcgtcgccgcgctcatccgcgtccgccgagcacggcggctggcgcgcggggatgggggaggataagagcggatgttgtgatgcgatggaggaccgcaccgcgtcgagccgtgcgctgcgcaacaccaactggaccgatgtcaacgatccgcctttcaccgtttccacggaacgcgcgagtggcccatgtgaccggcccatgccgcggtgccgctgcgtgggggagaagtcgagccgcgggcaaggggggggagacccatcccgtcacgccgtcacgctagtcgacacgccccgccgtaacgtgtccatcgcactgcagttgtcttcctcgtcgatcgatctactacagctatgcctatccgcggcccgcggccgggcactgcaagcacaggctgcgatatttgtcatcgatggcttcctagtacacaacaaattaagctggctgctggcgcatttacaagcgtcagtccagcattggcgctttggcagcgtcgatctatccaaccaaaccttatcatcgaattctcaaaggctagcatcgaaatggatccgccggaacggatcatatattcatatatcagcatcgaatttcgtctccataccggactttacactttcggcagagcttttcagagtcatttctgaatctaccaatctagcacggcacctcgacggctcgactggtgtttctccgaagccatcccctatgaaccttgtgattattgctgac

SEQ ID NO: 7890 - DNA, 207 bp, Oryza sativa
  Clone ID: PAT_MRT4530_14442C.1
atggagaatagatggaacggctctgcccaggccgacgcggcggagctcgaggaccgacgcttcctccatcagcagtgcggagctgttcttccatcctcctctatcgccatagacaacgccggcggccctcctcgcctgatctgggcggaggcggtgcggctcgctgatgaccacgacgaggacagcgacggcggcggctactcctga

SEQ ID NO: 7891 - DNA, 313 bp, Oryza sativa
  unsure (1)..(313): unsure at all n locations
  Clone ID: PAT_MRT4530_14443C.1
gccaaaccagttggctatttcattgatnatngtattatgttgcctggttgtnattattgatcaatggatcaagcaataccttacatttctanaaaaaannaanataaaaaaatnncacagnctaaanaatnntataaatnnnccnccagggggggcccgntacccaatncnccctatattnattcgaattacaatncactgnccgtcttttnaaaacctcgtaacnggggaaaaccctgccgttncccaacttaaccccttgcancatatccccctttcgccagctgngnttaataccaanaaagcccacacc

SEQ ID NO: 7892 - DNA, 5338 bp, Oryza sativa
  Clone ID: PAT_MRT4530_14444C.1
atgccgaaggtctacggcaccggcgtcttcgagttccgccacccgcgcgccgccgagtacccgctcccggccgacgtcccggcctccgccgcgtcggcgcccgacaaggccatccccaccgccgcggcctccaccatcacgctcctcgacatccagcgcgaccgcctcacccgcgtcgccgccgagcactggggcgcgcccaccgcgggggccgccttcgacgccgccctcgtcagggagatctacgcgaccgagctccgggtcgagggccgcggccgcaagaccgtcccgctccaccgcgtcatgatcctcgaggtcagccagtacctcgagaactacctctggccaaacttcgacccggccggcgcctccttcgagcacgtcatgtccatgatcctcatggtcaacgagaagttccgggagaatgtggcggcgtggacctgcttccatgaccggaaggatgctttcaagggatttttatggcgggttctcaagctaaaggaagaggatagggagcttaatatggccgagaaaacaaactacctgttgttcatgataaatgcgtttcagagtttggaggatgaactagttcgagaaaccatacttcagttagtaagcctaaagttgtggcatactctttcttttggacggcttcagatggagctttgccttaaccctgaattgattaagaagtggaccaaaatcaaaagaaaagaagctaaagaagcaaaaaaggcaggtcaaacctgtgatgcttcagaaatgctcgagaatagattccttaggaacttaatagaagaattcctggagattcttgattcgaaggtaatattgtccagtcaagatggtggggatgaatctgtgttgaatgtatcactcagtgggcaggttgatgattattgtgtcttgtactgtgagagattcatggagtttttgattgatatgttgagccagcttcctactagacgatttttaaggccccttgttgccgatgtagctgttgttgctaagtgtcacttaagtgcactgtatacccatgaaaaggggcgtctttttgcgcagttggttgatttgctgcagttttatgaaggctttgagattaatgatcattctggaacacagctcagtgatgatgatgtcttgcaagctcattattcccgtttccaagcctttcagctgctggccttcaaacaagtgcctaagttgagagatttttccttgtgtaatattggttcaatccataagcgtgcggacttagcaaagaagctgcttgtcttgacagatgtagaactgcaagatctggtttgtaataagtttttttatcagctgttattgttatttctcaagttaatttcagaggaggacccatgcagtggaagacgtgattttcttattgaggtcctggttgccttttttgagaagcgtcagtcacagaaagatgcagtaaatgcacttcctctttatccaaatgaacagatcatgtgggatgaaagccttgttcctagcattaattattctggagagggctgccttgctctcccaaaactcaatctccagtttttaacacttcatgattatttattgaggaatttcaatcttttccgccttgaatcaacatatgaaattcgtgaagacatccaggaagctgttcctcatctgcatgcctatattaacaatgagggagacactgcctttcgtggttggtccaggatggctgttccaatcaaggaatttaggattactgaagtgaagcagccaaacattggagaagttaagccatctgctgtaactgctgatgtcactttcagcatctcaagctacaagccacagatcaaatctgaatgggatgctttgaaggaacatgatgttttatttttgttgtcgatccgtccatcttttgaaccccttagccctgaggaggctgcaaaatcaactgtgccagaaaggcttggattacaatgtgtacgtggatgtgaggttattgaaattcgtgatgaggaaggatctcttatgaatgattttacagggaggataaagagagaggaatggaaacctcccaagggtgagattcgtactgttaaaattgctttggatacagctcagtatcatattgatgttactgaggtagcagagaagggtgcagagaatgtgtatgggacatttaacattctaatgagaaggaaacccaaggagaataatttcaaagcgatattggaatctatacgtgatctaatgaatgaaacatgtgtagttcctgaatggttgcataacatattcttgggttatgggaacccttctgccgcacagtggataaatatgcctgatcttctggaaaatatagattttaaggacacttttcttgatgcggaccatgttgtacaaagctttccagattaccaggtcacatttatcaattcagatggaacagaaaacctgaatccgagccctccttttaagattaagttgtccaagaaaatgagggaaagtagtcatgctctacctggcaatgtaaactctgttttgtcggctaagaacaatatggttgatgatgatgggccccagaaagaaaaaataatggttgagacttatattcctgctgatccagggccgtatcctcaagataaacctaaacagaactcagtgaggtttacacctactcagattggtgctataatatctggtattcaacctgggttgacaatggttgttggtcctcctggtacgggaaaaacagatacagctgtgcagatattgaatgttttatatcacaactgtccttcccaaagaactctaattataactcattccaatcaagctttgaatgatttgtttgagaagataatgcagagagatgtgcctgctaggtaccttcttcgtcttggtcagggtgaacaagagttggcaactgatctcgattttagccgtcaaggtcgtgtcaatgctatgctggttcggcgattagagctgctaggtgaagttgcaaaattggcaagttcccttcatcttcctgaagatgtgagctacacatgtgaaacggctgcatacttttggttattacatgtttatgctcgctgggaacaatttttagctgcctgtgcgcaaaaccaagacaagccctcatttgttaaagaccgcttccctttctcagagttcttctcagatactccacaacctaccttcactggtgagtcctttgagaaagatatgcatgcagccaaaggttgtttcaaacatcttttgacaatatttcaagagctggaagaatgtagggcttttgagctacttaagtcaacagcagagagggcaaattatctaatgaccaaacaagccaagattgttgccatgacttgtactcatgcggcattgaagaggagagactttcttcagttagggttcaaatacgataatttgctgatggaagaaagtgcacagatattagagatagagactttcataccgatgctgctgcaacggcaggaagatggctatgctcgtctgaaacgttgcattttaattggtgatcaccatcagttaccccctgtcgtgaagaacatggcttttcagaagtacagccacatggaccaaagtctctttacaagatttgttcgtcttggtgtcccttacattgagctcaatgctcaggggcgtgccagacctagcatcgccgaactatataactggagatacagagaacttggagatctaccttacgtccgtgaggaggctatcttccacaaagctaattctggcttctcttatgactatcagttggttgatgttcctgatttccgtggcagaggtgagtctgccccttctccttggttctaccagaatgaaggggaggctgagtttatagttagtgtctacatctacatgcgcctgattggataccctgccaataagatttcgatattgaccacttacaatggtcagaagcttcttattcgcgatgttattaacagaagatgcaagccatggaatatcgaaccacctagcaaggttaccacagtggacaagttccagggtcaacaaaatgatttcattttattatctcttgtccgcacccgttttgtggggcatcttcgtgatgtcagaagacttattgtggcaatgtcccgtgctcgtctgggcctgtatgtgttctgccgtcgttcactttttgaacagtgctacgaattgcagccaacattccagcttctcctccagaggcctgataagcttggcttgaatcttgaagagtgcacaccatttacagagcgacctttagaggaaactggaaatattcattatgttgctggtattgaagatattggtcatctagtgaatttcagattagaacatcttcgtcagatgcaatacatgcaatattatgcacctcatgcaaatgtaccaccttcagcagtaccagaaaacaatgctgatgcaactgaaaatggcaatgctggcaatggtatgcataaggcaaacgatgtcatggctgaagaaaatggtgatgcagtgatgagaaataagatggaggaagacactattgatacaatgcaggaagaaaacaagatggatggtaaaaatcctgaggcaaacgacatggctatggaggagaagaccgtcgacggagatgatgatccaaagaataagatggaggaaggaaatactgaggcaaagaataagatggaggaaggaaatactgaggcaaaggacaagatggaggaagaaaatgatgtggcaaagaacaatatggaagagtgagctaacatggctgttatctgattggactagaggctaacaaaggcttcatgttcgctagcttgatccaccacaattcttgatctggaataccaaatattgaagcacgcaacatcacatggaggggttcataacatggctcctgggatggtgtgcgtggaatggagcatgatatgcgaaggttaaagatatttttggagcttcttggccaaactatgctccttttatttccggccaattgtgtggtataccgtatacacatgtactgttatatggtttcacacatttggccgaaacacacgacggctattcagggggcattagcatgtacaaaagagatgagtttcttgttgtggtttcttcccttaactgtttaacatagctatgcgagtgcaagagggcagatgaaacattgatgttgtgatatttttgtatactcgattgttttgtaatatggttacgaggagcgttagagttttttttttaacactgcagcatgaggaggtagactactgtaactgctgtctgataacactgcagaaactggtggtagctgtaagaatggtgttccaagtttgaactcactcaggttccc

SEQ ID NO: 7893 - DNA, 192 bp, Oryza sativa
  Clone ID: PAT_MRT4530_14445C.1
gtctgcatcttctaggaccatagaactgctttgttttaattggacagtctgattccccttgtccgtaccagctctgagtcggctgttcgacgcccggggaaggcccccgagggggccgttcccggtccgtcccccggccggcacgcggaggtcagctgctcctccaccagcaactagagtagcctcgcccac

SEQ ID NO: 7894 - DNA, 316 bp, Oryza sativa
  unsure (1)..(316): unsure at all n locations
  Clone ID: PAT_MRT4530_14446C.1
anaagatttatattctagggagtagaatttggtcatagaatttgtnatctcaaataaatatggaagcaagcctcaaatctcagattatggtttatcaggaaggaggagtgcttcaagcatctgcnaggaagaacccattcanattacgctgcatttttttttgntctctngcctcccatccccatctccgngtctcggaccccgagctcttcctcgcctcggggatcgccgcgccgctctccggcgaaggcggntcgagccgccggcatccgncatggcggaccccgtggagctcggagcgcctccntcccccgag

SEQ ID NO: 7895 - DNA, 125 bp, Oryza sativa
  unsure (1)..(125): unsure at all n locations
  Clone ID: PAT_MRT4530_14447C.1
atggccgtctcctgcattatcttggtatccgatgatcttnnctatatgctgagcccttcacttgttaacattgagcgcattgccttgtggaacatggcaattgaaaatatcagtgtagctttcaa

SEQ ID NO: 7896 - DNA, 432 bp, Oryza sativa
  Clone ID: PAT_MRT4530_14448C.1
atgacgcccgacgatatggccgccacatgttcgatgaaatgtccaatataccagaaggaaaataaaggtgctgtgactgtaactagcaccttcagggccttcagacatgctgagcaaccggcgttgaggaccttgttggcacccgagaagaggttgttggtccggagtggtactgaaggttccttcacgaaatttataaatgcaccttacaaatctgaatgcttggagttatatgagatgatggatgaatattgcagggagcctatggacctgtttggcacagctccagctctaactctacccctcctggagctggagctcagccaaacagtttcagctccaccaaaactaggagtggagctagattggacggaggcatataacctcttcaaagaacaaggtatcaaggatcttgttgtcaatgtaaaataa

SEQ ID NO: 7897 - DNA, 398 bp, Oryza sativa
  Clone ID: PAT_MRT4530_14449C.1
acatataaaaactaagcatgagatcgtcgtatcgtcactcattcattcttcctatgccgtatcgggcaactcactagaataacactgcttttgcacgccgcatatactgttgcctttgaagcctcatcaatcaccgtatgcctatcgactgcggaataccgcgggcacagacgcagctgttggcttagatgcgcacatagcacgcgcgagtcacacagggcttgcctattcttagaacgcctacatgctctctctcttatagacccaaagggactgatcatctatctacgcatagctcactccctgatgatgctggaactttctgctggtctctctcttggtgccttagctggcgtctatcagcgggccgaccgtattgatatccttggtcgacagct

SEQ ID NO: 7898 - DNA, 621 bp, Oryza sativa
  Clone ID: PAT_MRT4530_1444C.1
atggcgcggcggcggcatgcggccaccggcggcagcagccggcgacgtggaacggcggcgggcggccgtaggacagcggcgcgcactgggacggcgacgcaccccaagaggcggaggatctcaccgacgaccgaggaaggaggagctccggcggatttccggcgaagaggggcggcggccgaggtcctcctcgtcccagcggagctgagggaggcaacggtgcgggtcggcgtcgaccgaagcggcggcgcgacgcggctggagtcggtggcggcgacggagagaggtggttcgcgtggctacggcgctacggaggtggagaggggaaatggagcggtggccgagcttgcctgtccggcggcaaagctggcggtggcggcggagcggtgcggcggcgaccctagcgacgggaaacggcggccggagttcgccgaagtgtggcggcgcgcgggagcggcgtggggagagcgagggagagagtgccgggctcgggaaacaaggggaaaatggagagggagatgcggggaatgtttctataggggaggggaggccggatcgagcacgggagaggcggagtcggggcggcaaccgccggggaagtggggcgccgacgcggggtga

SEQ ID NO: 7899 - DNA, 448 bp, Oryza sativa
  Clone ID: PAT_MRT4530_14450C.1
agataaactcatgagttggaacttgcaagtcacaggctaaccaaaagccaaaagcaaccacaatggcggcctaagtgccttttttcaccactgaatttacatagaagagtaactagtagactagatacaatttgtcaaggctcaggtaacataactaattaactgagtagtactaataactattgttgtggggagatggaaacaggatcaaagaacctctgttgtgttcttcccaattgccatcttctgcaggccaaaaacaccacaaaattcccaccctcctggctaaattcctcagcatggcatcatctgtagaacttgatagcatcaggaatcatcttcatcctccccatcttgcacaaaaccccctcccatctcgcaaatccagtcccagaccttcgccggcacgggcatcaccgacagccgaggctgccggagcagcgcgaac

SEQ ID NO: 7900 - DNA, 328 bp, Oryza sativa
  unsure (1)..(328): unsure at all n locations
  Clone ID: PAT_MRT4530_14452C.1
gngattnttngtagnntacanttagccccncnaatgtttggccatgtcttctatcctcgttcnttcanctgtattcnatgctcccaatatggantntnttnnncggctnattatgctgcggaatcatcagtncataaattgtcttaaagngacagctnnatcttagagtaggaggtngngaggtttcagtncccngcttacagganaaagncatcccttnnacannatacgtnatgaagngnnantatcgatgctngcgatnnntnagccaagagagctgntggangaaatcgacaacgntcacgngtggangactccnaaatgcgnc

SEQ ID NO: 7901 - DNA, 2450 bp, Oryza sativa
  Clone ID: PAT_MRT4530_14453C.1
ttactgcagcggcgcttgcactgtcacgacgaccggggtgttcacggcgtgcctcccgtcgctccacgtcaccgcgccgctcctcacctgcgagctcccgggctccatcttcttggctggcgccgcggcctccacccgcaccgtgaagctcagcttctgcccgtcgcgccggaacgccagctgccgcggctgcacggtcaccgcgcacccctcgggcgacctcaccgtcgcgcggtacaccgcgcgcccgccgccgacgttggtcaccgtccggatgaagtgggtcttcatcgtcgccctggtgccgtccgcggcgaacgtggcggacatggacgggtagttgaggttcccggcgtgccccgcgcgccgcgcgccgcggcagtccgcggggcgccgcgtgatcgcccggatgttctgctcggtgtagttcaggttgcagaggaagttgacgtagtccacgggggtgatgtcgtagacgagaccagggtccatggcgcgcatcgggtcaacgtgccctgcgccgaagtcgaacacgtcggccacgacgcccgtggactcgtccaccatggtgccgttgctgttgtccttgatgtaggcggtggtcatgagcgctgacttgatcgccgcggggctccaggtaggatgcgccgccttgagcaatgcggcgaggccggagatgtgcgggcaagccatggacgtgcccgagaggatgttgaattccgtgcggcggccgtcggaggggatgccggccggcccgacgccgctgggccatgcggcgaggatgtttaggccgggggcaatcaggtctggcttgagtatttccggggattggggattggggccacgcgcggagaacgcggccaccacaggcgccggatgcacgccgaggtgggtgccttcgaacaagatggtgccggtggccggcgcctgccgcgtcgacgacccaatgtacttacggagcttgtcgccagcggccgcgccgacggctgtggctggcagaacgtggcagtcggcgacgaggccctccccgtcgaacaccccgttggcgagcaccatcccgatgccgcccgcgcggtgaaccacgtcgcccttggcggcgcgcgagttcacgccgcggtcgcacaccacgatcttgccccgcaccgcggcggggtcgagcgagccgtcgaggcacatggacgccgagtagccgtcagccgcagacgaggcagcgccgctgcttgctccagcatatacaagctcatacatcttgccggattggagcgctggcccgccgtacacgctgacaccgtcgagcacttgaccattgccgagctgcacgttggccgggaaggcgcggtccatggacccagcgccaacggtggccatccagggagccacattggtcacagtgagcccaccagggccgccattgccggccgaagccgaaacaacaatcccagcctccgtcgccccgaatgccccaatggcaatggcgtcaaggtagtacggcacgacgacgccaccgacgctgagggacacgacatcgacgccgtcggcgacggcggcatcgaaagccgcaaggatgtcggagtcgaagcagccgcccacccagcacaccttgtacgcggcgaggcgtgccttgggcgccatcccggcagccacgccccgggcgtagccgagggtggacgccgggaacacgtagcggccggcggcgatggaggccgtgtgggtcccgtgcccatcggtgtcgagcggcgacctgacctccgccgtctcgttcatgcggccggaggtggcctcatacccggcggagaagaaccgcgcgccgacgagcttgcgattgcaggagttgggcgggaacccaggccccgacgagcacaccccgcgccacttggacggcaccggaccaagcccacggtcgtggaagctgcggtgggtgggggagatgccggtgtcgatgatggcgatgacgaggtcggaaccaaaatccgagtccgcgaggagcgccgacggcggggacgacagcagcccaaggaaccgcggcgagcgggtggtggcgagctgccggacccgctccggcaccaccgccgccaccccgggagcctccgccagcgccgccgccgcagccggcgacatccgcgcggagaagccgtggaaggcggcggagtaggtgtggatcagcgggcccccctcccgccactcccctccaccaccaccaccctccgctgccatcaccgccgcctcgtaccagtgcgcgtgcgtcgggaacgccgagggcttcgcgtccgcatccacccgcacgatgaacgtcctctcctcccctcccccacccaacactcctccaacggcagcggccacaaccaccaccaccaccagcagcaggagagtgcgggacgccgacgacgccatggcggaatgccggatccggagaggtgaggagatcagtggagatgggggaggaggaggag

SEQ ID NO: 7902 - DNA, 429 bp, Oryza sativa
  Clone ID: PAT_MRT4530_14454C.1
ttatcttaacaaggagagagctcaaccttgaagacctgtagggaggaggcgggagcttgaggaaggaagaggatgagaatgggtccgcaccaccttttgcctacttgggagtttaggctatttttggactgccaataagggtttcatcagggtttcagccgatgaggtatctagatgttgcatcggtttacaaggattgcatccgattggtttctactggattatattattgttatttattattatcagccgattgtctcaagtatcagaatctaaattggatatataaccgatagctccaaaccctatcactatcggctggataaacctgactgacacgcctgtatttcaccaacctttggacctgcactggagctaagcagatctcccagaccgttatgttcgtcgacttagtttgcgccagcacag

SEQ ID NO: 7903 - DNA, 2598 bp, Oryza sativa
  Clone ID: PAT_MRT4530_14455C.1
atggagtttctcgacgtcagccttgtagaagttgataaatgggctaaagcccatatagatttggtggttgggctgcaatcacggttcgcgcgactcgagctctcgaatggccttcgtcttcgtcttctccggttctctttcccttccccatcctcctccccattgcgctgggtaagggttggcaatctagtccccctcaatgaaggaaatgcgagctcgtcaaatggatcggtgtcaagcattcctatctatctgggtgccaatgttgtagggaggaatcatttggtggtcgtcgacaagagagtcagccgcaagcatctgagcctacatgcctcggcggatggttccattgaagcggtagtggaaggaccaaatcctatcattgttcgatctgagggccagaggaggaaggtctgtgctcaagagagagtaaagattgcacatgatgatgtcctggaactcatccctggtgaatattttgtgaagtatttgaatgtgggcgataaccataaaagttccacatcaatgggttcaagtgattttaaaaaggggaagaggctctgtgaggatgatactgtagttatcaaaagaaatcgtcagattatggaagatgaggctttggcaagaagtttacagaaaagctttgcagaagaaagttcaactatttccggtttgggttgtgatcaaatgttaagttcacttgatagtgctggtttttctgagagaaataacgagagaatacactctgttgattatctgaaagatgtactttcattgacttttcggctcatgcgtgtccaaggtcttccttcatggactaatacttcctcagttaccattcaagatgtcatacagggtgaagtgcttcttgctgtactctcaaattatatggtggacatggaatggctgcttacagcatgtccaagcttaaggaaagttcgacatgtcctagttatacatggagaagatggtgcatcagtggagcttctgaaggggctatggatgcaagattttccctggaaagatgcaaaagatgtgaatagaagtgtttcctttgaaaacgatttggttgattatctgagtgcaattaagagagagatcttggaattgctggcaacatgttgcaaacttatatggcctgagttcagggtaaatttaccagtggttggtgatgtcaacatcaatgcagcattctttaggaagtttgattataagagctcatcggtcaggttgattggatccgttcctggttatcatgttggccccaatattaaaaagtggggtcatatgaagcttaggagtgttcttgaagggtgcacatttgaacaacagttttgcaaggctcccatgatttatcagttctcttccttggggtcacttgatgagaaatggatgagtgagtttgcattctcactatcagctggtaaatcagataatggttcacctttgggtattggtaaaccactgattgtctggcctacagtggaggatgttaggacatcaatagagggttatgcagctggtagttgcattccaagccctcaaaagaatgttgaaaaagatttcttgaggaagtattgggccaggtggaaagcggaccatgtgggtcgttgtgctcccgatcagaccgggctgggcccggtcagaccgcagcggttagaccaccacaagggcgccggtcagatcggctttcaggacttggagcctgaggcaaccgcgagaatagaactctatggtctaaccgcccacaaggcctcgttaggtgtactgttcttgcccaaaactcaccaatctgtaccacaattttcatgtacggggaagaacaattcaaacctgttccttacccagaataacctggcccctgggaaagagatcaaaaccaaactggtcacactctgctggaaaagcgacgaagaaaaagaacaatccacggaaattatcagattgccagtgccatatcaacttcctccaaagccttacggcacagaagatgtcccatggtcttgggacaagaggtacacaaagaaggacgtgtatggttcagtctggccgcgccatgttcaatattgcttttttactttgtgcctcacacaagctatcttctctctggccatcactaacaataggggtgaaaacgaaaccccggatatgaaaacggaatcgaatattattgaaaccgaaaacggagcaaaaacgaaccgacgcgaatacgttcttggtgtagcttgccactttcaccagcaaagtttcatgtctgatctcgacattcagatcccaactgccttcgatccctttgctgaggccaatgctggagactctggtgcggctgcaggatcaaaggactacgttcatgtacgcatccagcagcgtaatggccgtaagagcctgaccactgtccagggattgaagaaggaattcagctacaacaagatcctcaaagatctcaagaaagagttttgctgcaatggtactgttgtccaggacccagagcttggccaggtcattcaacttcagggtgatcagaggaaaaacgtatcaaattttcttgttcaggccggcattgtgaagaaggaacacatcaagattcatggtttctga

SEQ ID NO: 7904 - DNA, 306 bp, Oryza sativa
  Clone ID: PAT_MRT4530_14456C.1
ttaggtgtactgttcttgcccaaaactcaccaatctgtaccacaattttcatgtacggggaagaacaattcaaacctgttccttacccagaataacctggcccctgggaaagagatcaaaaccaaactggtcacactctgctggaaaagcgacgaagaaaaagaacaatccacggaaattatcagattgccagtgccatatcaacttcctccaaagccttacggcacagaagatgtcccatggtcttgggacaagaggtacacaaagaaggacgtgtatggttcagtctggccgcgccatggttag

SEQ ID NO: 7905 - DNA, 555 bp, Oryza sativa
  Clone ID: PAT_MRT4530_14457C.1
taccattgcgctgggtaggattccaatgtgggggactagggtttagggtttggagtcaatcccagaccgcgcccatgacgtcctcgtctcgagtaagggttggcaatctagtccccctcaatgaaggaaatgcgagctcgtcaaatggatcggtgtcaagcattcctatctatctgggtgccaatgttgtagggaggaatcatttggtggtcgtcgacaagagagtcagccgcaagcatctgagcctacatgcctcggcggatggttccattgaagcggtagtggaaggaccaaatcctatcattgttcgatctgagggccagaggaggaaggtctgtgctcaagagagagtaaagattgcacatgatgatgtcctggaactcatccctggtgaatattttgtgaagtatttgaatgtgggcgataaccataaaagttccacatcaatgggttcaagtgattttaaaaaggggaagaggctctgtgaggatgatactgtagttatcaaaagaaatcgtcagattatggaagatgaggctttggcaagaagtttac

SEQ ID NO: 7906 - DNA, 278 bp, Oryza sativa
  Clone ID: PAT_MRT4530_14458C.1
tacgtgcccaactaacacatactttcatcgtatatacacacttctcctacttgttactgtaggtcgtgtgtgcatatataacctactagtcatgagcagggctaggctcgcaattgacatggggcctccttatgataaccagggccgacgtctctgaatcggcggttccggcggtaacggtggatgtggcggccgcctgcgaccttatcacttctgacggtcaccgttacggtgtcgttcagccacaaggggaccttgacagggggggtctacacggc

SEQ ID NO: 7907 - DNA, 781 bp, Oryza sativa
  unsure (1)..(781): unsure at all n locations
  Clone ID: PAT_MRT4530_14459C.1
atggagttcgagggagttggcagcattcctcgtgtgaaaaccccatcgctagcctctcgacagcgtggcggcaaggtcaatgcaggcgggctagattggggcgttcaatattgcttttttactttgtgcctcacacaagctatcttctctctggccatcactaacaataggggtgaaaacgaaaccccggatatgaaaacggaatcgaatattatcgaaaccgaaaacggagcaaaaacgaaccggcgcgaatacggaggcatccaagccaagaagagggagagcaccaaggacacgcgactagcagaagccgagcgaccgnttcctcgttccatatcttccggtcgatttcttggtcgatctcttccctcctccacctcctcctcacaggttcttggtgtagcttgccactttcaccagcaaagtttcatgtctgatctcgacattcagatcccaactgccttcgatccctttgctgaggccaatgctggagactctggtgcggctgcaggatcaaaggactacgttcatgtacgcatccagcagcgtaatggccgtaagagcctgaccactgtccagggattgaggaaggaattcagctacaacaaggatcctcaaagatctcaagaaagagttttgctgcaatggtactgttgtccaggacccagagcttgggccaggtcattcaacttcaagggtgatcaggnggaaaaacgtatcaaatttcnttgttcaggccggcattgtgaagaaggaacacatcaagattcatggtttctga

SEQ ID NO: 7908 - DNA, 764 bp, Oryza sativa
  Clone ID: PAT_MRT4530_1445C.1
attcggctcgagaacccctaacctcaaaacccccattccgcgtttctagggagggacaggctaaaacaatcatggcggcgcagtggtggcgctccgccgccggccaccttcgaacggtggcggcgggccgtggttccttgtcgggattccagcgcagcacttatcacacgatccaagccatcccaagggagtgcagcggcagcaaagtctcggcgagagaccgaacgcaaggtcgaataccttgcgtcgttttcctccagaaccttctggaaaaaaaccccgacgcgcgttcggaatcgaagaagcacttgctcaccgtcgagaagaagcagattaaggccattctcgactccgccgacgcgcctttcttctgttccacgcgcttccctctccagatccgcgccggttccggatcctcgcatttgctcgaatcgggaaccgttttacctatcaagattcatagggatgaagagagtgggaagattttgaatttggtgtttgtttgggctgaggatggaatgaaattgaaggtggatgtgcctgttgttttcgaaggggaagatgcctgtcctggtgttcagaaaggaggaattttgaataagatcagacctagtctaaaatttctctgtccatctgagcacattccttcaaaaattgttgtggatgcgagcaatctagatattgaagatagaatattcatgcgtgatatcgaggttcatccatccctagagcttctgagtaagaatgaaagcatgcccatatgt

SEQ ID NO: 7909 - DNA, 1581 bp, Oryza sativa
  Clone ID: PAT_MRT4530_14460C.1
atggcaatagaagacaaattggacttgctgttgaggcggatagaggagtacgagctgaggcgagaggaggctgatcggagaactagagctgatatacggtctctcatagatgtggttgaagcatgcacaccggaagttgggaagaaggcaaaagacttgccagcgtcaattaagaaagagcagtcaaaggtgacgcccaccacatgtttgacgaaatgctctagtcccgacatcgagcccaaactcacactggttgcgatggtcaaatgtgccgccactgccatggcctccatgaagttggtagctgataatggtgcaaccagcaccaccaaaattcccaccactgactattccaaggagacgcacgccaagtgttcgatgttgggcttcgatgtcaagtgggacgccaacaaagccgacatcgcgttcctgaccaagacggttgtacttgagaccgttccagcatccattgcatcattgagcgccttctcaccaaggatgatcgccgacatcaagcattacacattgatgcccaccagcaataagctgaaattcaatgttggagtgaaaagtgagttgtcctttttgatcaaccttatagcagccactagcaaggaaggtatctatgctgctggtgaacctgaatatttacttttggggctatcttttgttgaaatggaaagaaagggcaactgctacttaagttggagtcacttacttcttgcaagagtgatggttgtggagctgagcagtactgggcaatttggttctgtgaacttttccttcaaaggaaaacatgttgacaagctcagactatttgtcatgccaccttggctgccattagtttgtttgctggaagttagagaagggaaatgttgcactactgattctgctgcaagtataattccttggaatgagcaaaagaaaatgatgattactgaaacttgcacttgctttgagcaaaaaatgcagaagttttgggatctgactttccaggggatgttgctcaactactaccaaactagagtggagaaatggaatatgagaataatttgcatggtgatatcagaatctgagtcatgtttggaatcaaattacattggtttgaatgttgaaggagatttgctatatgtgattgctgatgaaaaaggccgcaaaagggtgaaagaaatggaagaagatgctaattcaattcatgatgagaagtatacttttgggttagttcctatagtggtgttgatcaagcgaggttgtcactgtttgcagcatatcaaattgttgggaatcaatgttggcaagcgattcgtaacagtgctattgtcatgcatcacccaggtgtactttacatggagtaagcagttattcaagctaaagctacttgctctattcttcttcaatgatggttcattgtctaacaccaaatatttggaggaaccatgggatccgagaggtgtattccatcggcttttggacaagccaaatttcaagaagaggggattgtcaggatcccgggtgggccgcacacgggctggtcagcccatcgccatgaggcccaagcaaacggaagggagcagcatataa

SEQ ID NO: 7910 - DNA, 922 bp, Oryza sativa
  Clone ID: PAT_MRT4530_14461C.1
agcgctctcaaagtagcatatattattcaatcttgatgaaagagggacacaagccatcatctatagtgatggtgcctcttacaaacttcaacacacgggtaacaagcatacactcaagagtcaagaggtggctaggttttgtgtgtacaatggaacacgcaggcatgtacacaaccaagtatactccaccccaaactatagtctttgcaatggttttggcagttgctcagaaaccatgaatcttgatgtgttccttcttcacaatgccggcctgcgggacatagcatgttacaacaagtcaagacgtattcttttcatacatcacagcatgtgtacatctaattgcagtaagcatgcacaagagaatgatccctacctgaccaagaaatttgatacgttctttcctctgatcaccctgaagttgaatgacctacagagtgaagcattgatcagaaaagctagctcagaaagatagaaaaacgtaaagatcaggcgccgcaaatttcggttattacacacacctggccaagctctgggtcctggacagcagtaccattgcagcaaaactctttcttgagatctttgaggatcttgttgtagctgaattccttcttcaatccctggacagtggtcaggctcttacggccattacgctgctggatgcgtacatgaacgtagtcctttgatcctgcagccgcaccagagtctccagcattggcctcagcaaagggatctgtacatgttcaggaaaacatgatgagcacaaatattccaggcactcagaccatcacaaagagggaagagaacaacatgcataccgaaggcagttgggatctgaatgtcgagatcagacatgaaactttgctggtgaaagtggcaagctacaccaagaaccccacgcgtcctcgtacgcgtgggtcga

SEQ ID NO: 7911 - DNA, 4224 bp, Oryza sativa
  Clone ID: PAT_MRT4530_14462C.1
atgaaggatcaccggaaacacggttatctcgatgaaaattgtaaattcacaattgatctactggacattctcgaagaattcaggcctttatctcaaggtgagcaatgtttaagaaatctagtgcagaataaactggcacagttggttcagagcagactctcatattggaagcagagggggaaagtcagaagaataaagttgggtctggataactctgcgttctttaaggctcatgcatcaaaaaatttcaggaaatcaaggattaaatcaatcaagcacaacggtacagaggtggcggatcacaatggcaaagcgcgcctaatgcactcctactaccaaaatcttttggggggtgagtctcagccggtgtgggatgttgatctttcagcgctctacttgtcggaggaatgcgactctaacatgctggctactcaagtgcccctggaccagacggttttggtcctagcttctatatatcaggcggcttggaacgacatcagggaggctatcctaaatctagcatcaggcttctcccagggcgctattcaactggaaagaattaacagagccttcattgttcttatccaaaagccaggtaaagaaaacacagtggatgggtacaggccgatctctttacagaattgctctgtcaaaattctatcaaaggtgctggcttttaggttacaaattgctttgacaaaaatgattcacatggatcaaactggctttctaaaaggtcggtgcatttttgaaaatctaatctttgcgacagaactgattcaagcttgccacaagcgaggatgccaaactttaatcatcaagctcgactttgcaaaggctttcgattcagtaaattgggaaagcctgctaaaaatactagcggtcagaggtttcccggacaattggatcgggtggattaacaagttgctcacctcctcaaaatctttggttctaattaatggaatcccagggagttggattaattgtcgaaggggccttcgtcaaggagaccctctttctccatacctttttatcttggtagcagatgtgctccagcgactgcttgaaagaaatgcaagcttaagacatccaatataccatgatcgcccctacgcaactattcaatatgcagacgacacgctgattatttatagagcagaagaagatgatgtccgagccctaaaatcttccatcctcagtttctccaaagcaactggtttgcatatcaactttgcgaaaacctcttctaaacaaggtggatgggttcttagcaggttgggaagcttcgctcctcaggcagagcgtctcgtttcaatcaatgcggtcctcaatagccttcctgtctatgcaatgtctgctttcaagctgccaccttcggtgattgaggaaattgataagcgaaggcgggcattcctctgtacgggggaggatgtttgttctagagcgcgttgcttggttgcctgggatgtggtttgctctccaaaggaactgggtggaattggagtaaaaaacttaaaagttcaaaatgaggctcttctcctgaagcggttattcagcctcttctcctcagaatcttcctgggcgaactggatttggaaagaatttgatgggcaatctctactgaaatcccttcctttaggacaacactggacttcgttacagaaattcttgccggagcttcaaaagctgatgacggtaaagattggaaatggctctagaacttcattatggcatgactgttggcttgggattcttcagttagcaaatctcttcccggctctttattctcacacaacagattgtcatgctactgtaaaagatgttctttcaagaggcttaatgataatgtttgtcccaagactttcagaggctgcaaatgcggaacttcacagccttcaggcaatggtggcagaccttactctgaccaatgacaacgatgtctggcaaaacaaccgatcgacctctctcacaaccaaagaaatctatgatgcaagattccctgtacaaatgccatcgccaaattggaagataatctggaactgtcgggcgcctttgaagggtgccatggcaatagaagacaaattggatttgctgttgaggcggatggaggagtacgagctgaggcgagaggaggctgatcggagaactagagctgatatacggtctctcatagatgtggttgaagcatgcacaccggaagttgggaaggaggcaaaagacttgccagcgtcagttaagaaagagcagtcaaagttggtagctgatgatggtgcaactagcaccaccaaaattgccaccactgactattccaaggatacgcacggcaagtgttcgatgttgggcttcgatgtcaagtgggacgccaacaaaggcgacatcgtgttcctgaccaagtcggttgtacttgagaccgttccagcatccattgcatcattgagtgccttctcaccaaggatgatcaccgacatcaagcggtacacattgatgcccactaggtattcggcgaaatgttctgggtctaacaactctcaggttgtgtcttatttgtccttcttaagcaccccaatgttagtggaatcagctggaggacatttgttagttccatggcaactgctgttgcaacactttgaagttgatccatggccacccataacatcaagggatcaagagttcattatatgggagtcacagttaatgtcatggctggcattcaactgcagctgttctgaagtacatatactgccaccttggccccctccaaccgaagcgaaatggtttcaactctttgtgggcaagcaattttcattggtaaacccgctgaacattatacatgtcatgttggggccactagtgtgggatccaggtgatggaaaggtccaccttcacaaaatattaatatggatggatgattggttcccacaacattattttcattggaagtatattttgtggagcaatgagctgagactcaatgttggagtgaaaagtgagttgtcctttttgatcaaccttatagcagccactagcaaggaaggacaactgctacttaagttggagtcacttacttcttgcaagagtgatggttgtggagctgagcagtactgggcaatttggttctatgatcatttccttcaaaggaaaacatgtgacaagctgagactatttggcatgccaccttggctgccattagttggtttgctagaagctagagaagggaaatgttgcactactgattctgctgcaagtataattccttggaatgagcaaaagaaaatgatgactactgaaacttgcacttgctttgagcagaaaatgcagaagttttgggatctaactttccaggtcagtttgacaacacttgctagcaaggaaagcaatctagttatttgtgatcctaaatcattatatgtttggttatcatctgttgatcttagggggatgttgctcaactactaccaaactagagtggagaaatggaatatgagaataatttgcatggtgatatcagaatctgagtcatgtttggaatcaaattacattggtttgaatgctgaaagagatttgctatatttgattgctgatgaaaaaggctgcaaaagggtgaaagacatggaagaagatgctaattcaattcgtgatgagaaatatacttttgagttagtttctacagaggtgcatatcaaattgttgggaatcactgttggcaagcaattcataacagtgccattgtcacgcatcacacaggaggacttcgcatggagtaagaagttattgaggctaaagctacctgctctattcttcttcaatgatgttccattgtctaacaccaaatatttggagcaaccatgggatccgggaggaattaaaggaaagagaagaagattgatgggtggcgacggaaatcgtgtggcgatgacaaatgagctgaagaggtgctccacgccgtcggaggagaaggaggccaagaggatgaagaaggaggaggctgtgaagaagaagaggatgccgatggaacgggtgcagcacctgctgtcgatggtgccgagggcaccggttcctcttccggtgatccgtgacgattccccggagctgaaggagatcgaccaagccctcgccaacgtcgtgcaggctctcaacaccagctctcaactcatccgccagatgcaggccaacactctcgaccagctgcggaccaagggctacgttgactccaacaacctctag

SEQ ID NO: 7912 - DNA, 3221 bp, Oryza sativa
  Clone ID: PAT_MRT4530_14463C.1
atggagtttctcgacgtcagccttgtagaagttgataaatgggctaaagcccatatagatttggtggttgggctgcaatcacggttcgcgcgactcgagctctcgattggccttcgtcttcgtattctccggttctctttccctaccccatcctcctccccattgcgctgggtaagggttggcaatctagtgcccgtcaacattgggaagacgagctcgataaatatatctgggtccagctccccccccgatataggaggcatccaagccaagaagagggagagcaccaaggacacgcgactagcagaagccgagcgaccgcctcctcgatccatatcttccggtcgagttcttggtcgatctcttccctcctccacctcctcctcacaggttcttggtgtagcttgccactttcaccagcaaagtttcatgtctgatctcgacattcagatcccaactgccttcgatccctttgctgaggccaatgctggagactctggtgcggctgcaggatcaaaggactacgttcatgtacgcatccagcagcgtaatggccgtaagagcctgaccactgtccagggattgaagaaggaattcagctacaacaagatcctcaaagatctcaagaaagagttttgctggcaattggtactgttgtccaggacccagagcttggccaggtcattcaacttcagggtgatcagaggaagaacgtatcaaattttcttgttcaggccggcattgtgaagaaggaacacatcaagattcatggtttctgagcaactgccaaaaccattgcaaagactatagtttggggtggagtatacttggttgtgtacatgcctgcgtgttccattgtacacacaaaacctagccacctcttgactcttgagtgtatgcttgttatccgtgtgttgaagtttgtaagaggcaccatcactatagatgatggcttgtgtccctctttcatcaagattgaataatatatgctactttgagagcgctaaaaaaaaaaaaaaaaaagattcgtcttgttgtgcacacagcaaatttgatacatgtcgactggaataacaaaactcaggggctatggatgcaagattttccctggaaagatgcaaaagatgtgaatagaagtgtttcctttgaaaacgatttggttgattatctgagtgcaattaagagagagatcttggaattgctggcaacatgttgcaaacttacatggcctgagttcagggtaaatttaccagtggttggtgatgtcaacatcaatgcagcattctttaggaagtttgattataagagctcatcggtcaggttgattggatccgttcctggttatcatgttggccccaatattaaaaagtggggtcatatgaagcttaggagtgttcttgaagggtgcacatttgaacaacagttttgcaaggctcccatgatttatcagttctcttccttggggtcacttgatgagaaatggatgagtgagtttgcattctcactatcagctggtaaatcagataatggttcacctttgggtattggtaaaccactgattgtctggcctacagtggaggatgttaggacatcaatagagggttatgcagctggtagttgcattccaagccctcaaaagaatgttgaaaaagatttcttgaggaagtattgggccaggtggaaagcggaccatgtgggtcgttgtgctcccgatcagaccgggctgggcccggtcagaccgcagcggttagaccaccacaagggcgccggtcagatcggctttcaggacttggagcctgaggcaaccgcgagaatagaactctatggtctaaccgcccacaaggcctcgttaggtgtactgttcttgcccaaaactcaccaatctgtaccacaattttcatgtacggggaagaacaattcaaacctgttccttacccagaataacctggcccctgggaaagagatcaaaaccaaactggtcacactctgctggaaaagcgacgaagaaaaagaacaatccacggacacgcgactagcagaagccgagcgaccgcctcctcgatccatatcttccggtcgagttcttggtcgatctcttccctcctccacctcctcctcacaggttcttggtgtagcttgccactttcaccagcaaagtttcatgtctgatctcgacattcagatcccaactgccttcgatccctttgctgaggccaatgctggagactctggtgcggctgcaggatcaaaggactacgttcatgtacgcatccagcagcgtaatggccgtaagagcctgaccactgtccagggattgaagaaggaattcagctacaacaagatcctcaaagatctcaagaaagagttttgctgcaatggtactgttgtccaggacccagagcttggccaggtcattcaacttcagggtgatcagaggaaaaacgtatcaaattttcttgttcaggccggcattgtgaagaaggaacacatcaagattcatggtttctgagcaactgccaaaaccattgcaaagactatagtttggggtggagtatacttggttgtgtacatgcctgcgtgttccattgtacacacaaaacctagccacctcttgactcttgagtgtatgcttgttacccgtgtgttgaagtttgtaagaggcaccatcactatagatgatggcttgtgtccctctttcatcaagattgaataatatatgctactttgagagcgctaaaaaaaaaaaaaaaaaaaaaaaaaaaaaaaaaaaaaaaaaaaaaaaaaaacctcaaagatctcaaaaaaaagttttgctccaatggtactgttgtccaggacccaaagcttggccaggtcattcaacttcagggtgatcaaaggaaaaacgtatcaaatttttttgttcaggccggcattgtgaaaaaggaacccatcaagattcatggtttttgagcaactgccaaaaccattgcaaagactatagtttggggtggagtatacttggttgtgtacatgcctgcgtgttccattgtacccccaaaacctagccccctcttgacttttgagtgtatgcttgttacccgtgtgttgaagtttgtaaaaggccccatccctatagatgatggcttgtgtccctctttcatcaagattgaataatatatgctactttgagagcgctaaaaaaaaaaaaaaaaaaaaaaaaaaaaaaaaaaaaaaaaaaa

SEQ ID NO: 7913 - DNA, 1530 bp, Oryza sativa
  Clone ID: PAT_MRT4530_14464C.1
atggcgaacggcggctgcaagccacgggaggacgacggcaaccggcggacgggcttagttggagaactacagggtgtgacaatagaggagtatgagctgaggcgagaggaggctgatcggagaactagagctgatatacggtctctcatagatgtggttgaagcatgcacaccggaagttgggaagaaggcaaaagacttgccagcgtcaattaagaaagagcagtcaaaggtgacgcccaccacatgttcgacgaaatgctctagtcccgacatcgagcccaatctcaccgtggttgcggtggtcaaatgtgccgccactgccatggcctccatgaagttggtagctgataatggtgcaaccagcaccaccaaaattcccaccactgactattccaaggagacgcacgccaagtgttcgatgttgggcttcgatatcaagtgggacgccaacaaagccgacatcgtgttcctgaccaagacggttgtacttgagaccgttccagcatccattgcatcattgagcgccttctcaccaaggatgatcgccgacatcaagcattacacattgatgcccaccagctgttgtaaagtacatatactgccaccttggccccctccaaccgaagcgaaatggtttcaactctttgtgggcaagcaattttcattgtgtgggatccaggtgatggaaaggtccacctttgcaaaatatcaatatggatggatgattggttcccacaacattattttcattggagcagccactagcaaggaaggtatctatgctgctggtgaacctgaatatttacttttggggctatcttttgttgaaatggaaagaaagggcaactgctacttaagttggagtcacttacttcttgcaagagtgatggttgtggagctgagcagtactgggcaatttggttctgtgaacttttccttcaaaggaaaacatgttgacaagctcagactatttgtcatgccaccttggctgccattagtttgtttgctggaagttagagaagggaaatgttgcactactgattctgctgcaagtataattccatggaatgagcaaaagaaaatgatgattactgaaacttgcacttgctttgagcaaaaaatgcagaagttttgggatctaactttccaggggatgttgctcaactactaccaaactagagtggagaaatggaatatgagaataatttgcatgcatatcaaattgttgggaatcaatgttggcaagcgattcgtaacagtgccattgtcatgcatcacccaggtgtactttacatggagtaagcagttattcaagctaaagctacttgctctattcttcttcaatgatggttcattgtctaacaccaaatatttggagcaaccatgggattcgagaggtgttttccatcggcttgtggacaagccaaatttcaagaagaggggattgtcaggatcccgggtgggccgcacacaggctggtcagcccatcgccatgaggcccaagcaaacggaagggagcagcatataa

SEQ ID NO: 7914 - DNA, 1518 bp, Oryza sativa
  Clone ID: PAT_MRT4530_14465C.1
atggtgcaactagcaccaccaaaaattgccaccactgactattccaaggatacgcacggcaagtgttcgatgttgggcttcgatgtcaagtgggacgccaacaaaggcgacatcgtgttcctgaccaagtcggttgtacttgagaccgttccagcatccattgcatcattgagtgccttctcaccaaggatgatcaccgacatcaagcggtacacattgatgcccactaggtattcggcgaaatgttctgggtctaacaactctcaggttgtgtcttatttgtccttcttaagcaccccaatgttagtggaatcagctggaggacatttgttagttccatggcaactgctgttgcaacactttgaagttgatccatggccacccataacatcaagggatcaagagttcattatatgggagtcacagttaatgtcatggctggcattcaactgcagctgttctgaagtacatatactgccaccttggccccctccaaccgaagcgaaatggtttcaactctttgtgggcaagcaattttcattggtaaacccgctgaacattatacatgtcatgttggggccactagtgtgggatccaggtgatggaaaggtccaccttcacaaaatattaatatggatggatgattggttcccacaacattattttcattggaagtatattttgtggagcaatgagctgagactcaatgttggagtgaaaagtgagttgtcctttttgatcaaccttatagcagccactagcaaggaagaaaatgcagaagttttgggatctaactttccagaatctgagtcatgtttggaatcaaattacattggtttgaatgctgaaagagatttgctatatttgattgctgatgaaaaaggctgcaaaagggtgaaagacatggaagaagatgctaattcaattcgtgatgagaaatatacttttgagttagtttctacagaggtgcatatcaaattgttgggaatcactgttggcaagcaattcataacagtgccattgtcacgcatcacacaggaggacttcgcatggagtaagaagttattgaggctaaagctacctgctctattcttcttcaatgatgttccattgtctaacaccaaatatttggagcaaccatgggatccgggaggaattaaaggaaagagaagaagattgatgggtggcgacggaaatcgtgtggcgatgacaaatgagctgaagaggtgctccacgccgtcggaggagaaggaggccaagaggatgaagaaggaggaggctgtgaagaagaagaggatgccgatggaacgggtgcagcacctgctgtcgatggtgccgagggcaccggttcctcttccggtgatccgtgacgattccccggagctgaaggagatcgaccaagccctcgccaacgtcgtgcaggctctcaacaccagctctcaactcatccgccagatgcaggccaacactctcgaccagctgcggaccaagggctacgttgactccaacaacctctag

SEQ ID NO: 7915 - DNA, 198 bp, Oryza sativa
  Clone ID: PAT_MRT4530_14466C.1
atggggtgcgtccgacgattcgccgcccctgccgaagtcaagctggctgccggtgcagtaggagtaaggcgagacggtggcgatggccctatcgaggagcctggagcgctcgagggagcagcgggcgcggacgacgtgctagtggttcttgacggtgctgttggtgtggccggggaagtggccagtgatgaaccgtga

SEQ ID NO: 7916 - DNA, 524 bp, Oryza sativa
  Clone ID: PAT_MRT4530_14467C.1
ttttttttttttttttttttttttttttttttttttttttttttttttttttttttttttttttttttttttttttttttttttttttttttttttaaaaaaaaaagggggttttattaaaatgaagaccaagcaaagaggtacacgggacgcgcaggaggagccagaacttttttaaaacattgagcccacacgcataaagcaaacggaacccaagccccccccacggggggaaggccccccgggcgaaggggatgcgtaggaaaaaccccccaaaggggggggaaggtaaaggcccaaaaagctgggcccgggcctggggtctgaaaaaaaaaaacaacccccccccgctgaagttggatgtggtgcaaaaacgccggaaccctaaaaagggccgggaaagaaaaatggggcccccccccccgggggggggggaaacacggggggggaaagactgggggggtaaaaaaaaaaaaccaaccggggggccaaaaggggggggccacaaagctaggggggggcct

SEQ ID NO: 7917 - DNA, 1173 bp, Oryza sativa
  Clone ID: PAT_MRT4530_14468C.1
atggcaatagaagacaaattggacttgctattgaggcggatagaggagtatgagctgaggcgagaggaggctgatcggagagctagagctgatatacggtctctcatagatgtggttgaagcatgcacaccggaagttgggaagaaggcaaaagacttgttggcgtcaattaagaaagagcagtcaaaggtgacgcccaccacctgtcggcgtcaattaagaaagagcagtcacttacttcttgcaagagtgatggttgtggagctgagcagtactgagcaatttggttctgagaacatttccttcaaaggaaaacatgttgacaagctgagactatttggcatgccaccttggctgccattagtttgttttctggaagctagagaagggaaatgttgcactactgattctgctgcaagtataatttcttggaatgagcaaaagaaaatgatgactactgaaacttgcacttgctttgagcagaaaatgcagaagttttgggatctgactttccaggttagtttgacaacacttgctagcaaggaaagcaatctagttatttgtgatcctaaatcattatctgtttggttatcatctgttgatctccgggggatgttgctcaactactaccaaactagagtggagaaatggaatatgagaataatttgtatggtgatatcagaatctgagtcatgtttggaatcaaattacattggtttgaatgctgaaagagatctgctatatgtgattgctgatgaaaaaggctgcaaaagggtgaaagaaatggaagaagatgctaattcaattcatgatgagaaatatacttttgagttagtttctgcagaggtgcatatcaaattgttgggaatcattgttggcaagcaattcataacagtgccattgtcaggcatcacacatgaggacttcgcatggagtaagaagttatcgaggctaaagctacttgctctattcttcttcaataatgttctattgtctaacaccaaatatttggagcaaccatgggatccgggaggttttaattcatcggcatggagacaagccgaattcaaggagaggggattgttagacaccttgttgggctgcaccacagctggtccgctacgcaaatcccggcccaagcaaacccaggaagagcaatacataacgcaatag

SEQ ID NO: 7918 - DNA, 372 bp, Oryza sativa
  Clone ID: PAT_MRT4530_14469C.1
atggcttctgatgttgcgatggcgattgttctctccctcggctgcgccgtggtgggcggccccgaggtgctccgcgtcctgctcggcctctccggccggagcctcgtcgacgacgtcgccatttgcgtcttcgtcttgggcgccgtcaccgcgccagtcctcgggaacatgcttctcgcgcgctacgtccgcgtcgttcgaggcgccgccgccgcggcggctgcgcctcatgctcccgccgtggatcccttcgcgcgggtgactgttgcggtggcgctcgccgtcgccctcgtcgtcgccgcctgcctcatcctcgtcgtcccctcctccgcccactccgccagccgcgaccccggctccggcgctgcctga

SEQ ID NO: 7919 - DNA, 270 bp, Oryza sativa
  Clone ID: PAT_MRT4530_1446C.1
atgttcattggtcgtaattatccaactaaaatacgactgaatggtgggctgcgggtgcatggttttgctggtcgcacccatgctttcctctggctgacgttctcagccaagggtgagcatgatggagttgggtcggccgggggtctgtcacaatcactcgacatggtgacgtgttcatcatgggtgcatgatgacgtggtgacatgccggtggattgtgtcttgtgggtacagttgtgcacctctggccagagtaaaactattcgaatag

SEQ ID NO: 7920 - DNA, 300 bp, Oryza sativa
  Clone ID: PAT_MRT4530_14470C.1
atgatcttcagcgctcctccccaatacgaggaaagcctcccggcagctggatcacgaggaaggcgggtcgaggccatagaaaacaaggaagtcgggaggaacgcggctgttacggcgggagcagcggcagcagtagctgacgcggaaggggatcgtggagccaacgagaagcggctcggctccagccgggtcacattcaggcaacaggggtggacgacgatggtggatgacgatcgaagatgcgtggagatggagacaggcaggaaacaggggtggtcgatcgatatgatgaagaattaa

SEQ ID NO: 7921 - DNA, 326 bp, Oryza sativa
  unsure (1)..(326): unsure at all n locations
  Clone ID: PAT_MRT4530_14471C.1
aaaaaaaaatcacaacacctttttttatttatcaggttcaaaaccttcacaaaaatacacacttccggtacaaattttacccttttttcaatacttgtacattcattcacgcggtccaaaaaaattcgttcatttttatcgggcacgttcgttcattttttggaccgggttcacacacccacacttttttttaaaaacccccattgtngtaaacctaacttgctttacttaaggggattcgtttccattggaacacgggggggggggggtttatttttcggggaccaaatttgtggggttagcccacacttttttttttaccgggt

SEQ ID NO: 7922 - DNA, 866 bp, Oryza sativa
  Clone ID: PAT_MRT4530_14472C.1
ctgcaggaattcggcacgagggcgcatcctcctcctcttccccctctccccaccctccctctccgctcctccgcctccgcctccgcctccgcctccgcgtgctcccgtaaccgcgccgccgcagcctccgcctccgcgcggttcctcccgcaagcggcttctccgccgcgcgcgtccgtttctctcccgatccccgccgcccgggggggtgccgtgcactcgtcgccgtcgctgggcgcctgccgtgtcggcggcggcgggtgggcgagattttgtcgccgcgcgcggggcgggggcacggttggttttgaggcgagattgattgccaggttcacaatgaatacagaaggcctggattcttgtgtataggttctctcttctgagagacatcactgaaaattctcacagaatgttggagggtcaatcttgcttgatctcaaggtctttgccaagctcctgtgatcaagaatccagattagcatacatgacctaccacctccttgagataacgaggagtaagcgcgtatcaggtactccgaggattgaacctgatagtgttgctgcagtagcagtactgaccaaacgacctaaatctgccaggaaccatgagtgtgagcagctggattgtcaaggcagcaatgatcagggtttttcggattcaagtaccctaataagttctatcggtcgagataactcaatcagttgcctcgcccgttgctctcgttcagattatggctccattgcatcagtcaatcggaacttccactcacttgtccgcagtggggagctttacaaggaacggcgtcagttggggattgcagaacattgggtctatttctcctgcaacgtgcaggagtgggaagctt

SEQ ID NO: 7923 - DNA, 215 bp, Oryza sativa
  unsure (1)..(215): unsure at all n locations
  Clone ID: PAT_MRT4530_14473C.1
caaacccctctcgaacccaatccaacccaatcccctcctcatccaactccgctctgngcacatggccgcatgntgctcctcccncgncacngccgtctcctcctcctccnacaagcccctngccggcatccccaccgacgcgccgcactccctctccctccaacgcgctcccgacgccaggccantccgnctctacgactcctcatccagatccg

SEQ ID NO: 7924 - DNA, 423 bp, Oryza sativa
  Clone ID: PAT_MRT4530_14474C.1
ttggaggagttgatccgccttctccctgcaagaagctggagcccatgcgcacgtgggacgcgctcaatgatccagccgaggatggccgacgaggacgcgccagttcagagttggcccgccagcgggctacgccaccaccgtgttcgacgcgctggtgtcagctcgacgagtggtcggagtcacgcggctcacgacgccgcgtcacggtggtgcagccatccagctgcgcgacccgtcgcggcagctacgagcggtgggcgccccgatggtgccctcgtgcagtcggcgaggctgctcggccggcggggaacagcggcgggaggttcaaggtgaggagcctgcacgtcggcggcgtccagctcggtgcccggtgggagcggcgccgcggcgccgcttagaggatccaagcttacgtacgcgtgc

SEQ ID NO: 7925 - DNA, 1095 bp, Oryza sativa
  Clone ID: PAT_MRT4530_14475C.1
atggctactgttgaaatggaggatttctcaagcgctcaactctgggttttgactattttaatgctgattggtggtgaggtattcacttcaatgcttggcattcactttatgagagccgaatttggtacaaaagagtcagtcagcacaagggatcactcaccttgcattgatattgagtctattacttccacaaaatttggtcccagcacccagggcacaaaagttacagtttcattttctgaactccgcatggaaaatggaggacatgtagagcccaagacgattaaatttttaggttttgtagtgatgggatatcttctaataacaaacttaggcggctccctacttatttacctctaccttaacctggtaccaagtgcacataaaattctaaagagaaaaggcattgggatcatcgtattctcagtatttacagccatctcctcagttggaaattgtggcttcactccagtaaatgagaatatgattatctttcagaagaactccattcttctattgctaattcttcctcagatactagcaggaaatacattatttgcaccatgcttgagattaatggtgtggtcacttgagaagattaccggaaaaaaggattgtcgttacattcttgaatatccaaaggccattggatataaacatcttatgagtaccagggaaagtgtttatttgactttaacagttgtgagcttgatcattctgcaaaccgtattgttcctctctttggagtggagctcggtagctttggatggaatgagcaactatcaaaagatagtatccgctctatttcagtcggtcaatgctaggcatgcaggtgaatctgttacagatctgtcaaacctctcttcagcaatcctagtcctatacaccatcatgattgcatatggaaatgtggggttctcggttggctacagctgcaagaggctactgaaccatgatgcacgctgcaaggatgcctcgtacgggtttgcggggaaatggagcgacaatgggaaagcgatcctgatcatcgtcatgcttttcgggaggcttaaaacgtttaacatgaagggtggaagagcctggaagcttagataa

SEQ ID NO: 7926 - DNA, 1679 bp, Oryza sativa
  Clone ID: PAT_MRT4530_14476C.1
gcaaataaggaagcacccaatacatgctgtttagctccacacaaatagttagaaaatgaatcattgtcttgtagtatcccacaaaaaactccaaactttccgcacatttgcagctagcaagttctcttcttttaccaaatctgcacagaagtctataaaatactccttccagttcatctaccaaaacaatccactctttgtccatgtagcttactttgccctgatctcctttgctggatatggatctctaaaggtcctcaagccacgagacaagtcaaatactctgaaagacttggacgtgctatttacttccgtatctgcatcaactgtttcaagcatggctactgttgaaatggaggatttctcaagcgctcaactctgggttttgactattttaatgctgattggtggtgaggtattcacttcaatgcttggcattcactttatgagagccgaatttggtacaaaagagtcagtcagcacaagggatcactcaccttgcattgatattgagtctattacttccacaaaatttggtcccagcacccagggcacaaaagttacagtttcattttctgaactccgcatggaaaatggaggacatgtagagcccaagacgattaaatttttaggttttgtagtgatgggatatcttctaataacaaacttaggcggctccctacttatttacctctaccttaacctggtaccaagtgcacataaaattctaaagagaaaaggcattgggatcatcgtattctcagtatttacagccatctcctcagttggaaattgtggcttcactccagtaaatgagaatatgattatctttcagaagaactccattcttctattgctaattcttcctcagatactagcaggaaatacattatttgcaccatgcttgagattaatggtgtggtcacttgagaagattaccggaaaaaaggattgtcgttacattcttgaatatccaaaggccattggatataaacatcttatgagtaccagggaaagtgtttatttgactttaacagttgtgagcttgatcattctgcaaaccgtattgttcctctctttggagtggagctcggtagctttggatggaatgagcaactatcaaaagatagtatccgctctatttcagtcggtcaatgctaggcatgcaggtgaatctgttacagatctgtcaaacctctcttcagcaatcctagtcctatacaccatcatgatgtatctccctggttacacttcgtttttacccagacatgatggtgaggattctaagaccgagaagataaacaaaagaaaagggctattggagaactggatcttctcacatatgtcttatttggctatctttgtaatgctaatttgcatcacagaacgggactcgatggctacagatccacttaatttcaatgttttcagcatattgtttgaagtcgtcagtgcatatggaaatgtggggttctcggttggctacagctgcaagaggctactgaaccatgatgcacgctgcaaggatgcctcgtacgggtttgcggggaaatggagcgacaatgggaaagcgatcctgatcatcgtcatgcttttcgggaggcttaaaacgtttaacatgaagggtggaagagcctggaagcttagataacatctaaccaatttcagaataaaagtag

SEQ ID NO: 7927 - DNA, 523 bp, Oryza sativa
  Clone ID: PAT_MRT4530_14477C.1
attccggtcgacccacgctccgttggtacgttgcactagatgaagtataaaaaaaaaagttatgtgtggaagcgtaagattaccaggttaagtgaagtccttataggcaaatcaaatatttccagtgccagaaagacactcacatgggtgtcctttttcttaaaaaaagaggaaagacactcacatgacataattatttgttgctctaaatccactgacatggatgattataaaaaaactattaataccaccttaaaataaaattatgtattacaaactaaaatttgaaaccataataaacatttacttttgtcatgtattattattagattcagttgcaatgaatggttattttttccggtacttgatattgataaaaaaaaattcactagccaagaagagccatagtagaagaaatgttttttggctagctatcatatcaagttcactacactccatcgcaaatcatttaactctacaaaatcagaaggaaatcgtgcatgaatggaaagaaaaaaaaaaa

SEQ ID NO: 7928 - DNA, 362 bp, Oryza sativa
  unsure (1)..(362): unsure at all n locations
  Clone ID: PAT_MRT4530_14478C.1
tttgttaatttcctctctctttctgtgattggggggtttgtttgactncttctggcgcctccaaacaatcnatcatctcccatcggcgggggcagcagacccgatctttctggtgattcaaaagatgggggggtactactagcgtgagttctggcatttcagcgaccagctccgcctccacaacttctccagcctctccatcgccgactccatctgggcctccccctcgcctggctccgtcgatcatagcancaacaagctctccctccccaacaacagcaacaacaactccaccggcaagacctacttcaacaaggtccctctggaggccgggcaacaacaacttcaacttcaactacaac

SEQ ID NO: 7929 - DNA, 348 bp, Oryza sativa
  Clone ID: PAT_MRT4530_14479C.1
atggtgaagcgccgtagcactggtagcatgggcaccaagggggagaccctaggtagcacaggcgtgcgtacatggacatggcgctacaccgtagcaccgaggggagaccctgcacgagggacatggcacatcatagaagcatcgtggggagatcttgggtgtacctgttggcctgtggagtggacatggtgcaacattgttgcaacgaggggagatcctgggctgcataagtgcgcgtacatgttggtccgtggaggggacatggcgcagcgctgtagcaccggtttcataggagagatggagcaatgtcgtaacacagagaggagatccttggtattcgcctactga

SEQ ID NO: 7930 - DNA, 1889 bp, Oryza sativa
  Clone ID: PAT_MRT4530_1447C.1
gcaccggcgcggggtcttgggggggggtgggggtttggcggagatggtgtggttgtagtggttaggattcatgcgatcgatgccgttccagctcaagaacggtcaccaccaccacggcgccatggaggggaagccgccggtgacgccgatgcagcagcagcagcagcatgcgccgccgccgagggtgtcgaggtttcggaggttgctggtgagggtgtctgcgtcggagaggctcgccggggatgggaaggagaggggggagaaggaggcggagaaggtctccgcctccgccgccggcggtgaggtggaggccgggtcggtggggctcgaccgcatggtgctcagcttcatggaggattccgcggccgtcgagcggccgcagcgcgggcgctgcaactgcttcaacggcagcaactacgaggagagtgacgacgaggagggcttcttcctcccctccgaccactcctccgcctccgcccccgccgccgccggcgacgccttggagtctctcaagggtttggtgcagagcgcgagcgtcgcggagcggaatcttctcgcggacgcgtcgaggatagcggagaggtgctgcaagggatccaagggcaaggcggagtgccgccgcgcggtggccgacggcctccgcgcactcggctacgacgccgccgtctgccgctcgcgatgggagaagacctcctcgtaccccgcaggtgaacatgagtacatcgacgcggtggtcggcgaggaggtgaggctcattgtggaggtggacttccggtcggagttcgaggtggcgcggtcgaccaaggcgtaccgggcggcgctgcaggcgctgccgccgctgttcgtggggacgccggaccgcctcgggcagatcgtggccgtcgtggcggaggcggcgcggcagagcctgaagaagaagggcctgcacttccctccatggcgcaagccggagtacatgcgcgccaagtggctgtccccgcacgtccgctccggcgacaaggccgccgccgccgctaaaactgtgacgtccactacgtcggcgacggcgacgccggtctcggcggcgagcttctccggcgcgttcgagctcctgttcgataggaaacagagcggggagatccccgccgcggagaagatcacggtggtggtgtctccgtcgccgtggcgcccgacggaggaggcgagcaagaagaagccgccgccgtcgccatcgccgccgcagctgtggcagcagcatcagcagcctcccaaagcgaaggtcgtcacggggctcgccgccgtcctctgagcgtggcgtggtgaataataactaccactctcctagaactactaccaccactaccatcactagttcatcgattcttttctttgttttcctctcctctttttcgtttctttttccaccgcgcgcttcgatccgtttggggatctagtttttggtgttttggggttttccggggtttttttcggaaaagagaaaaaacactttgcgttccaatttttttccctctcatcttccctttcccccctcttctttttttgacccttgtaatttttggttttagcattaggggctttttgtgaagctgctgttcttcaccccttctgccgagtagaactagtaatctgttacagattgtaagcagagtgatcaagtgatgctacttgcttgcttgctgcaaagcctcgtgatcttctgctgcttctccacttgtagttggataaatcctaaaaaaaaagtttccctcttgttttaccagtttttagtattaccgcccatccttgttaagttgtagcacttgtaatctccatggaagagatgaacaatgagtaattagctcagattcttctgctgctccttgaaaaaaacatccatgagattaagctgc

SEQ ID NO: 7931 - DNA, 135 bp, Oryza sativa
  Clone ID: PAT_MRT4530_14480C.1
atggcagcggagcccaagcttgatgtagaggtgaagctcatggaggaggagcgggtgctggagcccgagttgacgttcttagctcaaggcgaatggatagtgacgacaaactttgacaacccaagcacgaagtag

SEQ ID NO: 7932 - DNA, 202 bp, Oryza sativa
  unsure (1)..(202): unsure at all n locations
  Clone ID: PAT_MRT4530_14481C.1
tntgactacacccgcttcgcttcctccnctctctaagccggggaagctaagccatggggtccgtnaccgcccgnaccncggtcgnagccctccgctcgtcggcgtcgctcaagtgtaccttnctagggcaatcctncacccgnntagnccgngcaccgactacgaggcgtaatatncgggngnaggccaaggntnagtggat

SEQ ID NO: 7933 - DNA, 340 bp, Oryza sativa
  Clone ID: PAT_MRT4530_14482C.1
tagctaccgaaatcggcgtcgtcggggcgtgtatggcaacccaagcgcgaccactcccctacgtaaggccctactgggcgacataaccactgctcagctggacccaccatggcgacgtgttgcacgcgccgaccggcacaacgtgctccggtctccccacagcatgctgttgaacaacaagcgccagccctacgacgatttccggctggccggccaccaaaactacgtggagtcgtggggcacggggcgcgccgcgtcacgtataccccgtgtccccggcggcgggacgcaccgcgccgttcagggagccttctgcaacatgagccgcggcgggcgcatg

SEQ ID NO: 7934 - DNA, 394 bp, Oryza sativa
  Clone ID: PAT_MRT4530_14483C.1
aactaataaacttgatattccaagagctaacacagattaactagataaatacctttcttaagtaacctcaatatagattaacagggtctggtggatacttggacccccttatattacaaggttaaaaaccctatcttttgttgctggttccttgcgggaaaatgggggaagaaccttatgcagaattggatttttttcccttggttaacaaactcatgtttaatccaaccttgcccattttaacccaaaaaccaatccttaatttttcttttgatttagaaagatttagcgaagggaggaaaaaaccaagtgaccagatgatttcttctgttatggtacaccgaaatggcaaaactccgatgccatcatcacagttttgaaaacaatcgggggt

SEQ ID NO: 7935 - DNA, 1423 bp, Oryza sativa
  Clone ID: PAT_MRT4530_14484C.1
ttttttttttttttttgaaggtgaaccaccgcgcacatagtaacagctcattccaacagagtgaacatcagttattattaagccaagttgtgagtacatcagtcatgagatgacaagcaagctggacgctggactgatgcatcagtgggcacgaaaggagtgatctactagtgcccgtatgaattcctggtagtaccgtttgtcagatgttcaaacttcttactgcctgtcagtatttcttcagcagctttctccacgcatgtcagtgcatactgaacatcactatcagaaatttggtagtggatgacaagcctcatgctcttcgagcctgctggcatggcaagcacattgcgttgttcaaggacttgacacagtttgtcaggtgatatgcgtgaatccacaatatcaaagaataccatattggtctccactgaagttgtatcaactctaaaatgcttgattttcttcagaccatctgctaaaactttagcccttctatggtcatcagcaagttttcctacagtgtcgcgaacggcaacataggcagccgcacaaagaattcccacttgcctcattccaccacctagtgtcttcctaagaattttagccttttctatgaaggccgtcgaaccaacaataactgatccaacaggagcgcctaaccctttagatatgcacaccgagactgaatccgcagctttcacaagtcgatgaacaggaactccaagggccacagaagcattaaaaatgcgagctccatctatgtgaagcttcagaccatgactcttggcaacttcaccaacctcgtcagtatattcagcagacagacactttccaccacagtttgcatgggtattctccaggcagatcagccttgtggtcggataatacagcgccccatccggatgcctgatggcgacgacaatcttgtcgatgtccatggttccatcggggttgttcctgacggtcttggggtggacgccgccgatggtggagatcccgccgttctcgtagatatggatgtgggagttgtcgccgaggatgacctcgctgcccctggtgtcgcagtggacgaggacggagatgaggttggccatggtgccggacggcacgaacagcgcggcctccttgcccgtgatcctcgccatctccatctcgaagcggtgcgcggtcgggtcggcgccaaggacgtcgtcgtccacgtccgcggcggccatggcggcgcgcatcgcgtcggagggcttcgtcaccgtgtccgaccgtaggtccaccacgttggtcaccattttgaggagctcctcctagcctccaactgcacggaatcagacggcggccgaggcgcgggacgagaggagaggcgcgggtggagacgggacgcgatgaggcgcggtccgcagcagcaaaagtgggcctcgtgccgaat

SEQ ID NO: 7936 - DNA, 2421 bp, Oryza sativa
  Clone ID: PAT_MRT4530_14485C.1
atggacaaccatggcggcgacggtggcgccggcggcggtggaggaggagagggagagaggtcggtgcgggtgaatattgaagctcaggcgagtgatccggcggggatggtggtggcgatggcgacgccgttcgagccgcagctgtcggacgattcgccgccgaggtcgagcatgcagagcgtcgcggaggtcgtcgacgacgcggcggcggcggaggcgaccggaggaggaggggacgaggtggtggcggtggcggcggtggggccggagcggaggctgacgatgctggcgctgcggctggcgatcctggagaaggcggcgagcgggctgggcgcgctcggcttcatctgggccaccgtcgtgctcctcggcggcttcgccatcacgctcgggagggtggacttctggtcggtcaccgtcatcctcctcgtcgagggcgcccgcatcttcagccgcagccacgagctggagtggcagcaccaggccacgtggtcgctcgccgccgcaggccgctccagcttccgcctcgtcgcccgctccttccgcttcgtgttccacctcgacgacggcaaggccgccgccgacgccggcggcggcggcggcggcgcgccgaggatggggcgacggcgatggcggatcagctggagcttcctgtcgcggcacgtcgggagggtgttctactggctgcagctggcgtcggcgacggcgtgcgtcgcggtgtcggcggtgaggctcgctgggcaagacttcggcgaggcggaggacgcgcggaccaaccggaggtcggcgctggacatcttctacgggctcgcgctggcggaggcgctgctgttcttgatggagaaggcgatgtgggagtgggaggtgagctacggccgcctcctccagcgcgtcgccggcgagtgccacctcgccggcgagcccgggctggtcgccgtccgccgcttcttctacgacgcctactcccggtgcgtcgacgggagcatcttcgacggcctccggatggacctcgtctccttcgccgaggagctcctcgtcgggggctcccacgacgagcagcgcatcggcgtcgggatcctcgtcaacgtcgcggcgaacccgcggctcggggaggccgcgctgcggcgcgtcggcacgtcggcggcggtggtggaccggctggtggagatgctcacctggagcggcggcgccgccgaggccgccgccagggcgtccgccgcgctcgtcgtgtccaagctcgccagcaagaagcggaacgcgctccgcgtcgccggcgtccccggcgccatcgagtcggtgtcgtcgctgctctacgccgccggcgacgaggagtgcaacctcctcggcctcctcatcatcaagaagctggcgcgcgaccacgacaactgcagcaagatcggcaacgcgcgcggcctcctcgacaagatcatcgacttctccgccatcggcggcggcgccgtgatcacgccgtcgcgcgccaaggccgtgaagcggtcgctgcaggtggtgaagatgctcgcggagacgacggggagcaccgggaagctgctccggcgggaggtcgccgagatcgtgttcacggtgagcaacatccgcgccgtgctccagcacggcgccggccacctcgagctgcagcggctcggcgccgaggtgctcacccgcctcgccatggacgcggacgcgcgcgagaagatcggcggcaccggcggcgtcgtctccctcctcctcgccatgccggcgaggcgctcgccatgctcgccctcgacagccgccgcaactgcgaccgcatactccgcgccggcggcggcgcgcggcgccgccaccgtcgcccgcctcgtcgacgcgcttaccgacgacgaggccggcatcggcgcggcccggatcctgaccaacctctgcgcgtacgccggcggcgagtggttctccgacctccacctcgtcacctccggcgccgccacggcgctgcgcaacgtgatgaccaccaagaagtccaagctgctcgaggtctccctggggctcgtcgcccagatggcgcggttcatgggcccgcacgagctgtcccaccacctcgccggcgccggcgtcgccggcggcgaggaggagctggtcggacggctggtcgccgtgctggcgaggtacggctccccgtcgatccgggtgccgcggatccggcggttcgccgtggagctcgccgtcgcgatgatgacggaggggaggcggcggcgcggcgcggtggcggtgatgatggcggcggccgggatggggccggtgctgcggcgcgtggcggagaccacgtcggagctcgagtgcttccacgtcttctccggcagcgccgggctgagccgccacgccgtctccctctccgccctcgtcgacaccgcgctcgagctcatgggggcacgtggcaccgacgaccaatag

SEQ ID NO: 7937 - DNA, 2439 bp, Oryza sativa
  Clone ID: PAT_MRT4530_14486C.1
atggacaaccatggcggcgacggtggcgccggcggcggtggaggaggagagggagagaggtcggtgcgggtgaatattgaagctcaggcgagtgatccggcggggatggtggtggcgatggcgacgccgttcgagccgcagctgtcggacgattcgccgccgaggtcgagcatgcagagcgtcgcggaggtcgtcgacgacgcggcggcggcggaggcgaccggaggaggaggggacgaggtggtggcggtggcggcggtggggccggagcggaggctgacgatgctggcgctgcggctggcgatcctggagaaggcggcgagcgggctgggcgcgctcggcttcatctgggccaccgtcgtgctcctcggcggcttcgccatcacgctcgggagggtggacttctggtcggtcaccgtcatcctcctcgtcgagggcgcccgcatcttcagccgcagccacgagctggagtggcagcaccaggccacgtggtcgctcgccgccgcaggccgctccagcttccgcctcgtcgcccgctccttccgcttcgtgttccacctcgacgacggcaaggccgccgccgacgccggcggcggcggcggcggcgcgccgaggatggggcgacggcgatggcggatcagctggagcttcctgtcgcggcacgtcgggagggtgttctactggctgcagctggcgtcggcgacggcgtgcgtcgcggtgtcggcggtgaggctcgctgggcaagacttcggcgaggcggaggacgcgcggaccaaccggaggtcggcgctggacatcttctacgggctcgcgctggcggaggcgctgctgttcttgatggagaaggcgatgtgggagtgggaggtgagctacggccgcctcctccagcgcgtcgccggcgagtgccacctcgccggcgagcccgggctggtcgccgtccgccgcttcttctacgacgcctactcccggtgcgtcgacgggagcatcttcgacggcctccggatggacctcgtctccttcgccgaggagctcctcgtcgggggctcccacgacgagcagcgcatcggcgtcgggatcctcgtcaacgtcgcggcgaacccgcggctcggggaggccgcgctgcggcgcgtcggcacgtcggcggcggtggtggaccggctggtggagatgctcacctggagcggcggcgccgccgaggccgccgccagggcgtccgccgcgctcgtcgtgtccaagctcgccagcaagaagcggaacgcgcatccggtcgccggcgtccccggcgccatcgagtcggtgtcgtcgctgctctacgccgccggcgacgaggagtgcaacctcctcggcctcctcatcatcaagaagctggcgcgcgaccacgacaactgcagcaagatcggcaacgcgcgcggcctcctcgacaagatcatcgacttctccgccatcggcggccggcgccgtgatcacgccgtcgcgcgccaaggccgtgaagcgacgacggggagcaccgggaagctgctccggcgggaggtcgccgagatcgtgttcacggtgagcaacatccgcgccgtgctccagcacggcgccggccacctcgagctgcagcggctcggcgccgaggtgctcacccgcctcgccatggacgcggacgcgcgcgagaagatcggcggcaccggcggcgtcgtctccctcctcctcgccatgttcctccagccctccatcaccgacgagggcgacgccgcgcgcgtcgaggccggcgaggcgctcgccatgctcgccctcgacagccgccgcaactgcgaccgcatactccgcgccggcggcggcggcggcgccgccaccgtcgcccgcctcgtcgacgcgcttaccgacgacgaggccggcatcggcgcggcccggatcctgaccaacctctgcgcgtacgccggcggcgagtggttctccgacctccacctcgtcacctccggcgccgccacggcgctgcgcaacgtgatgaccaccaagaagtccaagctgctcgaggtctccctggggctcgtcgcccagatggcgcggttcatgggcccgcacgagctgtcccaccacctcgccggcgccggcgtcgccggcggcgaggaggagctggtcggacggctggtcgccgtgctggcgaggtacggctccccgtcgatccgggtgccgcggatccggcggttcgccgtggagctcgccgtcgcgatgatgacggaggggaggcggcggcgcggcgcggtggcggtgatgatggcggcggccgggatggggccggtgctgcggcgcgtggcggagaccacgtcggagctcgagtgcttccacgtcttctccggcagcgccgggctgagccgccacgccgtctccctctccgccctcgtcgacaccgcgctcgagctcatgggggcacgtggcaccgacgaccaatag

SEQ ID NO: 7938 - DNA, 405 bp, Oryza sativa
  Clone ID: PAT_MRT4530_14487C.1
gctaaaactttctatagataaggcagaaagaaactatgggcaaagttattgagaccaccaaaggttttatgacacacacacacacacaacattcactatatatataagacaccatttagagcaaagctatccaagcagcgcatattaccctccatttccaccgtttcttagagggaaagggactttgagctggaccattgcatagccatattcgaagccaagggagctgagagtaataagcgtttgggttaaggttaacgacacagtttgccttgtagcctaccctttcgggatttcctcgaaaggggaaaacccgttaatgtaagccttattctgttttaatatggaaggtaatttttccctttaacttatttcctgcaccgtgttgtttttagatcaaagtgt

SEQ ID NO: 7939 - DNA, 441 bp, Oryza sativa
  Clone ID: PAT_MRT4530_14489C.1
atgtcgacacggccaagcaagacagctatgtacatcggtgaagttcctgttccatccatcgaccaatcagacgagaaaccattaaccttgccagccctggctggcagcacagtgcaaaggcgtgtcacccttgttgttctgtgctgtcaggagacttggggccttcctgtagatgatgcctgcattcctcaggtagctggcgccatcaccacaggcggctacaacatggagttctgtgtcgccttgaatgggccacccttgaggccatcaggagatggtgatagagtggcaggtactgctgatttgggtctggtcgatcagaccgggcagtggttgccgtctaatcggcaacacaccggcggtcagaccggcgacgactacaggcgcacaggcgatcttcaggcagttggaccgacggtatcgacccggttagaccgccag

SEQ ID NO: 7940 - DNA, 2127 bp, Oryza sativa
  Clone ID: PAT_MRT4530_1448C.1
gtcggtaaaatagccgtgcactgtcaaactcatgctaattaatcaacgtccaactaacataagcttacttaatcaatgatagagacgtgaatacttccacagaacactcctacaatcccttggaaattacagccattgactttgaccagacaacactccaaacagtatacattcacgagagtcatgacgaagttcggcggaacttacaagggagctcagaaaatttgagtgaagcattccaaatctccagcattttgatgcgtccaagaagttcagcaaaatgctgacgtcccagaaagaaaaatgttgtgtagccatcgagccttcagaaagcttcaaagttacttgcagacttccaaggcattccagcaaagtttgatgaactttccactgcccattccgtgacagcaattcgcaaggaaacaaaagataaagtctaatatattcagtactatactagctagcactgctgataaattggcccattttacaagtagctcaggtatatgatctgaagttggaatgttgctggcccaacccacactgctaagtgctactgctacaccagttagtagaattggcccgtcataattcataagacaaatcaaccaaactggctgattacaacagaagggaccaatcagaattcagaagaacaagaaacacattgcaagtttgcaacacagctctgaactttgtgacagacgtttgtcacaagtcacacgacccgttgaagagtcgtggacttgtggtaagaggcagtggaaaatctgtgttcaccagaggccaaatcagaaaaccataatgtacagaattttaacggcgttgcttcttcctgagcaccaactgaatctgatcccttttttacttcttcgtcctcctcggctcctcctggtcattctgcgccgcagaaaattcggtgatcctcgcctgcttctcgcagtccagatcggattcctgctgtttgttcgcgttgtattcctgatccttgtctttcccccacagcaacatgtaaaggccgagtatgacaaccactcctccgattatgcttccaacgtatagattttcaccaaacatgaagtaggccaggatggccaccatgatcgtggagagagggttgaacatggtgacgaagacggggcccttcttctcggtgcaccatagctgagcgaagaccgtgaagccattgcaggcgaatccagagtagacgatgcaccagaacttgaggccgaagcctatgcgccaatcttccggcttgtgctgcatgaacgctgtgaagacagcagactgtattcctcccacagtgcacatccatgctgtcagtgacagctgggctgggtacctcttcaacgacgaagcctgcaggatgtaccagatggaccagcagatgcagctggcgacggcgaggaacgatcccttgagccagctctcatgcacgccgccgccgccgccgccgccgtgtatgctgatcggcgccttccaggggctcgatatcgcggtgcctttgtacagggtcatggtggtcaccccggcgaacgacaccaccgtcccggcgaccttcgcgagccctcgtatgctcctcacgtcgacgatctccatcctgacagcatcaagattaatttgatcgcgagctaatgtcaaccaggcactcaaactgcagtaaagacgatcagactctgcgtgcgttcgtcgtgaaatgcgtgaaaatgttgggcacctgacgacgatggcgatgacgaacgtgatcgaggcgacggtgttcaccacggacgtgacaaaggttggggatgtgtacattaagctcgcgaagtacatgttcagagttaggctcacccctagaagtgagagcacgaagatctccagaaacagcatcaacgtcattctcggcctcagtttcttctcttggtagtaggcgaaaggcgcgaggaagacggcgacaacgagatgccggtaggtgacgtagatgaaagggttgagccccttgttgaacgcggcctcggtgatgaagtacatgagcgtgtagcacagctgcgacagtatcatcagattgtgcggcgcgtaccttctccatagatctcccatcgatgctagtacatgaagagccatcactacaatactgtactgtcc

SEQ ID NO: 7941 - DNA, 237 bp, Oryza sativa
  Clone ID: PAT_MRT4530_14491C.1
cctgtcggtgacctagagaggaggtggggggatgaggacatcaacaccatcgatacatccacgtctctgcaagtacgacttgatggtcctattacccgcgctcgtgcacgtcaactcaactatcaggatgagtgccctcgtggccgggttgacacacaccacaaattcgcagcaaccattagagacggtatatcggttgctaaggcgcagcgtctttggacggttgtagtcgtgcca

SEQ ID NO: 7942 - DNA, 563 bp, Oryza sativa
  Clone ID: PAT_MRT4530_14492C.1
atgttggagacagcctccatccacatcctccactggaagaaccagattccttctttgtgcaatacatttttgggagctggtccaagttggatgattcatgtattcgactgcttgagcgttgctcccatccagcaacttgtaccgccccgcccgtgcgaagcccgcttgagccgcgcgcaggctcgccccaaatctgcccgccccgcatccacgcccccgcctgtgcgctcgcttgctcgccccgcatttgccgcccgcggcgggggaaccagcgctccttcaccagcggcttcattcacgcccccaccgctgccgatttcttatctcatccagtgcccatccatctgcgcaaggagcgacggtgccgtgggtattttttgcccctatccccctggacagctcaagcagcatatgccccctaccggtttagggtttcctctcagaacttgtatgggtgatgaaatgggagacaattttataagcttagaagaacaagaggagtacagaacaatgactgccatgagatttaagacagagaaacaaggtttcctcttctataacag

SEQ ID NO: 7943 - DNA, 1172 bp, Oryza sativa
  Clone ID: PAT_MRT4530_14493C.1
cttcgccgtggccgcaggcggcgcaccggacggacttggtgcggggcagggtggggtcgccggcgacgtcctggagcacctgggtgaaatccccgggcggtgtggtgcaccacgttatggccctcgagttatctcgtattgttgtcgtcatgatcgacggtgacccggcggcggcgggatcttctgcgatagcctgtggaggcgctggcgatgtcggcggatgcgggtcactggcggcagcaagtggagtggctgtggtggtggtggccatgactacggtcaccggaggcatggcggcctcggacggcaagacgagggcgtgggagatggctacatttggccggcgcgacatcgtttgtgtgaaggagcagggcgggttaggaaagggcaagaatgccctcgagttatctcgtattgttgtcgttgcgagcgacggcgacccggcgacggcaggagcttcagcgagaggcgatggggagaagggaaccgggcgttgctgcgagcgggcgatccgacgagccaatgaggtcatcctcgagctcctagcgcgcgcggccgtcgagcgagcccccacctcggcgttcgtgccggagaccagagaatgggaagacaattttgtacctctcggtggaaccgtcctctgcgtgaggaggacggagaaggccgacgacggcgcagccgaagagcggcagtgggaggccggcgacggcgggggtctggtgctgcgaggaggcggatgcgaggcccttgtcggcgcagtggcaacctccagctacgcccactggcgtcttgacgaggtgcagcggggctgcgggcgcttgtggcgacggtggcagcggcatagcggggagtgggtgctcgtggaggcgatggcagcggggagcttcgacgaccagtaccttggccgccttggccggttctggtcggtgcagcagaggagtgtgggcgatgacgctggcgaaagccttgctgtacctttggccggctcgatgacgacgacgcacccattggcgccatttcccttcttgaaggcgttgtcaatgaagtggctctttcatggcttggctgatgtccattgtggatgtcggagctgctttcgctttggcaacttccgtggcttcaatgtcgctgcagtggtgaagtcggcgctgctgggttgcttggccggctag

SEQ ID NO: 7944 - DNA, 107 bp, Oryza sativa
  Clone ID: PAT_MRT4530_14494C.1
taagttccaagctccaagaaccatggccggcacctggctgtcgccgccgaccgtggccgggctgctgttggcgccatcgccgcgcgtgcggacaccatctgtggcgt

SEQ ID NO: 7945 - DNA, 1216 bp, Oryza sativa
  Clone ID: PAT_MRT4530_14495C.1
ccccaagaaccccccgtgcgccaccaccaccaccaccaccaccaccaccaccaccgaggaattctcgctgtcgccgccgccgacgacgacgaggagaaggagtatcgctcacaatcttccgggccgatggggagggcgccgtgctgcgagaaggaggggctgaggagaggggcgtggagccccgaggaggacgaccgcctcgtcgcctacatccgccgccacggccaccccaactggcgcgcgctccccaagcaagccgggcttctccgctgcgggaagagctgcaggctgcggtggatcaactacctccggccggacatcaagcgggggaacttcaccgccgacgaggaggacctcatcgtccgcctccacaactccctcggcaacaggtggtcagccatcgccgcccagatgccgggtcgcactgacaacgagatcaagaacgtgtggcacactcacctcaagaagaggctggacgacgaacggaagctcgccgccgccggcggtggcggtggccgccggccgcatacgcgcaagcagcccaaggcggcaaagagcgccgccgccgtcaagcgcgaggcgacgccgtccgtcagcgtcgacaccagtagcggcgtgacgtgctccacggtgaccgagtcgtcgccgtcgtcggccgacggcgaccaccggcggcagcagcagcaaacgcagcatgccgctgtcaaggaggagagcttcagctcgggcggcgagctgccggcggcggcggcggcgcccacggcagcggccgacatggacgagagcttctggtcgtcgacggaggtgaccgggatgatggccggcctcggcgacatggacgaggagctggccatcgccggcacgtcgtcggcggcggcggcgaggagcgacgacatggagttctggctcaagatgctcctcgagtccggcgacatgagggatttggccgtcttgtaatctatttaatttaatcatggcagaattaagcttgattaaattaattaactaccgggaagaattgatagtatctcttctctgttgtttttttttaccttcttttttcatctttaaaaaaaaaaaaaaacagtgagaaaacgatgggaaattcaggtgatattttcacctttgttagaaaaaggaatactgtggtagtagcaaaaatttctttggttcgttaaaaaaaaaaaaaaaaaactcgagactagttctctctctc

SEQ ID NO: 7946 - DNA, 250 bp, Oryza sativa
  Clone ID: PAT_MRT4530_14496C.1
gaataaaagctagggcatgcataatgggcactcttaccagacgcctcaatgttcagacagactaatcattcaagttctcaaagaatgggcacaagatagctcaggacaatgttttccatctatcagatcatccctttttgtacagttttaccaagaattacatttcacaaacagcaaatgaccactttaaaagaactatctccaaaaatgggcttcacacaataaggttgtttgaagtccatgggaaacc

SEQ ID NO: 7947 - DNA, 375 bp, Oryza sativa
  Clone ID: PAT_MRT4530_14497C.1
atgcggcggcacgcacgagaggtggccgagcgcgcgggaaaggcggcggcagtagggcgcaacggcaacggcggcggggcggcgtggcgacgacgcgcggtgaagagggccgcggccggcggcgccccgtgcggcggactgatgccgcacggtctgatgccgtgccggcgcccgctgtcccagttctcctccgcacgcagccagggccacggcggcgagcctcgacctcgcgcggcccacgagagtagcactaagaacgccggcttgatcccgaaggggtcgccagcgatcacttgcggggtagcggcagccttccagtcgccacctgcactgtccctgaaccgcctcacgtttcccctccagcgccaatgttga

SEQ ID NO: 7948 - DNA, 1896 bp, Oryza sativa
  Clone ID: PAT_MRT4530_14498C.1
atggcgggactaatcccgccattctctggcttcttccacgaggtcttggacttctacgagatccacgccctgcacctcgcccccaatgccatgatgatcctggtcatcttcgcgcacctatgcgagatgttcatcgggccccgcgcgggggtgatggggcagtacatcgagacccacctccgcaagaagtgggacgactggaagagggattggttctacaccgcgctgcatgaccacctccgtctccggctccccaccggcccacctgagcgatccgctggctggctggcggtctcggagcttggagaggaatacgacacagtgttagaccgccttaggggcctacggagcaaaggactgacggcgacgatggtgttcggcgactacttccgccaccgcatcgcgccccttcaagaatggtcccgcggcgcgtgggcctacactgggtacaatgacccgatgcgcacccatgtgggccaatgcttggattggggcaaggaagacgcgcgggcggtggttcgtcgggtgctgagcctggacaccgtcgagccgatgctgatcccggatgggatccttcccctctgcagcgaccgcgaccgagagagtatcctagccgtgatgatggcggttggcaccgccggaggtcggtcccgcaggggtgccgctgggggcggcggcggcggcgacgacgctgggagcagcaatgtggccgcgggcggcggtcgggctggcggttccggcggtggtggctccagggcgcctggcccgagccacggggctggtagaggcccggccgccaacccgaaagggaagcggaaggtttctgggttcgagccgccttcccatccacacggcggcggcgccgagcgcacagtcgaccggccaccgaccagccacaagcgtcccgccgcggcggagccggagcggaagaataagaggctccggaagatggggcagacggagccgtgccgggggagcttcatcgagccccggagtagaccttcaaacgccccccctccccgcccgcagcgaaatcccctcccgagggggctcgacagtgagtctccccggggatctaagcctgaaaggtcggggtggccggaggccggccaaaccgggaccgcggacaccacacgaccctccagcagggcccgagggcctcacactaggtccgactctgagtccaccatggctgagaccgtcccggtcctcgccgccgccgactccactgtccgagaggggctcaacgtccaagttcaggccctggcagatgagcgtgtggccctggaggccgagtgggcgcaggtcgcggcagaccgttcacgagtggaggaggggcgctgcaccgtggatgccctggtcgagccagggcgcaagatgcaccaggctcagctggctgagatccaggcgcgcgaggagacgctggactccatcatgcgcgagacggaggtggagtggcaggcggccctcgtcgcctccagcattctggacgaggcgctgggcgacatccgcctgcagtatgaggcccacgccgaggacttggtgcagcgggctgaggccgcccgcggggtcctcaacacggtcgcggcccaggaatggccggcgtcggaggagtctgaggccgcgatccggtggtgggtcgaggtcctcgaccgcacccaccgcgagcaggaggagctggactgggcgcagtccaccctccgcctccgcgaggaggccgccgccgagcatgcccgcaccaccaccaccgccgaggccgcggttgcgcgacgcgcggaggaactgcgcctccgggaggaggcttggcgggagcgtgatgccgcacttgccgagcgcgaggctgagatcacccgttgcgaggtggcggcacggcggctgggcgaccatcccacgtag

SEQ ID NO: 7949 - DNA, 714 bp, Oryza sativa
  Clone ID: PAT_MRT4530_14499C.1
attcggctcgagatgtgggtgaaacaacaaaagcccttccaacttctcaacaagggtggtagtgaatggtggacttcaaagtgcaacttctcaagtgttttcttaggtggggacagagctggtgctaacatagcctacaacgttgccacgaggctatgtgcatgtgatggcgctgctttaagacccttgaatttgaagggtcttattttgatacaacccttttttggaggggaagtgagaacaggttctgagaaatgcatggctcaatcacccggttctgctttgaacttggcagcttctgatacttattggcgcttggcgttaccgtgtggtgcgaaccgtgaccatccatggtgcaaccctttggtgaaggtgaagttggaggagttgaagctcatgcgtaccttggtgtgcatctcggagatggacatattgaaggataggaatttggagttctgcgatgctttggtgagagcagggaaaagggttgagtatggggtgttcagaggtgttggacatgcgtttcagattttgagcaagtctcaggtatctaagagcagagccaaggaaatgatggctcgtgttaagtccttcatggctctctgattctctgctttaatgttctttgctagcttcatgaatctgtctgagtatataaaattaaaatgaactcttgctgaaaatcaaactggttatttaaatagctaaatcttc

SEQ ID NO: 7950 - DNA, 420 bp, Oryza sativa
  Clone ID: PAT_MRT4530_1449C.1
atgaaccaggtcatcgccctcgacgacgatccgctcgacgaagcacgccagtgcgagtctcaggccccggatcatcgcacggccctccaccacaccaaccgtccagtgctccgtggtctcggtgaaggcgaggcaccgccgcagtcgaagccacggatgatgccaccgatgctcgctcgccgagacccgtcgtggaacacggagccgtcgaagttcagcttgcaccaccccggcgtcggcagagcccacctcacgatcagccaggccagctggaacgacgatggtgaggacgggagagcggcatggagcagcggggagctgcgctgggctgggctgggcagaggcgatgcggagtccgactccgatttgaagaaggccgcgcgctacgatatcgtgtggcttaatccggtcccactataa

SEQ ID NO: 7951 - DNA, 363 bp, Oryza sativa
  Clone ID: PAT_MRT4530_144C.1
atggggggatccggccgattcggccggatgcagccgcccgagcgctcgggcgagcaggggcgagcgacatgtgggtcgcgtcacccctctcaccacgaggcaagctctgtgaccaggcaaggcgacgaccgtggaggcgagctcggtagcgacggcaagggcgagccggcgacgagagaggaggcgagctcggcggcgagagaggaggcgagctcggcggcgtccggggagagagggcgagtggcggcggctggggagagaggtttggctttgttgctttttgagccggcgtcgtcgtccagcaggggagcgcggcgcattactaggggacgcggctctctccacgcctcgcctactttttcg

SEQ ID NO: 7952 - DNA, 852 bp, Oryza sativa
  Clone ID: PAT_MRT4530_14500C.1
atggatcccttccaccacctcaactcctccttctccaacccctaccacccactcctcgcctccccgccccaccacttcgcccccgacccactccccccacctcctcctccgccgccgccgccgctgctccccgccgacccgccgtcgctcgagcgggagcgcctcccgcagtggtcccacgccgagaccgccgccttcctcgccatccgcgccgacctcgaccactccttcctctccaccaagcgcaacaaggcgactctgggaggccgcctcggcgcgcctccacgccctcggacttcgccaggacccccgatcagtgcaagtccaagggaagaatactcggttgagagggcgcgcgcattggagaggaagaaggttaaggggaaggatcctgatgatgaccacgacggtggtggtgatggggatgaggatgatgaggaggaggcggatcagcaggtcgacgaggaggacgacggggcgtccggggacacgacgagggccgggtcgaagaagcggaggaggaaggcggcggcggcggcgaggaggacgggttcgacgggcggggtggagggcgaggtggaggcgatgctgcgggagttcatgcggcggcagattgagatggaggagcggtggatggaggcggcggaggcgcgcgaggccgagcgccgcgcccgcgaggaggagtggcggaccgccatggtcgcgctcggcgaggagcgcctcgcgctcgtccgacgctggcgcgagcgcgaggacgcgtggcgcgcgcgcgccgaggagcgcgaggagcgccgccaccagctcgtcgccgcactcctcgccaagctcggcgccggcgacgcgtccgcctga

SEQ ID NO: 7953 - DNA, 458 bp, Oryza sativa
  Clone ID: PAT_MRT4530_14501C.1
gtcctttttgcaaaaccgttatattttcttgaccaacctctcattgtcttctacagagaaaagggaaaccctaacaaaagatgagatgagagaaagaccatggactgattgatcgatcactagaaacgaaacgactgatctaacataaatagcaaatgtatcgggccgggcgtggcgcgcgcgcttcgcggcagtgcatcgtccggcggcggtgcggtgcggatggaacaatggggggagggatcgatcgatctcaggcggacgcgtcgccggcgccgagcttggcgaggagtgcggcgacgagctggtggcggcgctcctcgcgctcctcggcgcgcgcgcgccacgcgtcctcgcgctcgcgccagcgtcggacgagcgcgaggcgctcctcgccgagcgcgaccatggcggtccgccactcctccttcggggcgcggcgttcgggcttgcgcgcc

SEQ ID NO: 7954 - DNA, 606 bp, Oryza sativa
  Clone ID: PAT_MRT4530_14502C.1
atggatcccttccaccacctcaactcctccttctccaacccctaccacccactcctcgcctccccgccccaccacttcgcccccgacccactccccccacctcctcctccgccgccgccgccgctgctccccgccgacccgccgtcgctcgagcgggagcgcctcccgcagtggtcccacgccgagaccgccgccttcctcgccatccgcgccgacctcgaccactccttcctctccaccaagcgcaacaaggcgctctgggaggccgcctcggcgcgcctccacgccctcggcttcgccaggacccccgatcagtgcaagtccaagtggaagaatctcgtcacccggttcaagggcaccgagggcgccgccgccgtcgccgccgcggggacggatcagatgcagggggggcagggcggtggtgccgcggcgaggggggcctcgtcgtcgttcccgttccatgatgagttgaggaggattttcgacgccagggttgagagggcgcgcgcattggagaggaagaaggttaaggggaaggatcctgatgatgaccacgacggtggtggtgatggggatgaggatgatgaggaggaggcggatcaccac

SEQ ID NO: 7955 - DNA, 433 bp, Oryza sativa
  Clone ID: PAT_MRT4530_14503C.1
gataaaacaaacagatttattatgagactagctaaaaagctaaaaaactgtgagtgttttttcagagaaaatgttagatggatctccctccccttgagcccaacggctcaagggggccttgacccgcgccctgatcgggggcgcccagcccaatcgctggtgggcccccgtcacactgtgccatataaagaggggtggaggacgggacgggataacgttacaaggaacgagggccggccggacttcctcttcctcaacaacgactggtcacaaccctaaatcctctcactccctctttgttcattcatctattgttgttcatccattgcaaatagaaccacccgactagatctaaacctaggtgatccaatagacaaccctaacacgaaggccagacaatcaatcacaaaaccagatatattcagcgggaatt

SEQ ID NO: 7956 - DNA, 157 bp, Oryza sativa
  Clone ID: PAT_MRT4530_14504C.1
tttctaaacaccattacctgtatagactttgtggcaatccgtacgtcggcaccgttgattagaagagaggaggggacatgggcacccaacactcgagccagcactgaggagtcgcccgagcgagctagagacggtgccgacagtaccgatccccggt

SEQ ID NO: 7957 - DNA, 3540 bp, Oryza sativa
  Clone ID: PAT_MRT4530_14505C.1
atgtcggacttaggtggaaaggacggggaaattggtaatgaagatggagcgagcagcaagggaacaccatcacccaagggagccactacaccttttgattacagcaaacttaccattccctctcacaacttcgtctccgtgccttccgggcgtgctcctcaatttgatgggacacattacgccgcttggaagcacaagataaagttgtatctaatctctttgcatccaagtatttggaaagttgtttgtacaggtattgacgtaactcatgaagacatggagctcactttggagcaagagcaactcatccatcgcaatgctcaagcttccaatgcaattctctccgccttgagtcctgaggagttcaacaaggttgatagacttgaggaggccaaggagatatgggatactttgcaattggctcatgagggatttcccgccgttcgtgaggccaagattgaattattggaaggaaggcttggaagatttgtgatggatgataaggagacaccacaagagatgtatgataagatgatgattctcgtcaacaagattaaaggacttgggagtgaggacatgacaaatcactttgttgtcaagagacttcttcgtgcttttggtccaagaaatcccactcttgtatcaatgatacgggaaaggaaagacttcaaaaggctcaccccaagtgacattcttggaagaattgtgtctcatgagatgcaagtagaggaagctcgtgaaagtggctatggcaaagggaggaaggacgatggcaagggaaagaggcaatcaaagagagcttgcttcaattgtggtgaatatggccacttcattgccgattgtcccaagtcaaatgaagccaaggctaagagaggcaagaagaagccggagcgtgctcatgtggcggaggcacacatggcggaagtgtggtactccgaagatgaagaagcctccgaggccaagcccaagcccaagccaaaagacaaggttgaaggagagggtggtgttgctaccgtcgccttcaagtcatcttcttcaagcaaggagcgtctcttcaacaacttgagtgatgacaacgacgactcctaccaatactcttgcttcatggctcaaggccgcaaggcatactcctccggtggttcaagttgggttgtggatagtggttgcaccaatcatatgactggagagaggagtatgtttacaagtcttgatgaggagaacaaaactcatgagaatattgtatttggagatgatggtaaaggaaagttgggttacaattgcttgtttaccgatgaggatgtgacggtctttagaagggatgactcctccgtagcattcaaaggcaagttagagggtgatctctatcttgtcaatttcgatgtggatagagtgaatccggaagcttgtttgattgctaaatcctccatgggttggctatggcatcgtagactagcccatgttggaatgcggaatttggcaattcttctaaagggggaacacatcctcgggctcactaatgtcacatttgagaaagatcgtgtgtgtagtgctttccaagccgggaaacaagttgggaatctacatcctatcaagaacatcatgactacaacacgccctcttgagcttctacatatggatttattcgggcccgtggcttacataagtattggaggtgaggctcaagatgtcttcaagcgcttcgccaagcaagcccaaaacctctatgatctcaccatcaagagggtgcgaagtgacaatggaagagaattcaagaacactcaagtggaggaattccttgatgaagagggaatcaagcacgagttctccgccccctatgatcctcctcaaaatggcatcgttgagaggaagaaccaaactcttattgaagccgcaagagcaatgcttgatgagtacaagacttcggatatcttttgggcggaggccgtgagtaccgcatgtcatgccatcaaccgcttgtacctccacaagatcctaaagaaaacttcatatgagctcttgagtggtaagaaacctaatgtttcatattttcgtatctttgggagcaaatgctttattttgagtaagaggcctcgctcatctaagttctcacctaaggtggatgagggattcttacttggttatgaatcaaatgcacatgcctattgtgtcttcaacaaaacctccggtattgttgaagtcactagggatgtgacatttgatgaatctaatggctcccaaggagagcaagttgttgtacatgttgtaggtgatgtggatccaagtcaagctatatgtactaaggctattggagacatacgaccagtcgagacggttgaagatgcacttggtgatccggattgggtgatggctatgcaagaggagttgaataacttcactcgcaaccaagtatggacattggtggagagacccgaccaaaatgtcatcggcatcaagtggatcttccgcaacaagcaagacgaacatggagtggttgtaaggaacaaagcccggttagttgcgcaaggattcacccaagtcgagggtcttgattttggtgaaaccttcgcgcccgttgctcgccttgagtcaatccaaatccttttagcctatgccgctcaccatgattttaggttattccaaatagatgtcaagagtgcctttctcaatggacctatctcggagttggtctatgtggagcaaccaccggggttcgaggatccaaagttgccaaaccatgtgtacaagctccacaaggcactctacgggctcaaacaagcccctagagcttgtagtatcatgactaaaaggtttgagatgtctatgatgggcgagttgaccttcttccttgggctacaagtgaagcaagcacaagagggcactttcatctctcaaaccaagtacgtgaaggacattctcaagaagtttatgatggaagatgccaaacccatcaagactcctatgcctactaatagccacctagacctcgacgataatggtaaatgtgtggaccaaaaggtataccgctccatgataggatccttgctttacttatgtgcatctcgtcccgatatcatgcttagtatatgcatgtgtgcttgctttcaagcggagcctaaagagtgccatttgattgccatcaagagaattctaagatatgtagttcatactcctaatcttggcttgtggtatcctaaaggttgtgactttgagcttttgggctattccgattcggattatgccgggtgtaaggttgatagaaaaagcacaaccgggacttgtcaattccttgggcggtcccttgtttcttggttctccaagaagcaaaattccattgccttatccaccgccgaagccgaatatgtcgccaccggttcttgttgtgcccaactcctttggatgaaacaaaccctaaaagattttggctacaacttcaccaagattccactcctatgtgacaatgagagtgctatcaaaatagccaacaatcccgttcaatactcaagaaccaagcacatagacattcgccaccacttttcttga

SEQ ID NO: 7958 - DNA, 150 bp, Oryza sativa
  Clone ID: PAT_MRT4530_14506C.1
atggcgagggtgtccctccagatgacatcggcggatgccgccaccaacgagcgcccgctgtttgtccccctctgcacgcgctcgccggcagaccacgggtcccgcgggctcagcggctactggcagtgcgcgaagagaccaagccggtga

SEQ ID NO: 7959 - DNA, 187 bp, Oryza sativa
  Clone ID: PAT_MRT4530_14507C.1
ccgacgcgtgcggcgatccaaaacaccctacctgctataaagatatggccttctataactagaatatctacacccctattgcgttgcatggtacgacttatacaaaactacaaggtcgaatcgcggcgaattctagtctagaacggggaggtgataaacacctttgtacagacaacacgctgataaa

SEQ ID NO: 7960 - DNA, 4896 bp, Oryza sativa
  Clone ID: PAT_MRT4530_14508C.1
atgtcggatttagggggaaagaacggggaaaatggaaatgaagatggaacgagcagcaaggaaactccatcacccaagggagctactataccttttgattacagcaaacttaccattccccctcacaactttgtctccgtgccttctaggcgtgctcctcaatttgatgggacacattacgccgcttggaagcacaagatgaagttgcatctaatctttttgcatccaagtatttggaaagttgtttgtatagcttccaatccaattctctccgccttgagtccggaggagttcaacaaggttgatgggcttgaggaggccaaggagatatgggatactttgcaattggctcatgagggatcacccgccgttcgtgaggccaagattgaattattggaagaaaggcttggaagatttgtgatggatgacaaggagacaccacaagagatgtatgataggatgatgatccttgtcaacaagattaaaggacttgggagtgaggacatgacaaatcactttgtggtcaaaagacttctccatgcttttggtccaagaaatcccactcttgtatcaatgatatgggaaaggaaagatttcaagaggctcaccccaagtgacattcttggaagaattgtgtctcatgagatgcaagaagaggaagctcgtgaagtgaggcaaatggtgaagaatgccaccatgatcaaaaatcaagaagtagctttgaaggcaaaacaagaagaagagtcaagttgtgaagaaagtgaagatgaagaaatgacttttattgtcaagagattcaagcactttcttcgcaagagtggctatggcaaagggaggaaggatgatgacaagggaaagaggcaatcaaagagagcttgcttcaattgtggcgaatatggccacttcattgccgattgtctcaagtcaaatgaagcgaaggctaagggaggcaagaagaagccggagcgtgctcatgtggcggaggcacacatggcagaggtgtggtactccggagatgaagaagatctcgaggtcaagcccaagcccaagccaaaagacaaggttgaaggagaaggtggtgttgctactgtcgccttcaagtcatcctcttcaagcaaggagcgtctcttcaacaacttgagtgatgacgacgacgactcctaccactactcttgtttcatggcccaaggccacaaggtgatgactcaaaagccctctcatacctctcttgatgttgattctagtgatgaggaaagtgataatgaattagatgatgtgcttaagagttttagcaaacccgctatgcaacatttggctaagttaatgagagctttggatagtaaagaacaatctctcgaaaggcaagaagaattacttattcttgagaaggaaagaaaccttgccttagtggagagcctagctaaagaatgtgctaaaaatgaacaactagctaatgagcttaatttggctaatggttctctagctagccttagggatgtcaatgaaactcttcaagagaagtttgctagtttagacaaaagtcataaagatcttgaagttcaatttgacactctttggaatagcacttctcaaccaaatgtggtttctaattcttccaacccatctactagcaatggttgtgctaggtattacaatattgatttgaactctcatgctactaatgttgatgctatgcaagctcttaagaaagaaaatgaaaggttgggcacattggtgaaatatggatgtatgaagacataccattcaaaagatgccctttacaagaccatcaccgctcatcctaacaaggatggacacgggctcaggaagtttcgggcttctgataggccgaaggggctggccggaagttccggttataatgccaggaagttctggccagagggtctttactatgattcatatgcatactcctccgatggctcaagttgggttgtggacagtggctgcaccaatcatatgacgggagagaggagtatgtttacaagtcttgatgaggagggtggaagtcgtgaaaatattgtctttggagatgatggtaaaggaaagagggtgcgaagcaacaatggaggagaattcaagaacactcaagtggaggaatttcttgatgaagaaggaatcaagcacgagttctccgccccctatgatcctccccaaaacggcattgttgagaggaagaaccgaaccctcattgaagtcgcaagggcaatgcttgatgagtacaagacttcggatgtattttgggcggaggccgtgagtaccgcatgtcttgccatcaatcgcttgtacctccacaagatcctaaagaaaacctcatatgagctcttgagtggtaagaagcctaatgtttcatattttcatgtctttgggagcaaatgttttattttaagtaagaggtctcgctcatctaagttctcacctaaggtggatgagggattcttacttggctatgaatcaaatgcacatgcctatcgtgtcttctacaaaacctccggtattgttgaagtcactagggatgtgacatttgatgaatctaatggctcccaaggagagcaagttgttgtacatgttgtaggggatgtggatccaaatcaagctataggtactaacgctattggagacatacgaccagtcgagacgcaggatgaccaagaagatagggatcaacctccgtcatcgacatccaatagccctacaagtgctgtgtctgctgagccggaagttccgggtcccattgaccggaacctccggacatctccagacccggaagttccgggttctacagttcggaacctccggatcagtggcagtgaagacgtgccaacggcacaagtggatgggatcgatgctgagggcactttagagcattctgatcaggctcaggtccccccagtgcaccatccaaggatacatcacactgtccaaagagatcatcccgttgacaacatacttgggttcgaggatccaaagttgccaaaccatgtgtacaagctccacaaggcgctctacgggctcaaacaagcccctagagcttggttcgagatgtctatgatgggcgagttgaccttcttcctcgggctacaagtgaagcaagcactagagggcaccttcatctctcaaaccaagtacgtaaaagacatactcaagaagtttgggatggaggatgccaaacctatcaagacgcccatgcctactaatggatacctagacctcgacgataatggccggaagttccggtgttcttggcctggaacttccgtggtcattatgcctcgtgagaagagacagaagctttctcaagatgttcctgctgactcgagccccccggttcgtggtcctagggggagattgggcaaagaaaaagttggagttttttacagtgggagtcagattccgatccattccaggagggctggtagcattgtcattcgtgatgcaccccgctctccctctccagctgcatctgagtcagatgatggtggcaatgaggatgagcctggttctaaaagcaatcctttgaggctgtacaagacaagggctgttgatccagatcctaaacgcacaagagtgaactatctgaagaatctactccagtgtggaaaggacagaatggttagtcctgatactctgccagctgactctcaggatgacagattcaggaccttggtgcaggttgattggtataactctatgatcatgggaagatctcatctagtggtagagatgaagtggctagactggcagtacatgtcctcaaagaacaatatagtcttcaatgaggtacgcaaggtgtgtgagcgcaagcacgtggtagatttgttggccttgcagtattcctggaatgaggaagtgattggacagttctactttactgctttctttggcatcaccaagaaggggcttgattttgtgaagtggaccattcaggggcagcagtatagggtttctatggcacagtttgctgcagctttggggttagatgatgatgacctgagtcgtccacatatctttgtagaggatgctctgtcaccaaccagcactacctttatgtatgagaaggatgctcctaaggattgtttggggactattcgagggttgcgtccatattatagagtgctgtactctatcttcaggtggtctttgctccccaaagtgggagatgctacagctcttccaggtaggcatgcgctcctcctcagtcgcatgcgctacaacaagccagatttcagcatcatgaagcttatttggagtgagatctataagacaatgtgtgagccaaagaggggctgcatctatgctccttatatcatgaagatgattgaggccaagactgggatttgttatttcaaggacaatcaacacaagcttttccgtcctcatgctcccactacttcagctactcctaccaccagagtgactcgtgcttccacctcagctgctccttcttcctctgctgcacctcagcgttctgagtcttcttctcccataaagaaggctcttagggctatcttttgcatgtgtgccaagacagctaagaaggtaaagaagatagagaggcgtcaaaaggaagattggattgcagcaggcaaggatgtctctgacatttctgatgatgaggagtttgttgatccttttgctgcttatgagactgctcgagacattgctagtggtgagggtccctctggcacttctcgtttcttcaatgaggagtcctctcactccgaggagagcagtgatgatgaggagtcaaatgcccctaccgagaatgttcttacagatcccgatgaggcagtggacgccgccgggcaagacatcgactctcctcactccggcgacaccgagatcattccttctgatggcgatgatgatgaggcttga

SEQ ID NO: 7961 - DNA, 3546 bp, Oryza sativa
  Clone ID: PAT_MRT4530_14509C.1
atgtcggacttagtggaaaaaaacggggaaaatggaaatcaagatggagcgagcagcaagggaacttcaccacccaagggagctactataccttttgattacaacaaacttaccattccctctcacaacttcgtctccgtgccttccgggcgtgctcctcgatttgatgggacacattacgccgcttggaagcacaagatgaagttgcatctaatctctttgcatccaagtatttggaaagttgtttgtacaggtattgatgtacctcatgatgacatggagctcacttcggagcaagagcaactcatccaccgcaatgctcaagcttccaatgcaattctctccgcgttgagtccggaggagttcaacaaggttgatggacttgaggaggccaaggagatatgggatactttgcaattagctcatgagggatcacccgccgttcgtgaggccaagattgaattattggaaggaagggttggaagatttgtgatggatgacaaggagacaccacaagagatgtatgataggatgatgatccttgtcaacaagattaaaggacttgggagtgaggacatgacaaatcactttgttgtcaagagacttctccgtgcatttggtccaagaaatccctctcttgtatcaatgatacgggaaaggaaagacttcaagaggctcactccaagtgacattcttggaagaattgtgtctcatgagatgcaagaagaggaagctcgtcaagtgagccaaatagtgaagaatgtcgccatgatcaaaaatcaagaagtagctttgaaggcaaaacaagaagaagagtcaagttgtgaagaaagtgaagatgaagaaatggcttttattgtcaagagattcaagcactttcttcgcaagaggggctatggcaaagggaggaaggatgatgacaagggaaagaggcaatcaaagagagcttgcttcaattgtggcgaatatggccacttcattaacgattgtcccaatgatgaggaaagtgataatgaattagatgatgtgcttaagagctttagcaaacccgctatgcaacatttggctaagttaatgagagctttggatagtaaagaacaatcactcgaaaggcaagaagaattgtttattcttgagaagaaaagaaacattgccttagaggagagcctagctaaagaatgtgctaaaaatgaacaactagctaatgagcttaatttggctaatggttctctagctagccttagggatgtcaatgaaactcttcaagagaaatttgctaatttagacaaaactcttaagaaagagaatgagaggttgggcactttggtgaaatatggatgcatgaagacataccattcaaaggatgccatttacaagaccatcactgctcatcctaacaaggatggacacgggctcgggttttctagtggaagtcctgtgtctaagcgtgtgatgacatactcctccggtggctcaagttgggttgtggacagtggctgcaccaatcatatgacaggagagaggagtatgtttacaagtcttgatgaggagggtggaagtcgtgaaaatattgtctttggagatgatggtaagggaaaggtaatgggtctcggtaagattgccatttccaagaatcaatctctatctaatgtcctccttgtcaattcattaagctacaatttattatccgtgtttcaattgtataagttaggatttaattgcttgtttaccgatgtggatgtgaccgtttttaggcgagatgactcttccgtagcattcaagggtgtgttaaagggtgatctctatctcgttgatttcgacatagatagagtgaatccagaggcatgcttgattgctaaatcctctatgggttggctatggcaccgtaggctagcccatgttggaatgaggaatttggcatctcttctaaaaggggaacacattcttggtttatctaatgtttcttttgagaaggatcgtgtgtgtagtgcttgccaagccgggaagcaagttgggagtccgcatcctataaaaaacatcatgactacaacaagaccactcgagcttcttcatatggacttatttgggccagtggcctacataagcattggaggtaacaagtatggttttatcattgttgatgatttttcacgcttcacttgggtgtactttctccatgacaaaagcgaagctcaagatgtcttcaagcgcttcgcaaagcaagcccaaaacctctatgatctcactatcaagagggtgcgaagtgacaatggaggagagtttaagaacactcaagtggaggaatttcttgatgaagaaggaatcaagcacgagttctccgccccctatgatcctccccaaaatggcattgttgaaaggaagaaccgaaccctcattgaagccgcaagggcaatgattgatgagtacaagatttcggatttctcacctaaggtggatgagggattcttacttggctatgaatcaaatgcacatgcctatcgtgtcttcaacaaaacctccggtattgttgaagtcactagggatgtgacatttgatgaatctaatggcttccaaggagagcaagttgttgtacatgttgtaggtgatgtggatccaagtcaagctataggcccggaagttccaggttctacagtccggaacctccggaccagtggcagtgaagacgtgccaacggtgcaagtggatgggatcgatgctgcgagcactttagagcatactgatcaggctcagagacccaagcaaaatgtcatcggcaccaagtggatctttcgcaacaagcaagatgaacatggggtgattgtaaggaacaaagcccggttattccaaatggatgtcaagagtgcctttctcaatggacctatctcggagttagtctatgtggagcaaccaccggggttcgaggatccaaagttgccaaaccatgtgtacaagctccacaaggcgctctatgggctcaaacaagcccctagagcttgtagtatcatgactaaaaggttcgagatgtctatgatgggcgagttgaccttcttcctcgggctacaagtgaagcaagcactagagggcaccttcatctctcaaaccaagtacgtgaaagacatactcaagaagtttgggatggaggatgccaaacctatcaagacgcccatgcctactaatggacacctagacctcgaccataatggtaaatgtgtagaccaaaaggtatatcgctccatgagaggatctttgctttacttatgtgcatctcgtcccgatatcatgcttagtgtttgcatgtgtgcctgttttcaagcggagcctaaagagtgtcatttgattgccgtcaagagaattctaagatatttagttcatactcctaatctttgcttgtggtatcctaagggttgtggctttgagcttttgggctattctgattcggattatgccaagtgtaaggttgatagaaaaagcacaactgggacttgccaatttcttgggcggtcccttgttttttggtcctccaagaagcaaaattcctttggataa

SEQ ID NO: 7962 - DNA, 1089 bp, Oryza sativa
  Clone ID: PAT_MRT4530_1450C.1
ttagagctccagaacaacatcgccgccagatgcatgtgcggcgttctcacggtcggaggaatacccatcacagtcaggagctcttatgtagatggaatcctcggagaacatgacacggttttcttcgctgtcgactgcagctaggggtgaaaacaaagcggattcggacatatagtgatcataccatagctttgatcttggtgtcctgtagcttgacgcttctaatcgactaccagctgtgtatagcatcgctgtgctagacagctggctatcaggcctaaaagcatcaaacacacatattccaacaatggcaagcaaacgggcaatgaactctgccttgttctttgcatcagttattttggtcttggcttctgccgtcaacgggggactagtgctacatggccatagcccatgcctagccacggcgccaaccccgaccgaaactccagccccagcaccagccctggtggtgccaccgacgcccgcaccaactccggtcccgacaccatcaccagcgccgcctcccaagtgcccgctgccgttagctgatcttggtgtgtgccttaatgttgctcttggcaaccagctcttgaaccagcagtgctgctcgcaactctccagcctcccgagcgacaccgccgctttctgcctttgcgaggccatcaaggtgaaagccctcgtcattctgaaggtcaatgtccccaacatcctaaaagcatgcggcaaggtttccgctgtaacttgtgttaattaatcagtacgttgagagatagcgtgcatgcaaatatacgtaagtatacgtatgtatgtacatgctatatataggcatgcagcatctatatatgttgcgtgttttcctctacatatatgctgtattaaacttggatgacccaatatatatctgccagcagcgtacgtgccgttcttcattgaggtagctataagctagggtcttaatatccatgtatgtttaagaataataaagttataagatctgggactgtgctatatgggtgtgcacgcgcacacacacacatgacttgatcctattacgcgttaaaaaaaaaattaaaaaaaaaaaaaaaaaaa

SEQ ID NO: 7963 - DNA, 3747 bp, Oryza sativa
  Clone ID: PAT_MRT4530_14510C.1
atggagctcacgtcggagcaagaacaactcatccaccgcaatgctcaagcttccaatgcaattctctctgccttgagtccggaggagttcaacaaggttgatggacttgaggaagccaaggagatatgggatactttgcaattggctcatgagggatcacccgccgttcgtgaggccaagattgaattattggaaggaaggcttggaagatttgtgatggatgacaaggagacaccacaagagatgtatgataggatgatgattcttgtcaacaagattaaaggacttgggagtgaggacatgacaaatcactttgtagtcaagagacttctccgtgcatttggtccaagaaatcccactcttgtatcaatgatacgggaaaggaaagacttcaagagactcaccccaaatgacattcttggaagaattgtgtctcatgagatgcaagaagaggaagctcgtgaagtgaggcaaatggtgaagaatgcgcccatgatcaaaaatcaagaagttgctttgaaggcaaaccaagaagaagagtcaagttgtgaagaaagtgaagatgaagaaatggcttttattgtcaagagattcaaacactttcttcgcaagagtggctatggcaaagggaggaaggatgatgacaagggaaagaggcaatcaaagagagcgtgcttcaattgtggcgaatatggccatttcattgccgattgtcccaggtcaaatgaagctaaggctaagggaggcaagaagaagccgaagcgtgctcatgtggcggaggcacacatggcggaagtgtggtactccggagatgaaaaatatcccgaagtcaagcccaagcccaagtcaaaagacaaggttgaaggaaaaggtggtgttgctactatcgccttcaagtcatcctcttcaagcaaggagcgtctcttcaacaacttgagtgatgacgacgacgactcctaccactactcttgcttcatggcccaaggccgcaaggtgatgactcaaaagccctctcacacttctcttgatgttgattctagtgatgaggaaagtgataatgaattagatgatgtgcttaagagccttagcaaacccactatgcaacatttggctaagttaatgagagctttggatagtaaagaacaatcactcgaaaggcaagaagaattgcttattcttgagaagaaaagaaaccttgacttagaggagagcttagctaaagaatgtgctaaaaatgaacaactagctaatgatcttaatttggctaatggttctttagctagccttagagatgtcaatgagactcttcaagagaaatttgcttgtttagacaaaagtcataaagatcttgaagttcaatttgacactctttggaatagtacctctcaaccaaatgtggtttctaattcttctaacccttctactagcaatggttgtgttaggtgttacaatatttatttgaactcttatgctactaatattgatgctatgcaagctcttaagaaagagaatgaaaggttgggcacattagtgaaatatggatgcatgaagacataccattcaaaagatgccctttacaagaccatcaccgctcatcctaacaaggatggacacgggcttgggttttcgggtggaagtcctgtgtctaagcgtgtgatggcatactcctccggtggttcatgttgggttgtggacaatggttgcaccaatcatatgactggagagaggagtatgtttacaagtcttgataaggagaatggaactcgtgagaatattgtgtttggagatgatggtaaagggaagttgggttacaattgcttgtttaccgatgaggatgtgaccgtctttagaagggatgactcctccgtagcattcaaaggcaagttaaagggtgatctctatcttgtcgatttcgatgtggatagagtgaatccggaagcttgtttgattgctaaatcctccatgggttggctatggcatcgtagactagcccatgttggaatgcggaatttggcaactcttctaaagggggaacacatcctcgggctcactaatgtcacatttgagaaagatcgtgtgtgcagtgcttgccaagccgggaaacaagttgggaatccacattctatcaagaacatcatgactacaacatgcccttttgagcttctacatatggatttattcaggcccgtggcttacataagtattggagataacaagtatggttttgtcattgttgatgatttttcacgcttcacttgggtgtatgttctccatgacaagagtgaggctcaagatgtcttcaagcgctttgccaagcaagcccaaaacctctatgatcttaccatcaagagggtgcgaagcgacaatggaggagaattcaagaacactcaagtggaggaattccttgatgaacaagcacaagagggcactttcatctctcaaaccaagtacgtgaaggacattctcaagaagtttgggatggaagatgccaaacccatcaagactcctatgcctactaatggccacctagacctcgacgataatggtaaatgtgtggaccaaaaggtggggaacgcgttcgtgcaccagtactacaacatcctgcaccagtcgccggatctcgtccaccgcttctaccaggacgggagccgcatcggccgccccgcctcccccgccgccgccgagatggacaccgtcaccaccatggaggcgattaacgcgaagatcgtgtccatggacatcgtgcgggcggagatcaaggcggtggacgcgcaggagtcgctgggcgggggcgtcacggtgctcgtcacgggccacctcaccgggagcgacgacgtgcgcagggagttctcgcagtccttcttcctcgcgccgcaggagaagggatacttcgtgctcaacgacatcctgcgctacgtcgggggggagggggatcaggaggtggagccggagccggagctggagctgtcgtttccgccgtcgcagcagccggattcggtgcctgctccttcggcgaatggcactagcgtgccgcgggaacaggaggccttctcgcagccggagcagcatgtggctgatcctgcacccaatgctcaggaggctgatctcaacggcgaggaggtttataacccaccgaacaacacagaggggcctgttgtggaggaaacgccgattcctgaagttatagatgaagtgccaaataacgtagctgtggctatgccgactccgcctgcccctgcccctgcccctgtaccacaagaggaggcccccaagaagtcgccggcaccaccaaaacaagagaagcaagttgctcctgcacctgttgctccggttgctgatgctccaactttcagtcctaatcctgaaagcagcaacattcaagaggctgaagagtttgaagatcccagttcagttcaaagtgcaattgcgggttctcctgtgacgattagtgaccggcaatgttatgtggaggaaaagagaactgctggttcacgtggtggtggcagaggaaggtttgctcctggtagaggtggtaacttccgaggtgaaggcatgagaggccgcgggaattacaccggagggaggggctatggaaggggtgagttcaattatcgatccgactatggaggcagaggcgctggtagaggtggttcatcacgtggtggtgatgttggctaccagcgggttgaccactctgctggtcgtgctgctcgggcgccatcgggcactagtgccgttgcaaagtga

SEQ ID NO: 7964 - DNA, 342 bp, Oryza sativa
  unsure (1)..(342): unsure at all n locations
  Clone ID: PAT_MRT4530_14511C.1
tcaaccgcaactgcgacggccgcgtcgacttcggcgagttcaagtgcatgatgcaggggatcaccgtgtggggcgcttgacggcggcgagcgaggccgccgtccttcttcctctccccgtgtgtcatgtatatatgcgcgggtggggcntntctctgctcggcnnatttttcttgatcgtcctgtggggtcctcctgttcttgacttggtctgcttanttgtngctttgagatttttctgtgnnccccttgaaatgcgacatttttgnaaaanntggcttgcgaagatttcattggtttttactccgtttcttaaacattgtttttgtttttttttcctgtc

SEQ ID NO: 7965 - DNA, 2067 bp, Oryza sativa
  Clone ID: PAT_MRT4530_14512C.1
atgtcgcatctagagggaaccggggggttggatgacaagggagacgcttctagcaccaaggatactggacccaagggagctactattcactttgattacggcaaacttaatgttcctcctcataactttgtctccgtgccttccgggcgtgttcctcaatttgatgggacacattacgccgcttggaagcacaagatgaagttgcatctaatttctttgcatccaagtatttggaaagttgtttgtacagaggagttcaacaaggttgatggacttgaggaggccaaggagatatgggagaggaggccaaggagatatgggatactttgcaattggctcatgagggatcacccgccgttcagacttctccgtgcttttggtccaagaaatcccactcttgtattaatgatacgggaaaggaaagacttcaagaggctcaccccaagtgacattcttggaagaattgtgtgtcatgagatgcaagaagaggaagctcgtgaagtaaggcaaatggtgaagaatgccaccatgatcaaaaatcaagaagtggttttgaaggcaaaacaagaagaagagtcaagttatgaagaaagtgaagatgaagagatggcttttattgtcaagagattcaagcactttcttcgcaagagtggctatggcaaagggaggaaggaagatgacaagggaaagaggcaatcaaagagagcttgcttcaattgtggcaaatatggccacttcattgccgattgtcccaagtcaaatgaagctaaggttaagggaggcaagaagaagccggagcgtgctcatgtggcggaggcacacatggcggaggagagcctagctaaagaatgtgctaaaaatgaacaactagctaatgagcttaatttggctaatggttctctagctagccttagggatgtcaatgaaactcttcaagacaaatttgctaatttagacaaaagtcataaagatcttgaagttcaatttgacactctttcaaatagcacttatcaaccaaatgtggtttctaatccttccaacccatctactagtaatggttgtgctaggtgttacaatattgatttgaactcttatgatactaatgttgatgctatgcaagctcttaagaaagagaatgaaaggttgggcacattgatgaaatatggatgcatgaagacataccattcaaaagatgccctttacaagaccatcaccgctcatcctaacaaggatggacacgggctcaggttttctggtggaagtcctgtgtctaagcgtgtgatggtaaatgggaaagaatgcttgatgtttgtgagagaaggtaaagctccacaagcaagtgaggtgacttgtcccttcactggtcagacacccggaagttccgggcaaaatgaccggaagttcctgccctgtaagacaggaagtttcaaacattttgtcaggaagttccgggcttctgataggcagaaggggctgaccggaagttccgggtataatacaaggaagttccggccagaggatctttactatgattcatatgtaatttccaaaaattcagagggcaaaatggttgcttattttaatgggaattacaatgatgagtaccgcacttgtgtgggggtgccaaaggctttggcatactcctccggtggctcaagttgggttgtggacagtggctgcaccaattatatgatgggagagaggagtatgtttacaagtcttgatgaggagggtggaagtcgtgaaaatattgtctttggagataatggtaagggaaaggtaatgggtctcggatttaattgcttgtttaccgatgttgatatgaccgtttttaagcgagatgactcttccatagcattgaaaggtgtgttaaagggtgatctctatctcgttgattttgacgtcgatagagtgaatccggaggcatgcttgattgctaaatcctctatgcgttggctatggcaccgtaggctagcccatgttggaatgaggaatttggcatctcttctaaaaggggaacacattattggtctatctaatgtttcttttgagaaggatcgtgtctga

SEQ ID NO: 7966 - DNA, 7011 bp, Oryza sativa
  Clone ID: PAT_MRT4530_14513C.1
atgtcggacttagggggaaaggacggggaaattagaaatgaagatggagcgagcagcaagggaactccatctcccaagggagccactataccttttgattacagcaaacttaccattccctctcacaacttcgtctccatgccttctgggcgtgctcctcaatttgatgggacacattacgccgcttggaagcacaagatgaagttgcatctaatctctttgcatccaagtatttggaaagtcgtgtgtacaggtattgacgtacctcatgaggacatggagctcacttcggagcaagaacaactcatccactgcaatgctcaagcttccaatgcaattctctccgccttgagtccggaggaattcaacaaggttgacggactagaggaagccaaggagatatgggatactttgcaattggctcatgagggatcacccgccgttcgtgaggcaaagattgaattattggaaggaaggctaggaagatttgtgatggatgacaaggagacaccacaagagatgtatgacaggatgatgatccttgtcaacaagattaaaggacttgggagaagatttgtgatggatgacaaggagacaccacaagagatgtatgacaggatgatgatccttgtcaacaagattaaaggacttgggagtgaggacatgacaaatcactttgttgtcaagagacttctccgtgcttttggtccaagaaatcccactcttgtttcaatgatacgggaaaggaaagacttcaagagactcaccccaagtgacattcttggaagaattgtgtctcatgagatgcaagaagaggaagctcgtgaagtgagacaaatggtgaagaatgccgccatgatcaaaaatcaagaagttgctttgaaggcaaaacaagaagaagagtcaagtggtgaagaaagtgaagatgaagaaatggcttttattgtcaagagattcaagcactttcttcgcaagagtggctatggcaaagggaggaaggatgatgacaagggaaagaggcaatcaaagagagcgtgcttcaattgtggcgaatttggccatttcattgccgattgtcccaagtcaaatgaagctaaggctaagggaggcaagaagaagccggaacgtgctcatgtggcggaggcacacatggcggaagtgtggtactccggagatgaagaagatcccgaagtcaagcccaagcccaagtcaaaagacaaggttgaaggagaaggtggtgttgctaccgtcgccttcaagtcatcctcttcaagcaaggagcatctcttcaacaacttgagtgatgatgacgacgacgattcctaccactactcttgcttcatggcccaaggccgcaaggtgatgactcaaaagccctctcacacttctcttgatgttgagtctagtgatgaggaaagtgataatgaattagatgatgtgcttaagagctttagcaaacccgctatgcaacatttggctaagttaatgagagctttggatagtaaagaacaattactcgaaaggcaagaagaattgcttattcttgagaagaaaagaaaccttgccttagaggagagcttagctaaagaatgtgctaaaaatgaacaactagctaatgagcttaattttgctaatggttctttagctagccttagagatgccaatgagactcttcaagagaaatttgcttgtttagacaaaagtcataaagatcttgaagttcaatttgacactctttggaatagtacctctcaaccaaatgtggtttctaattcctctaacccttctactagcaatggttgtgctaggtgttacaatattgatttgaactcttatgctactaatattgatgctatgcaagctcttaagaaagagaatgaaaggttggacacattggtgaaatatggatgcatgaagacataccattcaaaagatgccctttacaagactatcaccgctcatcctaacaaggatggacacgggctcaggttttcgggtggaagtcctgtgtctaagcgtgtgatggtaaatggaaaagaatgcttgatgtttgtgagagaaggaaaagcaccacaagcaagtgaggtgactaatcttgtgagcagccagggactcggaacatctggacaaaccggccaaaacctctgggtgggagtttctgtctctcaaaaattcccaccaggaagttccggccagtttgccgggaagttccgggccaatggccgtgcacaagacatgaccggaagttccaggcataatgccaggaggttccggccagatggtctttactatgattcatatgtaatttccaaaaattcagagggcaaagtggttgtttattttaatgggaattacaatgatgaatatcgcacttgtgtgtgggtgccaaaggctttgacatactcctccggtggtttaagttgggttgtggacagtggttgcaccaatcatatgactggagagaggagtatgtttacaagtcttgatgaggagaacggaactcgtgagaatattgtgtttggagatgatggtaaaggaaaggtaatgggtctaggtaaaattgccatctccaataatcaatctctctccaatgttcttcttgtcaattcattaagctacaatttattatccgtttctcaattatgtaagttgggttacaattgcttgtttaccgatgaggatgtgaccgtctttagaagggatgactcctccgtagcattcaaaggcaagttaaagggtgatctctatcttgtcgatttcaatgtggatagagtgaatccggaagcttgtttgattgctaaatcctccatgggttggctatggcatcgtagactagcccatgttggaatgcggaatttggcaactcttctaaagggggaacacatcctcgggctcactaatgtcacatttgagaaagatcgtgtgtgtagtgcttgccaagccgggaaacaagttgggaatccacatcctatcaagaacatcatgactacaacacgccctcttgagcttctacatatggatttattcgggcccgtggcctacataagtattggaggtaacaagtatggttttgtcattgttgatgatttttcccgcttcacttgggtgtattttctccataacaagagtgaggctcaagatgtcttcaagcgcttcgccaagcaagcccaaaacctctatgatctcaccatcaagagggtgcgaagcgacaatggaggagaattcaggaacactcaagtggaggaattccttgatgaagtgggaatcaagcatgagttttccaccccatatgatcctcctcaaaatggcattgttgagaggaagaaccgaactcttattgaagccgcaagatcaatgcttgatgagtacaagacttcggatattttttgggcagaggccgtgagtaccgcatgtcatgccatcaaccgcttgtacctccacaagatcttaaagaaaacttcatatgagctcttgagtggtaagaaacctaatgtttcatattttcgtgtctttgggagcaaatgctttattttgagtaagaggcctcgctcatctaagttctcacctaaggtggatgagggattcttacttggctatgaatcaaatgcacatgcctatcgtgtcttcaacaaaacctccggtagtgttgaagtcactagggatgtgacatttgatgaatctaatggctcccaaggagagcaagttgttgtacatgttgtaggtgatatggatccaagtcaagctataggtactaaggctattggagacatacgaccagtcgagacgcaggatgaccaagaagacagggatcaaccttcgtcatcgacatccaatagccctacattgagtcaagtgtcagtcgacccgaaagttccgggaccagatggtcggaacctccagacctctccaggccaggaagttccgggtccatctgccaagaagttccgggcagaggacagtcaaggcgtgcctacggcacaagtggatgggattgatgccgagggcactgtagagcatcctgatcaggctcaggtcccctcggtgcaccatccaagaatacatcactgtccaaagagatcatcccgtcgacaacatacttgggttgaagatgcacttggtgatccagattgggtgatggctatgcaagaggaattgaataacttcactcgcaatcaagtatggatgttggtggagagacccaaccaaaatgtcatcggcactaagtggatctttcgcaacaagcaagatgaacatggagtggttctaaggaacaaagcccgattgcgcaagggttcacccaagttattccaaatggatgtcaagagtgcctttctcaatggacctatctcggagttggtctttgtggagcaaccaccggggattgaggatccaaagttgccaaaccatgtgtacaagctccacaaggcgctctacgggctcaaacaagcccctagggcttggtatgaatgtctccgagattttcttttgaaaaatggttttgaaattggaaaggcggatactactctcttcactaaaaaatttaagagtgatttattcatatgccaaatttatgtcgatgacataatatttggttctactaatgcctctttttgtgaagaatttagtagtatcatgactaaaaggttcgagatgtctatgatgggtgagttgaccttcttccttgggctacaagtgaaacaagctcaagagggcactttcatctctcaaaccaagtacgtgaaggatattctcaagaagtttgggatggaagatgccaaacccatcaagacgcccatgcctactaatggccacctagacctcgacgataatggtaaatgtgtggaccaaaaggtttatcgcttcatgataggatccttgctttacttatgtgcatctcgtcccgatatcatgcttagtgtatgcatgtgtgctcgctttcaagcagagcctaaagagtgtcatttgattgccgtcaagagaattctaagatatttagtccatactcctaatcttggcttgtggtatcctaagggttgtgactttgagcttttgggctattccgattcggattacgccgggtgtaaggttgatagaaaaagcacaaccgggacttgccaatttcttgggcggtcccttgtttcttggtcctccaagaagcaaaattccattgctttatccaccgccgaagccgaatatgtcgccgccggttcttgttgtgcccaactcctttggatgaaacaaaccctaaaagactttggctacaacttcaccaagatcccactcctatgtgacaatgagagtgccatcaaaatagccaataatcccgttcaacattctcgaaccaaacacatagatattcgccaccactttttgagagatcatgagaccaaaggagacatatgccttacccatgtgagaaccaaaacccaattagccgacattttcaccaagcctttagatgagaaaagattttgcgagcttaggataagcactatgactcgtgagaaaagacagaaagcttctcaggatgtgtccggtgatgagagtcctcctattcgttttcctcgtggtcgtttgggaaaagagaaagtggttgaaggtggcagtggcagtggcactcgtacctctcccaggtttaccaggcaatccagcaatcgcccagttcagattcgtgatgttgacagtggtcaaggtagtgatgctccttcttcaagaggtcgtgggagaggtggtggtcgcacttctggggctggaagggcctctcatgatttccctgttggatttcgtgagaatcccgttcggctctacaagactattggttttgacaccactcctattcatcacattggaagacccaagtccaactaccttcatcagcttgccaagtgcagaagggaccgtttgattgatccagagacacagcctgaggagtcacaagatccacgtttcagaactttaactcagttggattggtacaactcaatgattatggctagagacaatccagtggttgagatgaagtggattgattggacttacatgaggaagaagaacaatgaagtgttcaaccaagcaatgcaagtttgccacaacaagaatcttggagatattcttgccttggagtatgattggactgaggaggtcattgcacagttctatgcgacagcattctttggtactactaggaagggaactccttatgtaaagtggatgactgcgggtgttaggcacaagatttccatagcacagtttgctgagatattgggcttagaggatgaggatctcaataggcctaatattcatagtgaagcacccctccccatgatcaagactaagttcatgtatactaaggatgctcctaggacttgtatgggaactactcatggtttgcatccaaactacaaggttggagatgccactgctttgccttccaaacatgctcatcttctcagtcgcatgcgctacaatcagccacttttcagtgtgatgaagttgatttggtatgagattgccaacaccattcttgagcctaagcgaggttgcatctatgctccattcattatgaagatgattgagacagtcaccggggtgttctacatcaaagatgggcgccacaatccttttcgtccttgtgttccaccttcctcttctccagtggcacctagatccatcccttctacctcagctggtccttcttctagtgccccaccgcaatcctcgagctcttctcccatcaagaaggcacttcaggcaatcttctgtatgtgtgctaagactgcaaagaatgcttatgaggcagcccgcaatgttgccggtgaaggttcatccacctatttcaatgaagagtcttcccaattagatgatgatgatgatgatgatgaggatgacactgacgcagctgctgaggatgctcccactgatgtagacaccgctgcacagtccgatgagtctcatctctccggcgataccgagattgttccctccgatggagatggagatggagatgagtga

SEQ ID NO: 7967 - DNA, 4389 bp, Oryza sativa
  Clone ID: PAT_MRT4530_14514C.1
atgtcggacttaggggaaaagaacggggaaaatggaaatgaggatggagcgagcagcaagggaactccatcacccaagggagctattataccttttgattacagcaaactgaccattccccctcacaactttgtctccatgccttccgggcatgcttctcaatttgatgggacacattacgccgcttggaagcacaagatgaagttgcatctaatctctttgcatccaagtatttggaaagttgtttgtacaggtgttgatgtaccccatgatgacatggagctcacttcgcagcaagagcaactcatccaccacaatgctcaagcttccaaatgcaatcctccccgccttgagtccggaggagttcaacaagctaaggctaagcgaggcaagaagaagccggagcgtgctcatgtggcggaggcatacatggcggaggtgtggtactccggagatgaagaagatctcgaggtcaagcccaagcccaagccaaaagacaaggttgaaggagaaggtggtgttgcaaccgtcgccttcaagtcatcctcttcaagcaaggagcgtctcttcaacaacttgagtgatgatgacgacaactcctaccactactcatgcttcatggcccaaggccgcaaggtgatgactcaaaagccctctcacacctcttttgatgttgattctagtgatgaggaaagtgataatgaattagatgatgtgtttaagagctttagcaaacccagtatgcaatatttggctaagttaatgagagctttggatagtaaagaacaatcactcgaaaggcaaaaagaatcgcttattcttgagaagaaaagaaaccttgccttagaggagagcctagctaaagaatgtgctaaaaatgaacaactagctaacgagcttaatttggctaatggttctctagctagccttagggatgtcaacgaaactcttcaagagaaatttgctaatttagacaaaagtcataaagatcttgaagctcaatttgacactctttggaatagcacttctcaaccaaatgtggtttctaattcttccaacccatctactagcaatggttgtgctaggtgttacaatgttgatttgaactcttatgctactaatgttgatgctatgcaagctcttaagaaagagaataagaggttgggcacattggtgaaatatggatgcatgaagacataccattcaaaagatgccctttacaagactatcaccactcatcctaacaaggatggacatgggctcgggttttctggtggaagtcctgtgtctaagcgtgtgatggtaaatgagaaagaatgcttgatgtttgtgagagaaggtaaagctccacaagcaagtgaggtgacttgtcccttcattggtcagacacccagaagttccgggaaaaatgaccggaagttcctgccctgtaagacaggaagttccggacattttgtcaggaagttctgggcttctgataggctgaaggggctgaccggaagttccgggtataataccaggaagttccggccagagggtctttactatgattcatatgtaatttccaaaaattcagagggcaaagtggttgcttattttaatgggaattacaatgatgagtaccgcacttgtgtgtgggtgccaaaggctttggcatactcttccgatggctcaagttggcttgtggacagtggctgcaccaatcatatgacgggagagaggagtatgtttacaagtcttgatgaggagggtggaagttgtgaaaatattatgtttggagatgatggtaaaggaaaggtaatgggtctcggtaagattgccatttccaagaatcaatctctatctaatgtcctccttgtcaattcattaagctacaatttattatccgtgtctcaattgtgtaagttaggatttaattgcttgtttaccgatgtggatgtgaccgtttttaggcgagatgactcttccatagcattcaagggtgtgttaaaaggtgatctctatctcgttgatttcgacgtggatagagtgaatccggaggcatgcttaattgctaaatcctctatgggttggctatggcaccataggctagcccatgttggaatgaggaatttggcatctcttctaaaaggggaatacattcttggtctatctaatgtttcttttgagaaggatcgtgtgtgtagtgcttgccaagccgggaagcaagttgggagtacacatcctataaaaaacatcatgactacaacaagaccactcgagcttcttcatatggatttatttgggcccgtggcttacataagcattggaggtaacaagtatggtttcgtcattgttgatgatttttcacgcttcacttgggtgtactttctccatgacaaaagcgaagctcaagatgtcttcaaacgcttcgcaaagcaagcccaaaacctctgtgatctcactatcaagagggtgcgaagcgacaatggaggagaattcaagaacactcaagtggaggaatttcttgatgaagaaggaatcaagcacaagttctccgccccctatgatcctcctcaaaatggcattgttgaaaggaagaaccgaaccctcattgaagccgcaagggcaatgcttgatgaatacaagacttcggatgttttttgggcggaggccgtgagtaccgcgtgtcatgccatcaaccgcttgtacctccacaagatcctaaagaaaacttcatatgagctcttgagtggtaagaagcctaatgtttcatattttcgtgtctttgggagcaaatgttttattttaagtaagaggcctcgctcatctaagttcacacctaaggtggatgagggattcttacttggctatgaatcaaatgcacatgcctatcgtgtcttcaacaaaacctccggtattgttgaagtcactagggatgtgacatttgatgaatctaatggctcccaaggagagcaagttgttgtacatgttgtaggtgatgtggatccaagtcaagctataggtactaaggctattggagacatacgaccagtcaagacgcaggatgaccaagaagatagggatcaacctccgtcatcgacatccaatagccttacaagtgttgtgtctactgagccggaagttctgggtcctattgaccgaaacctccagacatctccaggcccggaagttccgggttctacagtccggaacctctggaccagtggcagtgaagatgtgccaacggcacaagtggatgggatcgatgctgcgggcactttagagcatactgatcaggctcaggtccctccagtgcaccatccaagaatacatcacactgtgcaaagagatcatcccgtcgacaacatacatggtgacataagaaaaggggtaactactcgctctcgtgtcgcaagtttttgtcaacacttctcgtttgtctcttctttggaaccaaccagggtggaagatgcgcttggtgatccggattgggtgatggccatgcaaaaggagttgaataacttcattcgcaacaaagtatggactttagtggagagacccaagcaaaatgtcatcggcaccaagtggatctttcgcaacaagcaagatgaacatggggtggttataaggaacaaagcccggttattccaaatggatgtcaagagtgcctttctcaatggacctatctcggagttggtctatgtggagcaaccaccagggttcgaggatccaaagttgcctaaccatgtgtacaagctccacaaggcgctctacgggctcaaacaagcccctagagctttgtatgaatgtctccgagattttctattgaaaaatggttttgaaattggaaaggcagatactactctcttcactaaaaaatttaagagttatttattcatttgccaaaattatgtcgatggcataatatttggttctactaatgcctctttttgtgaagaatttagtagtatcataactaaaaggttcgagatgtccatgatgggcgagttgaccttcttccttgggctacaagtgaagcaagcacaagagggcaccttcatctctcaaaccaagtacgtgaaagacatactcaacaagtttgggatggaggatgccaaacctatcaagacgctcatgcctactaatggccacctagacctcgacgataataccaaaagtgtttgtatatgtgcccgttttcatacggagcctaaagagtgccatttgattgccgtcaagagaattctaagatatttagttcatactcctaatcttggcttgtggtatcctaagggttgtgactttgagctattgggctattccgattcgttttatgccgggtgtaaggttgatagaaaaagcacaaccgggacttgccaatttcttgggcggtcccttgtttcttag

SEQ ID NO: 7968 - DNA, 505 bp, Oryza sativa
  Clone ID: PAT_MRT4530_14515C.1
tttccccaggacgggcgggatacccgcgttactcgccgaataagaagcttcagcggcagaagaagaatcacccatcgagagttttcccctcccaaggaagatcagggatctcttcttgagataaaaacagtgatgtctgagaccatagatttaaccggagatagatgcattcttaagacagtgatcaggagagcaaaggatgatgctactgcaccttcagatagtcttcccattgttgatgctcactatgaaggaacacttgctgagaacggggaagtgtttgacactactcatgaagacaactccgccttctcatttgaaattggagagggaactgtcatcaaggcatgggatatcgccgtgaaaacaatgaaggttggagaggttgcaaagatcacatgcaagccagaatatgcttatggagctgcaggttcacctccagagataccggcagaagcaactctcacttttgaggaagagttaatcccatggaggccgaggaaag

SEQ ID NO: 7969 - DNA, 680 bp, Oryza sativa
  unsure (1)..(680): unsure at all n locations
  Clone ID: PAT_MRT4530_14516C.1
cactcctatgggcgattgggaccctcgaggcggcgggatcttttctcactcgtctagccatctgaatctgcgaacctatatcgtcaatcaaaatgagacgatacaccagcaagacatttgctatgcatgccttaattgatctttctcgaagtgccactactgccaatacaccactatgcatgatttacccaccatcatcacccatgggaaccatggatccatgtactccacacatgacgcaaacaactgctcatgggtagatccacaggcaagtttatgtaacatgcaatggggctcctactccaactgtgtcttctggatctacaaccgatgatacctcagaggcactgagtccacagtagtcagactcttctaagaataccacaacttattcgagatgtactagcccaagcacaggattgcatgcaagaagtggactgtgccatgtcatacatataaaacatgtaccctgatgacttccaactctcttccagcgaatagatatccgatgcaaacgaagaatacatggactctagatgtagggaagaacatactatagatgatactacatctagaagtacgagacgttgcataatcatcaactcagcttcgnttagagctgtctccttgtggcaatattactgaatgcttgattataactagaaaaattttgccactca

SEQ ID NO: 7970 - DNA, 3312 bp, Oryza sativa
  Clone ID: PAT_MRT4530_14517C.1
atggagctcacttcggagcaagaacaactcatccaccgcaatgctcaagcttccaatgcaattctctccgccttgagtccggaggagttcaacaaggttgatggacttgaggaggccaaggagatatgggatactttgcaattggctcatgagggatcacccgccgttcgtgaggccaagattgaactattggaaggaaggcttggaagatttgtgatggatgacaaggagacaccacaagagatgtatgataggatgatgattctggtcaacaagattaaaggacttgggagtgaggacatgacaaatcactttgtggtcaagagacttctccgtgcatttggtccaagaaatcccactcttgtatcaatgatatgggaaaggaaagacttcaagagactcaccccaagggacattcttggaagaattgtgtctcatgagatgcaagaagaggaagctcgtgaagtgagacaaatagtgaagaatgccgctatgatcaaaaatcaagaagttgctttgaagggaaaacaagaagaagagtcaagttgtgaagaaagtaaagatgaagagatggcttttattgtcaagagattcaagtactttcttcgcaagagtggctatggcaaagggaggaaggatgatgataagggaaagaggcaatcaaagagagcatgcttcaattgtggcgaatatggccacttcattgccgattgtcccaagtcaaatgaagctaaggctaagggaggcaagaagaagccgaagcgtgctcatgtggcggaggcacacatggcggaagtgtggtactccggagatgaagaagatcccgatcacgaggtcaagctcaagcccaagtcaaaagacaaggttgaaggagaaggtggtgttgctaccgtcgccttcaagtcatcctcttcaagcaaggagcatcttttcaacaacttaagtgatgacgacgacgactcctaccactactcttgcttcatggcccaaggccgcaaggtgatgactcaaaagccctctcaaacttctcttgatgttgattccagtgatgaggaaagtgataatgaattagatgatacataccattcaaaagatgccctttacaagaccatcaccgctcatcctaacaagaatggacacggctcgggttttcgggtggaagtcatggacccggaacatccggacaaaccgggagaaacttccgggtgggagtctctgtctctcaaaaattcccaccaggaagttccgggccaatggccgtgcacacgatatgaccggaagttccggtcacaatgccaggaggttccggccagagggaaacaagttgggaatccacatcctatcaagaacatcatgactacaacacgccctcttgagcttctacatatggatttattcgggtccatggcctacataagtattggaggtaacaagtatggttttgtcattgttgatgatttttcccgcttcacttgggtgtattttctccatgacaagagtgaggctcaaaatgtcttcaagcgcttcaccaagcaagcccaaaacctctatgatctcaccatcaagaaggtgcgaagtgacaatggagaattcaagaacactcaagtggaggaattccttgatgaagagggaatcaagcacgagttctccaccccctatgatcctcctcaaaatggcattgttgagaggaagaaccgaactcttattgaagccgcaagagcaatgcttgatgagtacaagacttcggatatcttttgggcggaggctgtgagcaccgcatgccatgccatcaatctcctctacctccataagatcctaaagaaaacttcatatgagctcttgagcggtgatgtggatccaagtcaagctataggtactaaggctattggagatatacgactagtcgagacgcaggatgaccaagaagatagggatcaacctccgtcatcgacatccaatagccctacaagtgctgtgtctgctgagccggaagttccaggtcctattgaccggaacctccggacatctccaggcccagaagttccgggttctacagtccggaacctccggaccagcggtagtgaagacgtgccaacggcgcaagtggatgggatcgatgttccgggcactttagagcatactgatcaggctcaggtccccccagtgcaccatccaaggatacatcacattgtccaaagagatcatcccgtcgacaacatacttgaattggtctatgtggagcaaccaccggggttcgaggatccaaagttgccaaaccatgtgtacaagctccacaagacgctctacgggctcaaacaagcccctagagcttgtatcatgactaaaagtttcaagatgtctatgatgggcgagttgaccttcttcctcgggctacaagtgaaacaagcacaagagggcaccttcatctctcaaaccaagtacgtgaaagacatactcaagaagtttgggatggaggatgccaaacctatcaagacacccatgcctaccaatggccacctagacctcgacgataatggtaaatgtgtggaccaaaagcgggaacaccactccacaggcatcctcgacggcacggacgaagcctactcctcggagaacccgccatcggacacatactcgagctctgaggaccagccggggtacacaaacgacaatgttgacatacagatccaccgggaacaccactccacaggcatcctcgacggcacggacgaagcctactcctcggagaacctgccatcggacacatactcgagctctgaggttggggggaaaaggctgacgtcagcgagggggcgcggcgccgacaggcggggcccaccggtcagcgaccgggagagagagaaagggggtggcggcgcgcgggcccacgggtcagcggcacgggggaaaggaggggcggcggcgccacgtggcggccgaaccgacggccccgatctacccaagggtagatcggacggcggcgggacctcgcggccggggcgcgcgggcgcggcgcgagacggcggcaaccatggcgccggcggcgcggcgctcacacggcggcggcgcgcatgcggcagcggcgcaaggcggcgaccgaaggcgaccgaccggcggcggggagcggcggctagaggaggagcggcggctacgcggctaagcggcgcgcacgcggctacccggtacggggaaaaggagaaagaggagggggaagcctcaccgacaacggtcgacgacggcggccgacggaggacgacgacgacggcgggacgagctccggaacctcctaacgaacaaaaggagagggattag

SEQ ID NO: 7971 - DNA, 5385 bp, Oryza sativa
  Clone ID: PAT_MRT4530_14518C.1
atgtcgcatctagagggaaccgaagggttggatgacaagggagacgcttctagcaccaaggatactggacccaagggagctactattcactttgattacaacaaacttaatgttcctcctcacaactttgtctccgtgccttccgggcgtgctcctcaatttgatgggacacattacgccgcttggaagcacaagatgaagttgcatttaatctcgttgcatccaagtatttggaaagttgtttgtacaggtattgatgtaccccatgatgacatggagctcacctcggagcaagagcaactcatccactgcaatgctcaagcttccaatgcaattctctctgccttgagtctggaggagttcaacaaggttgatggacttgaggaggccaaggagatatgggatattttgcaattggctcatgagggatcacccgccgttcgtgaggccaagattgaattgttggaaggaaggcttggaagatttgtgatggatgacaagaagacacctcaagagatgtatgatagaatgatgatccttgtcaacaagatcaaaggacttgggagtaaggacatgacaaatcactttgtggtcaagagacttctccgtgcttttgatccaagaaatcccactcttgtatcaatgatacgggaaaagaaaaactttaagaggctcaccccaagtgatattcttggaagaattgtgtctcatgagatgcaagaagaggaagctcgtgaagtaaggcaaatggtgaagaatgccgccatgatcaaaaatcaagaagtggctttgaaggcaaaacaagaagaagagtcaagttgtgaagaaagtgaagatgaagagatggcttttattgtcaagagattcaagcactttcttcgcaagagtggctatggcaaagggaggaaggatgatgacaagggaaagaggcaatcaaagagagcttgcttcaattgtggcgaatatggccacttcattgccgattgtcctaagtcaaatgaagctaaggctaagggaggcaagaagaagccggagcgtgctcatgtgacagaggtaaacatggcggaggtgtggtactccagagatgaagaagatcccgaggtcaagcccaagcccaagctaaaagacaaggttgaaggagaaggccgcaaggagatgactcaaaagccctctcacacttctcttgatgttgattctagtgatgaggaaagtgataatgaattagatgatgtgcttaagagctttagcaaacccgctatgcaacatttggctaagttaatgagagctttggatagtaaagaacaatcactcgaaaggcaagaagaattgcttattcttgagaagaaaagaaaccttgccttagaggagagcttagctaaagaatgtgctaaaaatgaacaactagctaatgagcttaatttggctaatggttctctagctagccttagggatgtcaatgaaactcttcaagagaaatttgctaatttagacaaaagtcataaagatcttgacgttcaatttgacactctttggaatagcacttctcaaccaaatgtggtttctaattcttccaacccatctactagcaatggttgtgctaggtgctacaacattgatttgaactcttgtactactaatgttgatgctatgcaagctcttaagaaagagaatgagaggttgggcacattggtgaaatatggatgcataaagacgtaccattcaaaagatgccctttacaagaccatcaccgctcatcctaacaaggatggacacggactcgggttttcaggtggaagtcctgtgtctaagcgtgtgatggtaaatgggaaagaatgcttgatgtttgtgagagaaggtaaaactccacaagcaagtgaggagactcgtcccttcagtggtcaacacccggaagttccggacaaaatgatcggaagttcctgccctgcatactcctccgatggctcaaattgggttgtggacagcggctgcaccaatcatatgacgggagagaggagtatgtttaccagtcttgatgaggagggtggaagtcgtgaaaatattgtctttggagatgatggtaagggaaagctacaatttattatccgtatctcaattgtgcgagatgactcatccatagcattcaagggtgtgttaaagggtgatctctatctcgttgatttcaacgtggatagagtgaatccggaggcatgcttgattgctaaatcctctatgggttggctatgtcaccgtaggctagcccatgttggaatgaggaatttggcatctcttctaaaaggagaacacattcttggtttatctaatgtttcttttgagaaggatcgtgtgtgtagtgcttgccaagtcgggaagcaagttgggagtccgcatcctatcaaaaacatcatgactacaacaagaccactcgagcttcttcatatggacttatttgggcccgtggcctacataatcattggaggtaacaagtatggttttgtcattgttaatgatttttctcgcttcacttgggtgtactttctccatgacaaaagcaaagctcaagatgtcttcaagcgtttcgcaaagcaagcccaaaacctctatgatctcactatcaagagggtgcaaagcgacagtggaggagaattcaagaacactcaagtggaggaatttcttgatgaagaaggaatcaagtacgagttctccaccccctatgatcctctccaaaaaggcattgttgaaaggaagaaccgaaccctcattgaagccgcaagggcaatgcttgatgagtacaagacttcggatgtcttttgggcgaaggccgtgagtaccgcatgtcatgccatcaaccgcttgtatctccacaagatcctaaagaaaacttcatatgagctcttgagttgtaagaagcctaatgtttcatattttcgtgtctttgggagcaaatgctttattttgagtaagaggcctcgctcatctaagttctcatctaaggtggatgagggattcttacttggctatgaatcaaatgcacatgcctatcgtgtcttcaacaaaacctccggtattgttgaagtcactagggatgtgacatttgatgaatctaatggctcccaaggagagcaagttgttgtacatgttgtaagtgatgtggatccaagtcaagctataagtattaaggctattggagacatacgaccagtcgagacgcaggatgaccaagaagatagggatcaacctccgtcatcaacatccaatagccctacaagtgttgtgtctgctgagccggaagttccgggtcctattgactggaacatccggacatctccaggcccggaagttccgggttctctagtccagaacctccggaccagtggcagtgaagacgtgccaacggcgcaagtccatgattatgtccaaagagatcatcccgtcgacaacatacttggtgacataagaaaaggggtggaagatgcgcttggtgatccggattgggtgatggctatgcaagaggagttcaataacttcactcgcaaccaagtatggactttgatggagagacccaagaaaaatgtcatcggcaccaagtggatctttcgcaacaagcaagatgaacatggggtgattgtaaggaacaaagcccggttatttcaaatggatgtcaatagtgcctttctcaatggacctatctcggagttggtctatgtggagcaaccaccggggttcgaggatctaaagttgccaaaccatgtgtacaagctccacaaggcgctctacgggctcaaacaagcccctagagcttgtgtttccatgtgtgcccgttttcaagcggagcctaaagagtgccatttgattgccgtcaagagaattctaagatatttagttcatactcctaatcttggcttgtggtatcctaagggttgtgactttaagcttttgggctattccgattcggattatgccggatgtaaggttgatagaaaaagcacaaccgggacttgtcaattccttgggtggtcccttgtttcttggtcctccaagaagcaaaattctattgcattatccaccgccgaagccgaatatgttgccgccggttcttgttgtgcccaattccattggatgaaacaaaccctaaaagattttggctacaacttctccaagattccactcctatgtgacaatgagagtgccatcaaaatagccaacaatcccgttcaacactcaagaaccaagcacatagatattcaccaccacttcttgagagatcatgaaactaaaagagacatatgccttacccatgtgagaaccgagagccaattagccgacattttcaccaagcctttagatgagaaaagattttgcgagcttaggatggtcagtatgcctcgtgagaagagacagaagctgtcacaggatgttccctctgactcgagtcccctggttcgtggtcctagggggagattgggcaaagaaaaagtgggagatttttacagtgggagtcagattctgattcattccaggagggctggtagcattgtcattcgtgatgctccccgctctccctctccagttgcatctgagtcagacaatggtggaaatgaggatgagcctggttctgagagcaatcctttaaggctttacaagacgagggctgttgatcctgatcctagacatccaagggtgaactatctgaagaatttgctaaggtgtgcaaaggatagaatggtgagtcctgatacaatgactgctgactctcaggatgacagattcaggaccttggtgcagattgattggtacaactctatgatcatgcgaagatcttatccagtggtagagatgaagtggctagactggcagtacatgtcctcaaagaacaacttggttttcaatgaggtgcgcaaggatgctcccaaggattgtttggggactactcgtgggttgcatccatactatagagtgctttattctatcttcaggtggtctttgctccccaaagtgaatgatgctacagctcttccaagtcggcatgcgctccttctcagtcgcatgcgctacaacaagccagatttcagcatcatgaagcttatctggacaggcaaggaggtctctgatatttctgatgatgaggagttcgttgatccttttgctgcttatgaggctgctcgagacattgctaatggtgagggtccctctggcactactcatttcttcaatgaggagtcctcctactccgaggagaacagcgatgatgaggagtccgatgcacctactgagaatgtgcctacagatctagatgaggcagtggacgccgctgggcaagacattgactctcctgactccggcgacaccgagatcatttcttctgatggagatgatgatgaggcttga

SEQ ID NO: 7972 - DNA, 1053 bp, Oryza sativa
  Clone ID: PAT_MRT4530_14519C.1
atgaggaagaagaacaatgaagtgttcaaccaagtgatgcaagtgtgccacaacaagaatcttggagatattcttgccttggagtatgattggaatgaggaggtcattgcacagttctatgcgacagcattctttggtactacaaggaagggaaccccttatgtgaagtggttgactgagggtgttaggcacaagatttccatggcacagtttgctaagatgttggggttagatgatgaggatctcattaggcccaacattcatagtgaagcacccctccccatgatcaagaccaagttcatgtatgcaaaggatgctcctaggacttgcatgggatctactcatggattgcatcccaactacaaggtgttgtactccatctttcgttggtctttccttccaaaggttggagatgctactgctttgccatccaagcatgctcatcttctcagttgcatgcgctacaatcagcctcccttcagtgtgatgaaattgatttggtatgagatcgccaacaccattcttgagcctaagcggggttgcatctatgctcctttcattataaagatgattgagacagtcaccgggtggtccctcgatctgttccttctacttcagctggtccttctactagtgccccaccaagttcctcgagttcttctcccatcaagaaggcacttcaggcaatttttctgtatgtgtgctaagactgccaagaaagtgaaaaagatagaaaggcgtcagaaggaagatagaagagaggctgggaaagaagtgttagatgattctgaggatgaggtctatgttgatccatttgaagcttatgaggcagccagcaacgttgccgttgaaggtccatccaccttcttcaatgaagaatcttcccattctgttgatgatgatgatgatgatgatgatggtgatgagggtgacaccgaggcagctgctgaggatgctcccactgatgttgatgagggtgacaccgctgctcagtccgatgagtctcatctctccggcgatacagagattgttccctctgatggagatgagtga

SEQ ID NO: 7973 - DNA, 218 bp, Oryza sativa
  Clone ID: PAT_MRT4530_1451C.1
ggcggcgccgcgacgggcgccgtcaccggcgacagccggcgggaggtggagcatcgccttggcgccccgcatgcggaacgcggcgcggtcgtacgccgcggcggccttctcgggcgtgccgaaggtgccgagccacagacgcgcgccgtgccgtgtttggtcacggatcttcactttgtacttcccccacggccgccggttcacaccgttgttgtgcc

SEQ ID NO: 7974 - DNA, 446 bp, Oryza sativa
  Clone ID: PAT_MRT4530_14520C.1
cccacgcgtccgggtcataaaagctagatctctccactgcaagctcatgatcttgtcgctaacgaagctagctaattgctaagtaactacaggcatgggatcacgctactggtcgcttggttctccacatgctggcaccgaagaaaacaatcaagccacaggagggatgaaatggggtgatcccaggacacaaggctctgccagcttgcaaggatatagtgggccgtcttcagtgcatcagcccatcagcagagaacccgcagcgggtttaatacggggagatcccagggctcaaggcgcacaaggatatggtgggccgtctttactgcatcagcccatcagcagagaaccggcagcgggtttaatccggggagatcccaggactcaaggcgctcccattacacaaggggctcccgattggggtaatgtgaagcagccaaacagta

SEQ ID NO: 7975 - DNA, 444 bp, Oryza sativa
  Clone ID: PAT_MRT4530_14521C.1
atgggatcacgctactggtcgcttggttctccacatgctggcaccgaagaaaacaatcaagccacaggagggatgaaatggggtgatcccaggacacaaggctcgcctgccagcttgcaaggatatagtgggccgtcttcagtgcatcagcccatcagcagagaacccgcagcgggtttaatacggggagatcccagggctcaaggcgcacaaggatatggtgggccgtctttactgcatcagcccatcagcagagaacttaaattcctctgtgttgtaattacgcatgcactgcactacagcggcagcgggtttaatccggggagatcccaggactcaaggcgctcccattacacaagctttactgatcaaagcataacaggagttcgatacatgagaaatgctggggtttccggcttgccaaacacaacaaacagccattaa

SEQ ID NO: 7976 - DNA, 179 bp, Oryza sativa
  Clone ID: PAT_MRT4530_14522C.1
gttctagatcgcgagctgtcgcccttttttttttttttttttttacaggcaacatcagtcttcattttatcagcctgaaaaaaagaaacaatctgctgctggtatcgtcacaaaccaacgaaggaagccaattactaccagggggaataccgcggtgacaaccgcactactaaggacag

SEQ ID NO: 7977 - DNA, 207 bp, Oryza sativa
  Clone ID: PAT_MRT4530_14523C.1
atgagcagaattaatagccaagaggccgaccgcgaccggacaccgcgggcctgccgggacttgaccgcccaccgctgcactcgctgtgcctgtcgactgactgactatactgctgtctgctgttataaatcccagctcgatgcaaaacaattattggaaaatccagcttgtgttttaatgattggaaaaggtaagcaaaccatgcaa

SEQ ID NO: 7978 - DNA, 981 bp, Oryza sativa
  unsure (1)..(981): unsure at all n locations
  Clone ID: PAT_MRT4530_14524C.1
cgtccgnccggccgggacaaccgcagacgagacgacgtcacccacaaccgcacgcgcagatccgagaggcgagagcgagagcgaggtgggaatggcagggaggctgaccgcggcgggatcccgcgtcctgggcggccagggcgccgctgcccgcgccgcggtgtccgcgctccgccaccgcgccggcatgggcctccccgtcggcaggcacatcgtccccgacaagcccctgccgacgaacgacgagctggtgtgggacaacggcacgcccttcccggagccctgcatcgaccgcctcgcgccgcacatcggcaagtacgaggcgctggcctggctttgcggtgggctcggattcttcgctactcttggcttggctgccaccttgaacgacaaggcctccaagatcccctatactccaaaagtctacccatttgacaatttgagagaggaacttggtgatagaccatagaagaagaccccacttcctcaagtgatgtgatggactgaattctcttgccttctttaatcagagaaaaaaacaggacaattccaatgttcctgatggttgtctttgttgtcgctgtatttttataagttacaatcttgtgatttgctgaatcctgccaagcatggctttgttctataataatgcgatgagtgtctttgagcaactattgcacatgctaaggaattgactcttgacgatttaaagttagaattttcaagtgccaaaaaataccctgtaaaaaaaaaaaaaaaattctgccctttttttaaacgtctggctgggaaacctgtgttccacttaatttgtggagccatctctttgccccttgcgattctaaaggctgatggatacttctaaatggagacaaattgaaatgacacccctttcgacttgacactagggtgggtccaaaattacatgcttttggctaggccatttgttgtgtccttttgtgtcagaagtagaagagggat

SEQ ID NO: 7979 - DNA, 2572 bp, Oryza sativa
  Clone ID: PAT_MRT4530_14525C.1
gtttgtcggccactcgtctcggttgacacacgggatctgcttccgtcgacccgtggaccgtctctgtgcactcggtctaccgtggtcccttaggactctaggatcatcgcaaggcgttaggtgttgcgatcgtggttgtcaacttgtcacaaaaagttgccaacactatgttgatgacattgtcgtgaaaatttgtaaggcattcgaccatgtgtcagacttgcaagagactctcgacaacctccgcgcggccggcatgaagttaaacccagaaaagtgtgtgttcggtgttcgcgcgggtaagttattgggattccttgtgtccgaaacggggatcgaagcgaaccccgaaaaaatcgatgacattcagcaaatgaagccaccatcgaacgtacgacaagtacaaaagctcgcggggcgaattgcggcactcaatcgattcttatcaaaggcggctgaaaggggtttgccattcttcaagacccttcaaggggcaggaaagttcagctggacgcctgagtgccaatcagctttcgataagcttaagcgatatctgcaaagcccactagccttggtcagcccaacaaggggaagcgaactgtggctttatctagcagctttgcccatcgcagttggcgctgctctagtgcaagagaccgaagctggtcagaaaaaagtgtacttcgtgtccgaagctctctaaggggcgaaagtcagatacattgcgatcgaaaagcttgcttatgctctagtaatggcttcaagaaagctcaaacactacttccaagcccacaaaagcatagtaccctcgcagtaccctttgggcgaaatgcttcaaggaaaagaaatcacaaggcggctaagcaaatgggctgccgaactataacctttcgacctacactttgtcgctcgcaccgcaatcaagtcccaaatcctcgctgattgcgtggccgaatggacaccatttagtacaaccaataacacagccgaatacgaagcagtattaatgggcctgagaaaggcgaaagcactaggcgttcggcgtctgataatcagaacggactcaaagcttgtcgccagccaggttgacaaatgtaacacctcgaaggaagaggggataaggaaatatctagaagctgttcggtctatggagaaaagcttcgctagcataacggtcgaacacctaccccgaggccagaacaaagaagccgatgcgttggcaaagtcagccgcttgtttggggccgcattcgctaggggtcttctttgaagtcctgtatacaccaagtgtgtcaatagatagcctagagatcatggcaatcgaccaagtcaaattgggcgaagaccaggacgactggcgaacgccattcgtcaagcatcttaatgggggatggctgccagacaacgaagcaaaggcgaaacaattacagctcagagctgcaaggtacaagttagtctccggacaattgtacctaattggggtactgcagcccatgcttcgctatgtctctttctccaaaggtaaggaaatggtaaaggaaatacaccaggggatgtgtggagcacaccaggcggcaaggaccgtcgcatcaaaagttttttgccaagacatatactggccaaccgtacttaaagtatgcgttaagcagattaagaagtgtgaaagctgtcagcggcacggccgaaaccaaacagcaccacagtatgagctacaaccaatcgcaccaatctggccattcgcaagatggggtttagacatcatcgacccattcacggtggcgcgaaatggttacaggttcgccatcgtagccatcgaatacttctctcgctggatcgaggccaaacccctcggcacaataaccgcagctgcggttcagaagttcgtacggaagaacatcatttgctggttcagggtgccaaaatagttcatcgctgacaatggcaagtagttcgattccgagaaattcagagaaatgtgcgaagggttaaacctggagatcaggttcgcatcggtggcgcacccacaatcaaacggggcggccgaacgcgcaaatggtaaaattctcgaggctcttaaaaagagacttgagggagcgacgaaggggaaatggccagacgaaatgttgtctgttctctgggcccttcggaccacccccacaaggccagccaagttcagccctttcatgcttctctatggtgacgaagcaatgacgccagccgaactaggggctaattcgccaagggtgatgttctctggaggcaaagatgggcgtgaagtgtcgctcgaactcctggaaggggtaagagtcgaagcgctagaacatatgcgcaaatatgcagcaagcactttggcgacctacaacagaaaggttttaccgacagagattttgcctagtcatcttgtgctaaggaagaaggcgaaacctgtggcggtctgaaaactagaatccaaatgggaaggaccaaatctgatcaagcatagttctcgagcgggctcctttcggctggcgaccttggagggtgaagagttcgaccactcctggaacgctgcctctcttaagcgtttctatgtg

SEQ ID NO: 7980 - DNA, 500 bp, Oryza sativa
  unsure (1)..(500): unsure at all n locations
  Clone ID: PAT_MRT4530_14526C.1
ttagcnaaaatggtgatcttttgggttggcataaccgcnaattcngcttgcagtgaacaatgccccaaaacaccgtccgtggggtctaanccccttgaattgggtanaactttttgaatgaacccccacactcccaaaggaaatgaaagatnggtgccctttnccaanattgttctcggggaacctaantgggtgatgctnggngtggaatataggtgggcnacacntactcccccccccncaattgggtgcatttgttctcccccccataaaaggaaacttgccaaagctttccttngcnaaactgtctcccacgctgttatcnctgtccccncntanttcaatnattctcancncccgctaccaangatgcttgttggattgnccggnttggaagtnaattaagantancaatnaaaccacngcccccnctctntcttnttgggatgaacaaccaggaaggtctgnttgctgtntttgacttagggcgggggcgccnt

SEQ ID NO: 7981 - DNA, 585 bp, Oryza sativa
  Clone ID: PAT_MRT4530_14527C.1
gttgcaatgtgcaatacgtaagaccatgcctctttgcaatcatttatccaggacagaatcaagtagtagaaaaaggataaagaggcgccagcatcttctgctcctgccttgagaaatctgggagaaacacaaattggaactgcagaatttgacgctaacaaagccattcaggacattactttttttttcatgttagtgatggtgcaattgatactcacctgccaaatacatatattccttgggcatggtactattgagtcatttttcttactcatgtgcaagaatatttttttttccttacacaattctgatctcaagtcccaacgcctctcctagacagcttgaaagaaaaattggacaactccaagacctgaagaactctgcgcaagaagtttcatcagatgacacacttcagatgtttcatgagagcattcttcagagtagccattcattagaggaaccacatgcaacactaaagagagctacagattccagtaggttgcaatttctctcagaggatgttgcgatgctgtgttgcatgaatgcccagatatgaaagaaagtggagaattgacatgagattca

SEQ ID NO: 7982 - DNA, 3363 bp, Oryza sativa
  Clone ID: PAT_MRT4530_14528C.1
cccgcgtccgcctcctcctcctccgcgtcctccattaccggtagctcggaatccgccgccggcctccgacgatcgccgccccctcgccgggcccggagatccggatccccgccgcgctcggtatttgtttgatttgagattttccactgtgccttggacatttgagttctatggttgcaagatgaggctgttgacatcctctggagacatgttgaacttgttaacggtctaaaagtttgtcaccagcagggtgatggcatctagtacaaaatctgacttgatgtctggtagtcctgatgggcatggatacttcagtgggcaacgtggactgtattcagctgcttcgttggaaaggtcagcaagttttcgtgagagtggcgatagttatgcagcattcccagtatcaggttaaggtcaccgatctagcagttgattctgctactcttctacaagcacttgccatggactagaggacaacaaaacaaaagacatccaacatatctgctcctgtaagcaaagctctaagtttggttctagagtcgcaggccaaaatacagccttctgtcaactccatggacagtacctctgctgctagtgctaggcatgaggaaccagcaaatgcatcgaatgacgcagaaatgccggtcttgtcaaacctggagctcccaggaatggatgttgatttcggcggctggttgaatatagaagacgacgacggactccaggatctagacttgatgggcctggagatccccatggacgacatcaatgagattaatctcatgatataaccgtagcttgtttatctacgggccccccatagaaagcttcctatagtgcacaggtaacaggtgattttctcaagataaccaccaaccccagcaagtttaacacaaggccagataggctccaggtagttttggtaaagtttatagagacctcttcacattccactctcccacttcctctctgtatcagcgtgtacttatgcctccctaccttgtgccgtatgttactctgtggtgtacatatctattttggtacggtacgaggtagagtggcttaattgcttcatttatccagagaaatgtgtactcaaaaggctgtacatatatgatcatcatccctaatgatgaaataaaaccacgccagttatagctttatgaagctagggcaagaatgacaaactcccctagttttagacggggagatcatggtctttcaactggatctgagggtgatgaatctggtgttgctgagaaaaagttaagggacaaaagcaaaagggctggggaactagatgacgggcactctggttttcaaaagatcgcaatgcttggccatccttccaaaaggaataagttatctgctgatgatgatgttggagatgctgcacgaagacaaggaaggatcggacgaggttttactccaaccaggcccagcacccctgcatcaattgacaagcttgaaaatgctccaactacaaaacaaagaagtgttaggacagtcactgagagaaatgaaagtaaatctggaagaccactgataaagaagatgtcggagcgcaaaggcaatgcacgtcctagacatataagtagcaatgcgcagttagactctcctggatctgctaattcaagtccattctggcggcaggttgaaccattctttagttatctgacaacagaagatatagcctatttaagtcagcagatccatttatcggatgactccaccgcgagcaggtcaattgaaggtgatgaaagtcggaagtacaagggtagtcttgaatacatctcgcaaccatcaactccggctggtagcaacaaagatgaccatagcgctcttcaaaatgggtataccctgaatgagatagataatgatgtagggattgcatgggagacaagctgcattgaacctatcctggatcaacttgtccaaggaattggggcgcgaggaggtgcatcagttggccaaagacttatgcaagctctgattgatgaagacaaggttgataatattaccaacaacatttacagaagtgaaacatatccatttgatacacatgaaattcatttcgaggaaggaggatggaaatcgcattcacagggttataagttggagtctttaatgaactttgaagctgcagggaaaggttctaatggtttgatgttagattctgattggaaatatcatgatgaactatcacataaaggcaataatgccatggagaaggccaaggtgtggcctgagtttcagtacagtgagatgtgcttcagtgataggatcatcattgagctaagtgaagttggtgtatccattgaacccgtgcctgatcttgcccagagtgaagatgaagatatcaattccgaaatctgcaaattagaaggccaacttcataaagaggttgtagataagaaaaacttgctacggaagctggatggcattcttagaactaaaaaggagtcacagcacagggaattttcacggcgtgccatggaaaggcttttgctgatagcgtatgagaaatacatggccttctgtggttcttcaagtagcaaaaatgtaaatagagctggcaaacatgctgctctaagttttgttaaacgaacaatagcacgttgccagaactatgaggagtcaggagcttgctgctttgatgagacccctttcaaggatatgtttgtatcagcaacttctcacagaagcgacccagattctgcttcacaagacaatattacggtaccaaaatcagtccaaagggctagtacatcagatgcctctcgagcaagcagtcaccttacggatctgtcattttcgaaggaggatccctggacaaataatgtaaaacaacgggaattgttgcttgatgaagttgtaggtagcataacaggaggaaccctgaaaacgtctggccttggtacttcccttgtgagcaacacaaaaggaaagagaagcgagagggaagggaaggggcacaaccgagatggtagcagatctgggcgcccgtcatcatccaatgcaaaaggagaaaggaagaataaaacaaaacccaaacagaagacagccaacatatctgctcctgtcagcagcgctctaactagggatccacagtcgcaggccaaaataacgccttctggcaacggcagggacaatacctctgctgctagtgctaggcatgaggaaccagcaaatgcatcgaatgacgcagaaatgccggacttgtcaaacctggagctcccaggaatggatgttgatttcggcggctggttgaatatagaagacgacgacggactccaggatctagacttgatgggcctggagatccccatggacgacatcaatgagattaatctcatgatataa

SEQ ID NO: 7983 - DNA, 1947 bp, Oryza sativa
  Clone ID: PAT_MRT4530_14529C.1
atggtgcgcctcatcccgcgactccacgccccaccgccgccgccgccgcgtgttccagccgggctgccgctccccctcctcccggccccggcgctcgccgcgaccctcctcgaggccgtctcctcctcaccctccctcccccacctccgccacctgcacgcgctcgccgtgcgcctgccgctcccggcgacctccctccccttcctcctctcccgcctcctccgccgcctcgccgcgctcccaccaccaccgcacgcgccgctgccgtacgcgctcaacgtcttctccgcggtctctccccccgaccccttcctcgcggcggcgctcctgcgcttcgcgttcctcacgcagcctccgttgctccccttccgcgtcttctcccacctccgccgcgctcacggcgcggagctcccgttcctcccgttcgctttctccacgctcgccaaatccgccacggcctcccgctctctccccgctgccgcagccgcacacgcggtgtcggtcctcgtcggcgggtttgataggcaccggtttgttgagaactcgctgatcggtgcttatgttgcgtgtggtgatgtgggagctgcacgcaaggtgtttgatgaaatggtggagaaggatgtcatttcatggacaagtattgtggtcgcctataccagaagcggggatatgcgatcagcagaggaggtgtttgggcggtgccctgtgaaggatatggtggcttggacagcaatggtgactggctatgcgcagaatgccatgccagtgaaggcattagaagtgtttgatcgaatggcagaacttggcatggtcattgatgaggtttcattgacaggtgctatctcagcttgcgctcagcttggtgctttgagacgtgccgcttgggttcaggagattgcagagaggactggctttgggaataacgtagttgttgggtcagggttggtggatatgtatgccaagtgtgggctcattgatgaggcatccaaggttttttatgggatgcaggaaaagaatgtgtacacatatagctcaatgatcgctggtcttgcatcgcatgggagggctagcgaggcgattgctttattcaaggagatggtcaatagggcaaatgtggaaccaaaccatgttacctttattggggtactgacagcttgtagccatgcagggatggtgggagaaggtcggtactactttgcacagatgaaggacaagtatgggattatgccatctgcagatcattatgcctgcatggttgatttgcttggccgggctggattggtggatgaagcccttgatcttgttagatcaatgtccgtgacgcctcatggtggtgtatggggagcactgcttggagcttgccggattcatgggaagagtgaaattgctaaggttgtagctgaacatctttttaaactcgaaccagagagcataggaaactatgtgttattatcaaatatactcgcgtcagctggaaaatgggaagaagtgtcaaaggttaggatattgatgagaaagcagagactgaaaaaggatcctgctgttagcttgtttgaaggcagagatggtttggtccaccagttctttgctggtgataatgcccacccaaggacacatgaaataaagaaagcattgttggagttagtggcaaagctaaaacttgaaggttatgtacccattttgagttcaattgtttatgatgtgaacgatgaagagaaggaaaggctgttgatgggtcatagtgagaagcttgctttgtcgttcggtttgcttacgcttggatctggatgcacaattaggatcataaagaatctaaggatctgtgatgattgccatttgtttatgcagttagtatcgagagttgaatctgttgagattatagtcagggacaatatgagattccatcatttcaagaatggagaatgctcctgtggtggattctggtga

SEQ ID NO: 7984 - DNA, 325 bp, Oryza sativa
  Clone ID: PAT_MRT4530_1452C.1
atgcagctcaacccgaaagcaagaactcgtcgaaacaaaactaaagcaaaaatgtggcaatgtgccaaaattgtattgaacgtgactctatccatgtgcggcaatcatcttgaagcacctcaattcaacccgatgtcatacaccaaattatactgtcggaatcggctgcatcggcttacctagtccgactcagactcagccgatactaatcgtagccgatctagacttcagccgattcttgttcttttctcggatcaatctccgccttcgactccacctcgatctaatctccttttccgatgctgatattaccaaatttggttgt

SEQ ID NO: 7985 - DNA, 3585 bp, Oryza sativa
  Clone ID: PAT_MRT4530_14530C.1
atggcatctagtacaaaatctgacttgatgtctggtagtcctgatgggcatggatacttcagtgggcaacgtggactgtattcagctgcttcgttggaaaggtcagcaagttttcgtgagagtggcgatagttatgcagcattcccagtatcaggttcatcaaggtcaccagcagttgactctgctactctgcttcaatcacttgccatggacttgcggacaacaactttggagccaaagacatctcggttggatgtaaaaaaatcaataagtttgattcttggaatttcccctgaagagtctacatcaactccatgcacaggacggaactcatctcttccttttgaagagattagacgcatgaagaataatcttagtgacatctcaaacaaagctagggaaagatctagagcttatggtgctgctgtaacaaagattgagagatgttgcccgaatattttgcggaagcgttccagaggagatggttcatcaaatgaacgatctactgcattgttgtctggaggacttatatccaagatgcccccccaaggccatctaaatgcagatgacacagaactggtatctccgagaggagaagagaggataaagaatgcaggacagaataggagattacgcacatccatgtccgagatggatgcaaggaccactgttctgtcaaggggactgggctctactgatagaagtgcagatcctggcaaagtcaccggtggtggtccagcagttccagaagaaaaaattagggggctagcaactggtattgatggttgggaaaagccaaagatgaagaaaaaacgttctgctattaaggcagatgtttcaatgactggtccttcaagaaatgttgatgtagaccgggagcagaaaccagggatgcaacacaaatttaataatgaagctagggcaagaatgacaaactcccctagttttaggtctggaactgtctcatcagtctcgagcattagtaaatcagatttactttctggacaaaatggggttgggcgatccttaagtaggagtgatcaagacagtggattccatcctactaacaaaagggatcgtcaagctgttttagataaggaaatatcagctccaaaatctcataacaagttgcaagctaattctgatgattgggaacatccttctggcatgactaagcttaattctactagtggatctggcaatcccaaacgtacaaagtctacacattcattatcccctcccacccagtggggtgggcagaggcctcagaagatatcacgttcagcaagaaagtcaaatttagtcgctattatcacaaacactgatggtcaatcggtatcaggttcgcttgaaagtccctctatcaatgaagagtctgccggattacctaggcgtgcttctataaattgttcgcaacaaactagacggggagatcatggtctttcaactggatctgagggtgatgaatctggtgttgctgagaaaaagttaagggacaaaagcaaaagggctggggaactagatgacgggcactctggttttcaaaagatcgcaatgcttggccatccttccaaaaggaataagttatctgctgatgatgatgttggagatgctgcacgaagacaaggaaggatcggacgaggttttactccaaccaggcccagcacccctgcatcaattgacaagcttgaaaatgctccaactacaaaacaaagaagtgttaggacagtcactgagagaaatgaaagtaaatctggaagaccactgataaagaagatgtcggagcgcaaaggcaatgcacgtcctagacatataagtagcaatgcgcagttagactctcctggatctgctaattcaagtccattctggcggcaggttgaaccattctttagttatctgacaacagaagatatagcctatttaagtcagcagatccatttatcggatgactccaccgcgagcaggtcaattgaaggtgatgaaagtcggaagtacaagggtagtcttgaatacatctcgcaaccatcaactccggctggtagcaacaaagatgaccatagcgctcttcaaaatgggtataccctgaatgagatagataatgatgtagggattgcatgggagacaagctgcattgaacctatcctggatcaacttgtccaaggaattggggcgcgaggaggtgcatcagttggccaaagacttatgcaagctctgattgatgaagacaaggttgataatattaccaacaacatttacagaagtgaaacatatccatttgatacacatgaaattcatttcgaggaaggaggatggaaatcgcattcacagggttataagttggagtctttaatgaactttgaagctgcagggaaaggttctaatggtttgatgttagattctgattggaaatatcatgatgaactatcacataaaggcaataatgccatggagaaggccaaggtgtggcctgagtttcagtacagtgagatgtgcttcagtgataggatcatcattgagctaagtgaagttggtgtatccattgaacccgtgcctgatcttgcccagagtgaagatgaagatatcaattccgaaatctgcaaattagaaggccaacttcataaagaggttgtagataagaaaaacttgctacggaagctggatggcattcttagaactaaaaaggagtcacagcacagggaattttcacggcgtgccatggaaaggcttttgctgatagcgtatgagaaatacatggccttctgtggttcttcaagtagcaaaaatgtaaatagagctggcaaacatgctgctctaagttttgttaaacgaacaatagcacgttgccagaactatgaggagtcaggagcttgctgctttgatgagacccctttcaaggatatgtttgtatcagcaacttctcacagaagcgacccagattctgcttcacaagacaatattacggtaccaaaatcagtccaaagggctagtacatcagatgcctctcgagcaagcagtcaccttacggatctgtcattttcgaaggaggatccctggacaaataatgtaaaacaacgggaattgttgcttgatgaagttgtaggtagcataacaggaggaaccctgaaaacgtctggccttggtacttcccttgtgagcaacacaaaaggaaagagaagcgagagggaagggaaggggcacaaccgagatggtagcagatctgggcgcccgtcatcatccaatgcaaaaggagaaaggaagaataaaacaaaacccaaacagaagacagccaacatatctgctcctgtcagcagcgctctaactagggatccacagtcgcaggccaaaataacgccttctggcaacggcagggacaatacctctgctgctagtgctaggcatgaggaaccagcaaatgcatcgaatgacgcagaaatgccggacttgtcaaacctggagctcccaggaatggatgttgatttcggcggctggttgaatatagaagacgacgacggactccaggatctagacttgatgggcctggagatccccatggacgacatcaatgagattaatctcatgatataa

SEQ ID NO: 7986 - DNA, 1452 bp, Oryza sativa
  Clone ID: PAT_MRT4530_14531C.1
atggcgacggtcaccgacgccgcggcgcatgtcctggtcgtcccgtacccggcgcagggccacctcatcccgttcatcgacatcgtccgcctcctcgcgtcccgcggcggcctccgcctcaccgtcgtcgtgacgcccgccacggcgccgctcctcgcgccccacctcgccgagcacacgggcgacggcggcggcgtcttcgcgctcaccctgccgttcccttcccaccctgccatccccgctggcgtcgagaacgccaaggggtccccgcccgagctcttcgccaagctcgtcgtcgcgtttgcggggctgcgcggcccgctcgggtcgtgggcgcgcgatagggcggacacgcaccaccgcgtcgtcgccgtgctgtccgacttcctctgcgggtggatgcagccgctcgccgccgagctcggcgtcacgcacgtcgtgttctcgccggccggcgtgtacgccgccgccgtgatgcaccctctgtaccgcgtgatgccccggccggacgatgagaatgacgacgagtgccccgtcaccttccctgatatcccgggctgtccggcgtatccatggcggcagatcacgcgaacgtaccggacgtacaagaaaagcgacgagatcgccgagggtttcaagagcaacttcctctggaacctcgagagctcgtcgttcgtgtcaaacacattccggcggctggaggggcagtacctcgagaggcctctcgccgacttgggattcaggcgcgtgcgcgccataggcccgctggcgccggagtccgacgtgtccggcaaccgcggcggcgagatggccgtggccgcgtcggagctctgcgcgtggctggaccagttcgccgaccgcactgtcgtgtacgtcagcttcgggagcatggcgctgctgcagccgcctcacgtggcggcgctgtcggcggcgctggagcggaccggcgcggcgttcgtctgggcggcggggtcgcacacggcgctcccggaggggttcgaggagcgcgcggcggcgggcggcaggggcacggtgatccgcgggtgggcgccgcagctgtcagctctgcggcaccgggcggtggggtggttcgtcacccactgcgggtggaactctatcctggaggcggtggcggccggggtggccatgctgacgtggccgatggtggccgaccagttcgtgaacgcgcggctgctcgtcgacgagctccgcaccgccgtgccggtgtcctggggaggcgtcgcggcgccgccaaccgccgacgaggtggcgcgcgtgctcgaggcgaccgtcctcatggcggaggatggtggggaggccagtgacagcgagtggagtcatgtgggcgcgcgggtggaggagctcgccgtggaggcggcggcggcgacgagggaaggtgggagctcgtgggtggaggtcgacgagctggctcgggagcttcgcgggctttga

SEQ ID NO: 7987 - DNA, 197 bp, Oryza sativa
  unsure (1)..(197): unsure at all n locations
  Clone ID: PAT_MRT4530_14532C.1
agcatggcgaccgttgagtcatcgacggcgccgggcgtcgccgtcgccgccgcggtggttctggtggtcttaacgtggctntggacggcgcggtgcanctngtgtggaggccgtacgccgtggcgaanggcnttcggtcggcagcggatccnngggccggcgtancgnctcttcgtcggnagcnacggcgaagcaaa

SEQ ID NO: 7988 - DNA, 947 bp, Oryza sativa
  unsure (1)..(947): unsure at all n locations
  Clone ID: PAT_MRT4530_14533C.1
tgtttangcagctcttctaattcatatataggaactcagaatggcaggtgctcctcgaggactagttctcctcggcgtttgcgccgtcctgatggtgctcgccgtcagtggcgaagcggcgtcggtcgtcatcggcacggccaagtgcgccgactgcacccggaagaacatgaaagccgaggatgctttcaagaatctccaggtggcgatcaagtgcaagaacggcaatggcgagtacgagagcaaggccgctggaaagcttgacggctccggcgctttcagcgtccctctcgacaccgaccttcacagctctgactgcattgcccagctccacagcgcaaccaacgagccatgccccgggcaagagccatccaagatcgtgccattgtcggagggcacctttgtcaccgtcgctggcaagaccagctatccgtcggctttgtgtgcgtcggcgaccatctgcggccccatcaagaagaagatcatcgaccacttccataagaagccggtgccaccgaagccggatcccaagccagagccgcccaagccgaagccagagccagagcaccccatcctcgaccacttccacaagaaggagaaggacttctttgaccacttccacaagaagcccgtaccacccaagcctgagccaaagtcggaacccaagccacagcccaagccacagccagcgcctgagtaccacaaccctagcccaccagcgaagcactaaacattatctacgtttggtcttgtatgatttcgtgccatatcagtgtgtccgcagaataacgctttctacccccgtgtgagattatacattgaaatataatgtacttgctagctttcatccgcaggagaaaaaaaaaaaaattttttttttaaagtgtgaccgggttcatttattggatatcgcatgcatattagcagggcacgatgtgtactgtaat

SEQ ID NO: 7989 - DNA, 864 bp, Oryza sativa
  Clone ID: PAT_MRT4530_14534C.1
atggtggcggatccgccccttcagaaggtgacactcggatccacagtccatggatctgcccttcttgaggatggcccaaatccactaccttcgcatctgtcgccctcgccttcactcctgccgtcgcccaagcgcacccccacctgccgtctatccccaagctcgaggaggctggacaggagtggaagggggagagaggagggtttaaacctcaaaactccaaaagcagagagagatttgtcgacctcgatcgtgaacgacttcggcgatggcacctacacggtggcgttcgacgaggacaaaatctacacgacggtgacggactccggcgaggaggtcgaggagtggctggacgagatcgtccgcatccaccaccgccgcctcgaccacctcatcgtcgggctcgacgtcgagtggaacccagcaagcggcttttgcgctctgggccccgtcgccgtgctccagatctgcgtcggccgccgctgcctcgtcttccagatcatccacgccgactacgtcccggaccagctgggcgacttcctcggcgacggccgcttcaccttcgtcggcgtcgggatccacgacgacgtggacaagctgagggagcattacgacctggaggtggagaacgcggtggacctgcgctacctcgccgcgcagacgatcgggaagccggcgctgcggagcaccgggctgcaggggttggtgtgggaggtgatggacgtgtggatggagaagccgcaccacgtgcgggtgagcgcctgggactcaaggcagctgacgctggaccaggtgatgtacgcgtgcgccgacgccttcgcctcgttcgaggtcggccggagtctgtacgacgactacgagtag

SEQ ID NO: 7990 - DNA, 915 bp, Oryza sativa
  Clone ID: PAT_MRT4530_14535C.1
acggccagcctctcccctcccctcccctctcctctcccctcccctcacctctcctcctttcccggcggtggcggcggagggcggcagcggcggcgggtggtggcggcggagggcggcggtggcgcgctcccggccgcccctctctcccagatctggagtgacgacggcgggccgtggccgtgcggcagtggcacggacaacggcgggccgcggccgtgcggcggtggcggacgatggctgggtggcggccgtgatttcttgaatgtttttatttgctttcttcctagagttccatttcttccataattgccaagagatcaggacgaccagggagtcgaagccgtcacgtagatgctcaggaaagcatgccctagaagatggccaccagctctggagccagctgccatggggaggagagagggcagcccaaccaaaaagcgacagcacacggagccagatctgccgagtgaacacgcagttgagggtcaggatgtgattcgccgtctcaagctcctgagcgcaaaaaggccagaccgagtggctatcgttgccattcttctgaaggagatcggccatccaacagcgttgcacgcccatgaccgcatgccggtgccggccggccgccttgtagcagatctggtcagctgcagcgctgccaatccggtcgtggggcagcgtcgccacaccgtgccaagccgctgctccgcccagcctccgcaagggccgctctcctcctctacgtcgtgccaccacaagctgtgtcgtgcgggccgccctcctccacctggtcgcgccaccgcaggcactagccgcatcacctgcgccgcatctcgtccgcccgacctcgccgcttggccgttggccgccgccgctcgcccaagtcactgccacgtggaccccacatatacaagatag

SEQ ID NO: 7991 - DNA, 3444 bp, Oryza sativa
  Clone ID: PAT_MRT4530_14536C.1
atggagctcacttcggagcaagagcaactcatccaccgcaatgctcaagcttccaatgcaattcttttcgtcttgagtctggaggagttcaacaaggttgatgggcttgaggaggccaaggagatatgggatgctttgcaattggctcatgagggatcacccaccgttcgtgaggccaagattgaattattggaaggaaggcttggaagatttgtgatggatgacaaggagacaccacaagagatatatgataggatgatgatccttgtcaacaagattaaaggacttgggagtgaggacatgacaaatcactttgtggtcaagagacttctccgtgcatttggtccaagaaatcctactcttgtatcaatgatacgggaaaggaaagacttcaagagactcaccccaagtgacattcttggaagaattgtgtctcatgagatgcaagaagaggaagctcgtgaaatgaggcaaatagtgaagaatgccgccatgatcaaaaatcaagaagttgctttgaaggcaaaacaagaagaagagtcaagttgtgaagaaagtgaagataaagagatggcttttatttccggagatgaagaagatctcgaggtcaagcccaagcccaagccaaaagacaaggttgaaggagaaggtggtgttgctaccgtcgccttcaagtcatcctcttcaagcaaggagcgtctcttcaacaacttgagtgatgacgacgatgactcctaccactactcttgtttcatggcccaaggccgcaaggtgatgactcaaaagccctctcacacctctcttgatgttgattctagtgatgaggaaagtgataatgaattagatgatgcatactcctccggtggctcaagttgggttgtggactgtggctgcaccaatcatatgacgggaaagaggagtatgtttacaagtcttgatgaggagggtggaagtcgtgaagatattgtctttggagatgatggtaaaggaaaggtaatgggtctcggaatcaagcacgagttctccgccccctatggtcctccccaaaacggcattgttgagaggaagaaccgaaccctcattgaagccgcaagggcaatgcttgatgagtacaagacttcggatgtcttttgggcggaggccgtgagtaccgcatgtcatgctatcaaccgcttgtacctccacaaaatcctaaagaaaacttcatatgagctcttgagtggtaagaagcctaatgtttcatatttttgtgtctttgggagcaaatattttattttaagtaagaggcctcgctcatcgaagttctcatctaaggtggatgagggattcttacttggctatgaatcaaatgcacatgcctattgtgtcttcaacagaacctccggtattgttgaagtcactagggatgtgacatttgatgaatctaatggctcccaaggagagcaagttgttgtacatgttgtaggtgatgtggatccaagtcaagctataggcactaaggctattggagacatacgaccagtcgaaacgcaggatgaccaagaagatagggatcaacctccgtcatcgacatccaatagccctacaagtgctgtgtctgctgagccggaagttccgggtcctattgaccggaacatccggacatctccaggcccggaagttccgggttctatagtctggaacctccggaccagtggcagtgaagacgtgccaacggcacaagtggatgggatcgatgctgcgggcactttagagcatattgatcaggctcaagtccccccagtgcaccatccaaggatacatcacactgtccaaagagatcatcccgccgacaacatacttggtgacataagaaaaggggtaactactcgctctcatgtcgcaagtttttgtcaacacttctcatttgtctcttctttggaaccaactacggtggaagatgcgcttgtttatccggattgggtgatggccatgcaagaggagttaaataacttcactcgcaaccaagtatggactttggtggagagacccaagcaaaatgtcatcggcaccaagtggatctttcgcaacaagcaagatgaatatggggtggttgtaaggaacaaagcccggttattccaaatggatgtcaagagtgcctttctcaatggacctatctcagagttggtctatgtggagcaaccaccggggttcgaggatctaaagttgccaaaccatgtgtacgagctccacaaggcgctctacgggctcaagcaagcccctagagcttggccggaagttccagtcatcccagtccagaacttccgggggtcgggggccggaagttccggtgttcttggcccggaacttccggtctctgtccagacagccagtaaccttgattcctctactgtttcttttaatcattgcactccaaccttgttgactcttgttgcagtggtcagtatgcctcgtgagaagagacagaagctttcacaagatgttcctgctgacttgagccccccggttcgtggtcctagggggagattgggcaaagaaaaagttggagatttttacagtgagagtcagattccgatctattccaggagggctggtagcattgtcattcatgatgctccccgctctccctctccagctgcatcagagtcagatgatggtggcaatgaggatgagcctggttctgaaagcaatcctttgaggctgtacaagacaagggctgttgatcctgatcctagacggccaagagtgaactatctgaagaatctgctcaagtgtggaaaggacagaatggtgagtcctgatactctgcctgctgactctcaggatgacatattcaagaccttggtgcaggttgattggtataactctgtgattatgggaagatctcatccagtggtagaaatgaagtggctagactggcagtacatgtcctcaaagaacaacatagtcttcaatgaggtacgcaaggtgtgtgagcgcaagcacgtggcagatttgttagccttgcattattcctggaatgaggaagtgattggacagttctactccactgctttctttggcaccaccaagaaggggcttgattttgtgaagtggaccattcaggggcagcaatatagggtctctatggcacagtttgctgtagtttggggcaaggatgtctctgacatttctgatgataaggagtttgttgatccttttgctgcttatgagactgctcgagacattgctagtagtgagggtccctctggcacttctcgtttcttcaatgaggagtcctcccactccgaggagagcagtgatgatcaggagtccgatgcacctactgagaatgtacctacagatccagatgaggcagtggacgccgccgggcaagacatcgactctcctcactccggcgacaccgagattattccctctgatggcgatgatgatgaggcttga

SEQ ID NO: 7992 - DNA, 5802 bp, Oryza sativa
  Clone ID: PAT_MRT4530_14537C.1
atgaagttgcatctaatctctttgcatccaagtatttggaaagttgtttgtacaggtgttgatgtaccccatgatgacatggagctcacttcggagcaagagcaactcatccaccgcaatgctcaagcttccaatgcaattctctccaccttgagtctggaggagttcaataaggttgatggacttgaggaggccaaggagatatgtgatactttgcaattggctcatgagggatcacccgccgttcgtgaggccaagattgaattattggaaggaaggcttggaagatttgtgatggatgacaaggagacaccacaagaaatgtatgataggatgatgatccttgtcaacaagattaaaggacttgggagtgaggacatgacaaatcactttgtggtcaagagacttctccgtgaatttggtccaagaaatcccactcttgtatcaatgatacgggaaaagaaagacttcaagagactcaccctaagtgacattcttggaagaattgtgtctcatgagatgcaagaagaggaagctcgcaaaacaagaagaagagtcaagagattcaagcactttcttcgcaagagtggctatggcaaagggaggaaggatgatgacaagggaaagaagcaatcaaagagagcttgcttcaattgtggcgaatatggccacttcattgccgattttcccaagtcaaatgaagctaaggctaagggaggcaagaagaagccggagcgtgctcatgtggcggaggcacacatgccggaggtgtggtactccggagatgaagaagatcccgaggttaagcccaagcccaagccaaaagacaaggttgatggagaaggtggtgttgctaccgtcaccttcaagtcatcctcttcaagtaaggagcgtctcttcaacaacttaagtgatgacgacgacgactcctaccactactcttgtttcatggcccaaggccgcaaggtgatgactcaaaagccctctcacacctctcttgatgttgattctagtgatgaggaaagtgataatgaattagatgatgtgcttaagagctttagcaaacccgctatgcaacatttggctaagctaatgagagctttggatagtaaagaacaatcactcgaaaggcaagaagaattgcttattcttgaggtgggcctcctagcatccccaatccttctactagcaatggttgtgctagctcttaagaaagagaatgaaaggttgggcacattggtgaaatatggatgcatgaagacataccattcaaaagatgccctttacaagaccatcacggctcatcctaacaaggatggacacgggctcgggttttctagtgaaagtcctgtgtctaagcgtgtgatggtaaatgggaaagaatgcttgatgtttgtgagagaagagagcaaagtggttgcttattttaatgggaattacaatgatgagtaccacacttgtgtgtgggtgccaaaggctttggcatactcctacgatggctcaagttgggttgtggacagtggctgcaccaatcatatgacgggagagaggagtatgtttacaagtcttgatgagaagggtggaagtcgtgaaaatattgtctttggagatgatggtaaagaaaagctacaatttattatccgtgtctcaattgtgcgagatgactcttccatagcattcaagggtgtgttaaagggtgatctctatctcgttgatttcgacgtagatagagtgaatccggaggcatgcttgattgctaaatcctctatgggttggctatggcaccgtaggctagcccatgttggaatgaggaatttggcatctcttctaaaaggggaacacattcttggtctatctaatgtttcttttgagatggatcgtgtgtgtagtgcttgccaagccgggaagcaagttgggagtccgcatcctatcaaaaacatcatgactacaacaagaccactcgagcttcttcatatggacttatttgggcccgtggcctacataagcattggaggtaacaagtatggttttgtcattgttgatgatttttcatgcttcacttgggtgtactttctccatgacaaaagcgaagctcaagatgtcttcaagcgcttcacaaagcaagcccaaaatctctatgatctcactatcaagagggtgcgaagcgacaatggaggagaatttaagaacactcaagtggaggaatttcttgatgaagaaggaatcaagcacgagttctccgccccttatgatcctccccaaaatggcattgttgagaggaagaatcgaacactcattgaagccgcaagggcaatgcttgatgagtacaagacttcggatgtcttttgggcagaggccgtgagtaccgcatgtcatgccatcaaccgcttgtacctccacaagatcctaaagaaaacttcatacgagctcttgagtggtaagaagcctaatgtttcatatttccgtgtctttgggagcaaattctttattttgagtaagatgcctcgctcatctaagttctcacctaaggtggatgagggattcttacttggctatgaatcaaatgcacatgcctatcgtgtcttcaacaaaacctccggagagcaagttgttatacatgttgtacgtgatgtggatccaagtcaagctataggtactaaggctattggagacatacgaccagtcgagacacaggatgaccaagaagatagggatcaacctccgtcatcgacatccaatagccctacaagtgttgtgtctgctgagccggaagttccgggtcctattgaccggaacctccggacatctccaggcccggaagttccgggttctacagtccggaaccttcggaccagtggcagtgaagacgtgccaacggcgcaagtggatgggatcgatgctgcgggcactttagggcataccgatcaggctcaggtccccctagtgcaccatccaaggatacatcacactgtccaaagagatcatcccgtcgacaacatacttggtgacataagaaaaggggtaactactcgctctcgtgtcgcaagtttttgtcaacactactcttttgtctcttctttggaaccaaccagggtggaagatgcgcttggtgattcggattgggtgatggctatgcaagaggagttgaataatttcgctcgcaaccaagtatggaatttggtggagagacccaagcaaaatgtcatcggcaccaagtggatctttcgcaacaagcaagatgaacatgtggtggttgtgaggaacaaagcccggttagttacgcaagggttcacccaagtcgagggtctcgattttggtgaaaccttcgcacccgtcgctcgccttgagtcaattagaattcttttagcctatgccgctcaccatgatttcaggttgttccaaatggatgtcaagagtgcctttctcaatggacctatctcggagttggtctatgtggagcaaccaccagggtttgaggatccaaagttgccaaaccatgtgtacaagctccacaaggcgctctatgggctcaaacaagcccctagagcttggtatgaatgtctccgagattttcttttgaaaaatggttttgaaattggaaatgcggatactactctcttcactaaaaaatttaagagtgatttattcatatgccaaatttatgtcgatgacataatatttggttctactaatgcctctttttgtgaagaatttagtagtatcatgactaaaaggttcgagatgtctatgatgggcgagttgaccttctttctctggctacaagtaaagcaagctcaagagggcaccttcatctctcaaaccaagtacgtgaaagacatactcaagaagtttgggatggaggatgccaaacctatcaagacgcccatgcctactaatggccacctagacctcgacgataatggtaaatgtgtggaccaaaaggtatatcgctccatgataggatctttgctttacttatgtgcatctcgtcccgacatcatgcttagtgtttgtatgtgtgcccgttttcaagcggagcctaaagagtgccatttgattgccgttaagagaattcaaagatatttagttcatactcctaatcttggcttgtggtatcctaagggttgtgactttgaacttttgggctattccgattcggattatgccgggtgtaaggttgatagaaaaagcataaccgggacttgccaatttcttgggccgtcccttgtttcttggttccccaagaagcaaaactccattgtattatccaccaccgaggccgaatatgtcgccgccgggtcttgttgtgcccaactcctttggatgaaacaaactctaaaagactttggctacaacttcaccaagaccccactcctatgtgacaatgagagtgccatcaaaatagccaacaatcccgtccaacactcaaaaaccaagcacatagatattcaccaccactttttgagagatcatgagactaaaggagacatatgccttacccatttttgcagggcggaagttccagtctctgtccagccagccagcaaccttgattcctctactgtttcttttaaccattgcactccaaccttgctaattcttgttgcagtggtcagtatgcctcgtgagaagagacagaagctttcacaggatgttcctgctgactcgagtcccccagttcatggtcctagggggagattgggcaaagaaaaagttggagatttttttagtgggagtcatattccgatccattccaagagggctggtagcattgtcattcgtgatgctccccgctctccctctccagttgcatctgagtctgatgatggtggcaatgaggatgagcctggttctgatagcaatcctttgaggctttacaagacaagggctgttgatcctgatcctagacgcccaagagtgaactatttgaagaatctgctcaagtgtggaaaggacagaatggatgacagattcaggaccttggtgcaggttgattggtataattctgtgatcatgggaagatcttatccagtgtattcctggaatgaggaagtgattggacagttctactccactgctttctttggcaccaccaagaaggggcttgattttgtgaagtggaccattcaggggcagcagtatagggtctctatggcacagtttgctgcagctttggggttagatgatgatgacctgagtcgtccacatatctttgtagaggatgctctgtcatcgaccagcactactttcttgtatgagaaggatgctcccaaggattgtttggggactactcgtgggttgcgtccatactatagaatgttgtattataaagtaaaatcctactatgggatttctcgaaacctcttgataaagttcaaagatgatcaaattgatgaaacatctattcttgcgcaagtactaagctccgaatctgccattagctcactgcttgacatgtcaattcggtcacttcctggagatcatggactaccgttacagcaggtacttcctgatgttccaccagcaatggccgatgcagtaaacagaggaggtgaactcctgacaaatctagcaacagggacaccatgggaggctgttgctaaggaggtaggcactgggggtgcacagtactgcacagtcctgtccgcaaatctacagttcagttttacaagaaatgttcatttggtagcaacggaagatgggtatttcataagactgctgcaacaacaacagcaacaacagttgattttatcacatatgggctcgacttaccctgatataaagtattgcatgtgtgtatga

SEQ ID NO: 7993 - DNA, 1875 bp, Oryza sativa
  Clone ID: PAT_MRT4530_14538C.1
atgaaatcgccattgcggaagttcaggggattcggtctccacagccacagggagaggaaggaccaccgcccgccgccggccaagctcgacgagctcgccgacgccgcccaggaaatggaggaaatgaggaattgttatgacagcttgctttcagctgcagctgcaacaatgaacagtgtatatgagtttgcagaagctatggaggaaatgggaacttgcttacttgagaaaactgcattgaattatgatgatgatgacagtggcagagttctgatgatgctaggaaaggcccaattcgaactgcagaagtttgttgataactatcgtacaaatatcataaataccatcacaaacccatcagagtcacttctcaaagagctacaagttgtagaggaaatgaaggaactctgtgatcataaaagacaggaatatgaagccatgcgagcagcctatagagagaaaggacggtcaaggcattccaaaaccgaaacattatcctcggaacagctgcaagcttattttcttgactatcaagaggatgcagcattgtttatattccgattgaaatcattgaagcaaggtcaattccgtagtattttaacacaggctgctcgccaccattctgctcagttgagttttttcaggcgagggttgaagtatctagaggctctggaacctcatgtaaaagcagttgctgagaaacagcacattgaataccctttaaatggactagatgacgacacagataatgatgagtacagctcttaccagggcaatcaaagtgatgacagtgagttaagttttgactatgagataaatgacagggataaggacttccccgcttccagaagttcaatggatttggatcagtctaatcaggcatgttccccagaacctctgaaggaacacaagcaggaatataccgaacaaatacaggcagattttgcagctcctcgagtgaagcttgagattggtacccaatcagcgccaatttctgctgacaatgtgtttgatccatctacaaggtttcggaaaatgaatacgtcaaacagaacaaattattcgtacaaactcccgacaccagatgatgacaagaactccacttcagcacacaccaatagatctcctcattcagatcaaccagaaagtaaatctcacgtagcagaaaatttatggcattcctctccactggtcaaaggttttaaaccaaactccatgtttagtggacctgttaagatgccatcaagtactgaagggatatcagcgccacttgtttatccctacgctacttcagattttaagaaaatgaagagggaagcattttccggtccaattccaagcaaagcaggattgaacaagcccttgttttctgctactgatctcagagcaccaatgaactatcctcgtgcaatgtcaacaaaatcatatggcccaggctggcagtcatccgtggctccaaaatttacccctaggatcacttcactcccaactacatcaccgagaataagtgagctacatgaactgcctaggcctccagcaaatgtaggtgctgcccgtcctggtttggttggatattctggccctctggtatcaaggcggcaggtgcctaatgtaccgacccgcgcctcaccaccatcacaaacagcatcacctcttccacggccacctgctgccatgacccgcagttattctataccttcaaatagccaaagaacacccattcttaccgtgaataagttgttggaagctaggcatagcagagagagtagtgaagtttcctctcccccattaacacctatatctttggctgatgtttcccgcagatcaacagcagaaacagctcttgaaaaaacaaggatgatggaaaccttgtga

SEQ ID NO: 7994 - DNA, 705 bp, Oryza sativa
  Clone ID: PAT_MRT4530_14539C.1
atgaagacataccattcaaaagatgccctttacaagaccatcaccgctcatcctaacaaggatggacacgggctcaggttttctggtggaagtcctgtgtctaagcgtgtgatgataaatgggaaagaatgcttgatgtttgtaagagaaggaaaagctccacaagcaagtgaggtgacttgtcccctcactggtcagacacccggaagttccgggcaaaatgaccggaagttcctgccctgtaagacaggaagttccggacattttgtcaggaagtttcgggcttctgataggccgaaggggctggccggaagttccggttataatgccaggaagttctggccagagggtctttactatgattcatatgcatactcctccgatggctcaagttgggttgtggacagtggctgcaccaatcatatgacgggagagaggagtatgtttacaagtcttgatgaggagggtggaagtcgtgaaaatattgtctttggagatgatggtaaaggaaaggtaatgggtctcgctcaagatgtcttcaagcgcttcgcaaagcaagcccaaaacctctatgatctcactatcaagagggtgcgaagcaacaatggaggagaattcaagaacactcaagtggaagaatttattgatgaagaaggaatcaagcacgagttctccgccccctatgatcctccccaaaacggcatt

SEQ ID NO: 7995 - DNA, 204 bp, Oryza sativa
  Clone ID: PAT_MRT4530_1453C.1
agattgaaaccgatgcagctcaacccgaaagcaagaactcgtcgaaacaaaactaaagcaaaaaggtggcgatgcgccgaaattgtattgaacgccgatctagacttcagccgattcttgctctgttctcggatcaatctccgccttcgactccacctcgatctaatctgcttttccgatgttgatattaccaaatttggtcgt

SEQ ID NO: 7996 - DNA, 511 bp, Oryza sativa
  Clone ID: PAT_MRT4530_14540C.1
tcgtttgttccccatggatgatcagcacagaggagtgatcatgaggaggaggttacaggagaccgtaggggccaggagcaggaggagaagcagcgcttcatgaagacggctatgaagacagtgactgcggagaggctcggcggctcgatgctggtgctgatcgacctgagcctggacggcgctgacatcgtactaacggtggccacccgcgtgctggtcatcttcagacgcatgctggtgccgcggggcattgcgctgccgctcatgatggacgtatttatcacatggggcgcgttcgcggtggacgcgctcttacgactcttgtggatgtacaagtacctgactgggaagcacctggcgggcgccgaccaggtgcaccacgccaaggctaggctcgcgtacatggcccgcgacatcaaggaggctgcgcagcaccgtatcgaccaggcgcaggcgtcttaggagggcctgccgcggcgaggcgccgcttctgatagatagctcgatcggg

SEQ ID NO: 7997 - DNA, 321 bp, Oryza sativa
  Clone ID: PAT_MRT4530_14541C.1
atgtcagacttagggggaaagaacggggaaaatggaaatgaagatgaagcaagcagcaagggaactccaccacccaagggagctactataccttttgattacagcaaacttactattccctctcacaacttcgtctccatgccttctaggcgtgctcctcaatttgatgggacatattatgccgcttggaagcacaagatgaagtattgtataccccatgatgacatggagctcacttcggagcaagaacaactcatctaccgcaatgctcaagcttccaatgcaattctctccgccttgaatccggaggagttcaacaag

SEQ ID NO: 7998 - DNA, 431 bp, Oryza sativa
  Clone ID: PAT_MRT4530_14542C.1
cgaaactcagctgcaaggagatggagaaggtaggctccagccatggcttcggggctgggctcctccataaacgcgccgtattgtcttggcccccgtacctactcttctccttcgtccatgtcatctcctctcttttctttgggtgtccattagtacgtctctacgtattttgctttaccacatctgtctaatctccaacttcattattgggtccatcactactcttctttctgtcctcgtccagtccttcttattttctcctcttccctctttttgttctcccttctttcttcttatctttttttgtctccttttccttctccattcttcttttatcttcccttcctctcatttcttctccttattcttcttttcctcttccttccttttctttctttttattcatttctttccttccttccctccttctc

SEQ ID NO: 7999 - DNA, 2550 bp, Oryza sativa
  Clone ID: PAT_MRT4530_14543C.1
atggacggccgagatcgatcgggtccacggcggctcacggcggacgaccccgatggcgtcagcgatgacgtcaccccggcggcggcggctcggcggcggtcttcccgagcgacggcggcgtctggaacggcggcgaagcacagctggagcggcggcggcgacagcgaagctagggcttgcggcgctagagcgattccgacgacgagaggcgaaggcgagggtggcggcgggccggaagttccgggcctccttgtccggaacctcggggtatcggggataagtactatgactcgtgagaaaagacagaaagcctctcaggatgtgtccggtgatgagagtcctcctattcggtatcctcgtggtcgtttgggtaaagagaaagtggttgagggcggcagtggcagtggcactcgtacttctcccagatttacaaggcaatccagcaaccgtcctgttcagattagggatgttgatagtggtcaaggaagtgatgcccctaatacaagaggtcacgggagaggtggtggtcgcagttctggggctggaagggcatctcatgatttccctgtaggatctcgtgagaatcccgttcggctctacaagactcttggttttgacaccactcctatgcaccacattggaagacccaagtccaactaccttcatcaacttgccaacgccgccaccgcgccaaccaagccgccgccgccgccggccgacgtccagccgcgccgcgccgtcgttttagccgtcgccgccacctcctctcaccgccgtcgggtgcgcatggaagaggggaagctcggccgccccttagccatcgccgccggccgccgtagcgccgtcgccgccgctgtccgagccgagccgccgtcgagcctcgccgccggtcgccgttcgacgtcgtccgtcgtgttcgttggtaccgtggttgagatgaagtgtattgattgggcttacatgaggaagaaaaacaatgaagtgttcaaccaagtgatgcaaccccctcccgcgatctcccgtggcctcaccacccctccctgccgtcgcccttctctttcccccacgccgggcgcctccagccgcctctccctcctcgaccgtgcgccggccggccgtgccgtcgccttccccggcgtcgcagccgcctcctctcccccggcctgccctccgtttcgcgcggtgaccgccggaggcgcgttcccgccgtcgtccagtggcgttgccgccactgtaccacctccagccgcccctgccgcgccgctcagcggcaaggtcgtcctcggcatcgctttccctccatccaaacccctccgcggtccatcatcgtcgcctccgttcgttctcgtcgtcgacgtcccgtcggtcgcccggctcgtcgtctcgtggcgccacctccgtcgtcggcatcgctgcggcgtgttccacgccgtcctcgcatctgtgcagctgctgccggctgccctcgtcgcctcctcgccggccccgcatccccgtcgtcgtcttcgtcctcggctccgcgtcgtcaagccttgtgccggccgcgtctcgccttcgtccaaggatcaccgccgaatcgttccctcgccgttcgcctccatcgtccccgagctgtctccgccgcgcccgttcgtcgttgtcgttcccatgcctcgtcgcgtggtggtaaggatccctctccctcgctgccccgtcctcgtcctttcggtgccgcccatgcccgttgtgcggttgtcggccccgtctggttataaacaaaagtacacggatggagatggacgaagtcgggggttgatggacatctctaggacaaatgaaggctacacgggctgcggcccggcaattttctcggtcgcgacacacaacaagaatcttggagatattcttgccttggagtatgattggaatgaggaggtcattgcacagttctatgcaacagcattctttggtactacaaggaagggaaccccatatgtgaagtggttgactgagggtgttaggcacaagatttccatggcacagtttgctgagatgctggggttagatgaagaggatctcaataggcccaacattcatagtgaagcacccctccccatgatcaagaccatgttcatgtatgcaaaggatgctcctaggacttgcatgggatctactcatggtttgcatcccaactataaggcaatcttctgtatgtgtgctaagactgccaagaaagtgaagaagatagaaaggcgtcagaaggaagatagaagagaggctagcaaagaagtgtcagatgattctgaggatgaggtctatgttgatccattggaggcttatgaggcagcccgcaacgttgctggtgaaggtccttccacctacttcaatgaagaatcttctcattctgatgatgatgataatgatgatgatggtgatgagggtgacaccgaggcagctgctgaggatgctcccactgatgttgatgagggtgataccgctgctcagtccgatgagtctcatctttccggcgataccgagattgttccctctgatggagatgaagatgagtga

SEQ ID NO: 8000 - DNA, 2922 bp, Oryza sativa
  Clone ID: PAT_MRT4530_14544C.1
gtggatgagggattcttacttggctatgagtcaaatacatatgcctaccgtgtcttcaacaaaacctccggtattgttgaagttacaagggatgtgacatttgatgaatctaatgactcccaaggagagcaagttgttgtacatattgtagatgatgcggatcctagcaaagcaattggtactaaggctattggagacatacgaccagtcgagatgcaggatgaccaagaagatagggatcaacctccgtcatcgacatccaatagccctacaacaagacaagtgtcagttgacccagaagttccgggaccaaatgaccggaacctccggaccactccaggccaggaagttccgggtccatctgccaggatgttccgggcaaaggacagtcaaggagtgcctacggcacaagtggatgggattgatgccaagggcactgtaaagcatcctaatcaggctcaagtctcctcggtgcaccatccaaagatacatcacactgtccaaagatatcatcccgtcgacaacatacttggtgacataagaaaggggagacccgaccaaaatgtcatcggcatcaagtggatcttccgcaataagcaagatgaacatggaatggtagtaaggaacaaagcccggttatataaaatggatgttaagagcgcctttctcaatggacccatctcggagttagtcttcgtggagcaaccacccggattcgaggatcccaaatttccacaccatgtgtacaagctccacaaagcgctctacggactcaaacaagccccgagagcttggtatgaatgtctccgagattttcttttgaaaaatggttttgaaattggaaaggcggacactactctcttcactaaaaagtttaaaaaggatttattcatttgccaaatttatgtcgatgatataatatttggttctactaatgcctctttttgtaaagaatttagtggtattatgactaagaggttcgagatgtctatgatgggcgagataacgttcttcctcaggctacaagtcaagcaagcacaagatagtaccttcatctctcaaaccaagtacgtgaaggacattctcaagaagtttgggatggaggatgccaaacccatcaagactcccatgcctaccaatggtcaccttgatcttgatgaaaatggtaaatgtgtggatcaaaacgtataccgctccatgataggatccttgctttacttatgtgcatctcatcccgatatcatgcttagtgtttgcatgcgtgctcgctttcaagcggagcctaaagagtgtcatttggttgtcgtcaagaggattctaagatatttagttcacactcctaacctaggcttgtggtatccaaaggggtgtgggtttgagctcttgggctattccgattcagattacgccgggtgtaaggttgatagaaaaagcaccaccgggacttgtcaatttcttggacggtcctttgtgtcttggtcatccaaaaagcaaaattccatagccctatccaccgccgaagccgagtacattgccgtcgtaaacattatgtctcgtgagaaaagacagaaagcctctcaggatgtgtccggtgatgagagtcctcctattcggttccctcgaggtcgtttgggtaaagagaaagtggttgagggaggcagtggcagtggtcctcgtacttctcccagtgcaagaggtcgtgggagaggtagtggtcgcagttctggggctggaagggcatctcacaatttccctgtaggatctcgtgagaatcccattcggctctacaagtctcttggatttgacaccactcccatgcaccacattggtagagccaagtccaactatcttcatcagcttgccaagtgtagaagagaccatttgattgatccagagacacagcctgaggagtcacaggatcctcgcttcaggaccttcactcagttggattggtataactcagtgattatggctagagaaaatccagtggttgagatgaagtggattgattgggcctacatgaggaagaagagcctagttctatgcgacagcattctttggcacaagatttccatggcacagcttgctgagatgttgggtttggaggatgaggatctcaataggcccaatattcatagtgaagcacccctccccatgatcaaggtgttgtactccatctttcgttggtccttgcttccaaaggttggagatgccactgctttgccaaccaagcatgctcatcttctcagccacatgcgctacaatcagcctcccttcagtgtgatgaagtttatttggtatgagattgctaacaccatccttgagcctaagcagggttgcatctatgctccttacattatgaagatgatcgagactgttatcgaggtgttctacatcaaagatgggcgccacaatccttttcgccctcgtgctccatcttcctcttctccagtggtgcctagatccattccttctacctcagctggtccttcttctagtgccccacagagttcctctagttcttctcccatcaagaaggctcttcacgcaattttttgcatgtatgctaagactgccaagaaagtgaagaagatagaaaggcgtcagaaggaagatagaagagaggctgggaaagaagtgtcagatgattctacagatgaggtctatgttgatccatttgaggcctatgaggcggcccgcaacattgctggtgaaggtccatccacctacttccatgaagaatcttcccattcagatgatgatgatgatgatgatgatgatgatgatgagggtatcaccgaggcagctgctaaggatgctcccacttatgttgataagggcgactccgctgcacagtccgatacgtctcatctctccggtgataccgagattgttccctctgatggagatggagatgagtga

SEQ ID NO: 8001 - DNA, 425 bp, Oryza sativa
  Clone ID: PAT_MRT4530_14545C.1
ttgacggttgttagtgatcagtttcgaccatcaatattaccaaaatagaggaaaactagttatgcttgcaattcatatacatgttagaataataatattccactagtatttggttcactaatcatttgcagagaacaagtataaagtgaaggggaattgacatcaaatcagacaataaatcaatcggacgatatcgagaatgggccaagaactcaggattgacacaatgaattgggccaaaattcacaagtctgtacaaaggagcaacagaggaggccacctgctgagtttgggctaggtgggcccaacccatggttcggccgaacctcccgtggcgccgatggatgcagggttttgatggacggctgggattgatccccaatgatggctggagggtattaccgaccattccaactgtcacaacc

SEQ ID NO: 8002 - DNA, 360 bp, Oryza sativa
  Clone ID: PAT_MRT4530_14546C.1
tagtggatccccgggctgcaggatcggcacgaggctctcgttagttgtaaaaccttcagtatcgaagttgatgcgtgcttattggtgggcaatagtcatgtttttgtccatattcatttccttggcatgatcttgtttattttcttgactacatcagctgtggtaggaatttataggtttcctggtatagcgttctctcctattgttattatgttttatgcctctttgatagggctagttaggaccagattgttatgtttttgctttgtaaggagtaatgaatactgtggagataaaagtttacggttcatatttctgtactgaataaacatacttgcagtagtttctataaggttgctg

SEQ ID NO: 8003 - DNA, 4277 bp, Oryza sativa
  unsure (1)..(4277): unsure at all n locations
  Clone ID: PAT_MRT4530_14547C.1
ctagccttagggatgtcaatgaaactcttaaagagaaatttgctagtttagacaaaagtcataaagatcttgaagttcaatttgacactctttggaatagcacttctcaaccaaatgtggtttctaattcttctaatccatctactagcaatggttgtgctaggtgttacaatattgatttgaactcttatgctactaatgttgatgctatgcaagctcttaagaaagagaatgaaagacataccattcaaaagaccatcaccgctcatcctaacaaggatggacacgggctcggattttctggtggaagtcctgtgtctaagcgtgtgatggcatactcctctggtggctcaagttgggttgtggacagtggctacaccaatcatatgatgggagagaggagtatgtttacaagtcttgatgaggagggtggaagtcgtgaaaatattgtctttggagatgatggtaaaggaaaggtaatgggtctcgatagagtgaatccggaggcatgcttgattgctaaatcctctatgggttggctatggcaccgtaggctagcccatgttggaatgaggaatttggcatctcttctaaatggggaacacattcttggtctatttaatgtttcttttgagaaagatcgtgtgtgtagtgcttgccaagtcgggaagcaagttgggagtccacatcctataaaaaacatcatgactacaacaagaccactcgagcttcttcatataggtttatttgggcccgtggcctacataagcattggaggtaacaagtatggtttcgtcattgttgatgatttttcacgcttcacttgggtatactttctccatgacaaaagcaaagctcaagatgttttcaagcgcttcacaaagcaagcccaaaacctctatgatctcactatcaagagggtgcgaagcgacaatggaggagaattcaagcacactcaagtggaggaatttcttgatgaagaaggaatcaagcacgagttctccgccccctatgatcctccccaaaacggcattgttgagaggaagaaccgaaccctcattgacgccgcaagggcaatgcttgatgagtacaagacttcggatgtctttcgggagaaagccgtgagtaccgcatgtcatgccatcaaccgcttgtacctccacaagatcctaaagaaaacctcatatgagctcttgagtggtcccccagtgcaccatccaaggatacatcacactgtcgaaagagatcatcccgtcgacaacatacttggtgacataagaaaaggggtaactactcattctcgtgtcgcaagtttttgtcaacacttctcgtttgtctcttctttggaaccaaccagggtggaagatgcgcttggtgatccggattgggtgatggctatgcaagaggagttgaataacttcacccgcaatcaagtatggactttggtggagagacccaagcaaaatgtcatcggcaccaagtggatcttttgcaacaagcaagatgaacatagggtggttgtaaggaacaaagcccggttagttgcgcaagggttcacccaagtcgagggtctcgattttggtgaaacctttgcacctgtcgctcgcattgagtcaattagaattcttttagcctatgctgctcaccatgatttcaggttattccacatggatgtcaagagtgcctttctcaatggaccaatctcggagttagtctatgtggagcaaccaccggggttcgaggatccaaagttgccaaaccatgtgtacaagctccacaaggcgctctacgggctcaaacaagcccctagagattggtatgaatgtctccgagattttcttttgaaaaatggttttgaaattggaaaggcggatactactctcttcactaaaaaatttatgagtgatttattcatatgccaaatttatgtcgatgacataatatttggttctactaatgcctctttttgtgaagaatttagtagtatcatgactaaaaggttcgagatgtctatgatgggcgagttgaccttcttcctcgggctacaagtgaagcaagcactagagggcaccttcatctctcaaaccaagtacgtgaaagacatactcaagaagtttgggatggaggatgccaaacctatcaagacgtccatgcctactaatggacacctagacctcgacgataatggtaaatgtgtggaccaaaaggtatatcgctccatgataggatctttgctttacttatgtgcatctcgtcccgacatcatgcttagtgtttgcatgtgtgcccgttttcaagcggagcctaaagagtgccatttgattgccgtcaagagaattctaagatatttagttcacactcctaatcttggcttgtggtatcctaagggttgtgactttgagcttttgggctatttcgattcggattatgctgggtgtaaggttgatagaaaaagcacaaccgggacttgtcaattccttgggcggtcccttgtatcttggtcctctaagaagcaaaattccattgccttatccaccgccgaagccaaatatgttgccgccggttcttgttgtgcccaactcctttggatgagacaaaccctaaaagactttggctacaacttcaccaagatcccactcctatgtgataatgagagtgccatcaaaatagccaacaatcctgtccaacactcaagaaccaagcacatagacatttgccaccacttcttgaaagatcatgagactaaaggagacatatgccttacccatgccagaagttccggtcaccccagtctggaacttccgggggtcgggggtataaatacccagggggagccgagcctggtcacttcttctcctccccgattcccaaaccctagccaccgctacagtgctcctatcggtgattttctcttccaaccatggaaatttgattcctctccgtggaatcaaccacattggtggctaggaggttcatcccgtgatcgatttgcgatttcccctctcaaggccagaagttccgatgttgttggcccggaacttccggtctctgtccagacagccagtaaccttgattctgctactgtttcttttaaccattgcactccaaccttgttgattcttgttgcagtggtcattatgcctcctgcatctgagtcagatgatggtggcaatgaggatgagcctggttctgaaagcaatcctttgaggctgtacaagacaagggctgttgatcctgatcctaaacgcccaagagtgaactatttgaagaatctactcaagtgtggaaatgacagaatggttagtcctgatactctgccagctgactttcaggatgacagattcaggacctttgtgcaggttgattggtataactctgtgatcatgggaagatctcatccagtggtagagatgaagtggctagactggcagtacatgtcctcaaagaacaacatagtcttcaatgaggtacgcaaggtgtgtgagcgcaagcacatggcagatttgttggccttgcagtattcatggaatgagtggtctttgctccctaaagtgggagatgctacagctcttccaggtaggcatgcgctcctcctcagtcgcatgcgctacaacaagcccgatttcagcatcatgaagcttatctggagtgagatctatgagacagtgtgtgagccaaagaggggctgcatctatgctccttatatcatgaagatgattgaggccaagactgggatttgttatttcaaggacaatcaacgcaagcctttccgtgctcatgctcccactactttagctactcctaccaccagagtgactcgtgcttccacctcagctgctccttcttcctcagctgcacctcaacgttctgagtcttcttctcccataaagaaggctctcagggctatcttttgcatgtgtgccaagacagctaagaaggtaaagaagatagtgaggcatcaaaagnaagattggattgcagcaggcaaggatgtctctgacatttctgatgatgaggagtttgttgatccttttgctgcttatgagactgcccgagacattgctagtggtgagagtccctctggcacttctcatttcttcaatgaggagtcctctcactccgaggagagcagtgacgatgaggagtcagatgcccctattgagaatgttcctacagatcccgatgaggcagtggatgccgccgggcaagacatcgactctcctcactcgggcgacactgagatcattccttctgatggcgataatgatgaggcttga

SEQ ID NO: 8004 - DNA, 427 bp, Oryza sativa
  Clone ID: PAT_MRT4530_14548C.1
atggttataaggaatagggttcaatattacacctttgacatacttaaattcccttcgcttgttctttgctgcaggggaaagaacctgtggggggatatgcactttaaggccttgagactgggatatttcaacaaaacaaccctggcggcagtttgtaaaaacccacttcagggtgttttaaaaaagtgggtgaactactgaccctaacattgaactgaagctgaccacatatacccagacatcttcaacggaaggggggaaaacaaatactccctccaggaattcaactgcaacatgcccccctcgtgacaactcgaacataaatttcttgcggtcaaccacctggcaggaaaccatctgcattaaaggggccaaagaaccctggggaaaccaggcataagccatgaacctcatgcgagagctcagg

SEQ ID NO: 8005 - DNA, 3742 bp, Oryza sativa
  Clone ID: PAT_MRT4530_14549C.1
tcactcatctccatctccatctgagggaacaatctcggtatcgccggagagatgagactcatcggactgtgcagcggtgtcgccctcatcaacatcagtaggagcatcctcagcagctgcctcggtgtcatcctcatcatcatcatcatcatctgattgagaagactcttcattgaagtaggtggatggaccttcaccggcaacgttgcgggctgcctcataagcctcaaatggatcaacatagacctcatcttcagaatcatctgacacttctttcccaacctctcttctatcttccttctgatgcctttcaatcttcttcactttcatagcagttttagcacacatacagaagattgcctgaagtgccttcttgatgggagaagaactcgaggatctcggtggggcactagaagaaggaccagctgaggtagaaggaatggatgtatgtaccactggagaagaggaaggtggaacacgaggacgaaaaggattgtggcgcccatctttgatgtagaacaccccagtgactgtctcaatcatcttcataatgaaaggagcatagatgcaaccccgcttaggctcaagaatggtgttggcaatctcataccaaatcaatttcatcacactgaagggaggctgattgtagcgcatgcgactgagaagatgagcaagcttggatggcaaagcagtagcatctccaacctttggaagcaaagaccaacgaaagatggagtacaacaccttgtagttgggatgcaatccatgagtagatcccatgcaagtcctaggagcatcctttgtatacatgaacttagtcttgatcatggggaggggtgcttcactatgaatattaggcctattgagatcctcatcctctaagcccaatatctcagcaaactgtaccatggaaatcttgtgcctaacaccctcagtcaaccacttcacataaggagttgccttcctagtagtaccaaagaatactgtcgcatagaactgtgcaatgacctcctcattccaatcatactccaaggcaagaatatctccaagattcttgttgtggcacacttgcatcacttgattgaacacttcattgttcttcttcctcatgtaagcccaatcaatccacttcatctcaaccactggattttctctggccataatcactgagttataccaatccaattgagtgaaagtcctgaaacgaggatcctgtgactcctcaggctgtgtctctggatcaatcaaacggtcccttctgcacttggcaagctgatgaaggtagttggtggcaagctgatgaaggtagttggacttgggtcttccaatgtggtgcataggagtggtgtcaaatccaagagtcttgtagagccgaacgggattctcacgagatccaacagggaaatcatgagaggccctttcagccccagaactgcgaccaccacctctcccacgacctcttgtattaggagcatcacttgcttgaccactgtcaacatcccgaatctgaactgaacggttgctggattgcctggtaaacctaggagaagtacgagtgccgctgccactgccgccctcaaccactttctctttacccaaacgaccacgaggaaaccgaataggaggactctcatcaccggacacatcctgagaggctttctgtcttttctcacgaggcatagagcttatcctaagctcgcaaaatcttttctcatctaacggcttggtgaaaatgtcggctaattggctctcggttctcacatgtgtaaggcatatgtctccgttggtctcatgatctctcaaaaagtggtggcgaatatctatgtgtttggttcgagagtgttgaacgggattattggctattttgatggcactctcattgtcacataggagtgggatcttggtgaagttgtagccaaagtcttttagagtttgtttcatccaaaggagttgggcacaacaagaaccggcggcgacatattcggctttggcggtggataatgcaatggaattttgcttcttggaggaccaagaaacaagggaccgcccaagaaattggcaagtcccggttgtgctttttctatcaaccttacaccaggcataatccgaatcggaatagcccaaaagctcaaagtcacaacccttaggataccacaagccaagattaggagtatgaactaaatatcttagaattctcttgacagcaatcaaatggcactctttaggctccgcttgaaagcgagcacacatgcaaacactaagcatgatatcgggacgagatgcacataagtaaagcaaggatcctatcatggagcgatataccttttggtccacacatttaccattttcatcaagattaaggtgaccattggtaagcatgggagttttgatgggtttggcatctttcatcccaaacttcttgagaatgtccttcacgtacttggtttgagagatgaaagtaccttcttgtgcttgcttgaattgtagtccgaggaagaaggttagctcacccatcatagacatctcgaaccttttagtcatgatactactaaattctttacaaaaagtggcattagtagaaccaaaaattatgtcatcgacataaatttggcaaatgaataaatcattttcaaactttttagtgaagagagtagtgtctgcatggtttggcatctttggatcctcgaaccccggtggttgctccacatagaccaattccgagatgggtccattgagaaaggcactcttgacatccatttgatataaccgggctttgttccttacaaccactccatgttcatcttgcttgttgcggaagatccacttggtgccgatgacattttggtcgggtctctccactgtcacgcccagaaattcactaataatttccgaacttatttgtgcataaaatcctcgtccaggaatcagccgaggtacacaaactgacaatctcgccggcgctaggaaagtcgacggcggaaacggaggccatctacgcgtagaggacaacgaggcgaacccgttggtactcaccacgtagtcaaaggatgcacgacggcggccggcgacgagagaaggcggcgcggcggttcgggtccacggcgtcgagggggctccggtggtcggcggcggaaaagaaggggcggccgagcttcctcacacgacggcgctcctcttggcggcaacggcgagcggcggcgacgacggaggcggcggcgcgacgcgaccgaagatggccggcggcggcggcaaacctaatgcacgcggcggcggctctaggaggcacgggagagctcgagaaagggggcaaacggaagaggagatcaaggagaagctttatatgaactcggatcgaagagatcaagccgcaaacgagaggaatcgaatcgggaagaaatcgaactcggtttttttagggataaaacaaaacgagttcgattcggatccaaacctccacgattcgttttgattcttgggggaaaagaaataggagatcgagaggaacaaaacccctcaaccaatcgaaggaatcgagctcggatttgggcgaaatcggcgcgggaaacggcgctagggttcgggctcttgcgcggcggcggccggaggaggaagacggccctgacatgtgggccccacatgtcagcggctgggagagaggggcgggcggcggcttgggccggcgtgggccgcgcgcggggagagagaggaaagagagagttgggccgaaatcggcccaacggcc

SEQ ID NO: 8006 - DNA, 2109 bp, Oryza sativa
  Clone ID: PAT_MRT4530_1454C.1
ccccggccccgggccggattccggccgggagatcctctctctcgaatcgtctttgggcggccaacgcatcttcctcttcctcttcctcttcctccatctcatctcaccatcccatccacgcttctcgactcccagacgacgcttgctgctgcctttcgtcaaccccccacttctccttccccgccgccgctcgccgccatggatgaggagtacgacgtgatcgtgctggggacgggcctcaaggagtgcatcctcagcggcctcctctccgtcgacggcctcaaggtcttgcacatggataggaatgactactatggaggagattccacctcgctcaaccttaaccagctgtggaagaggtttagaggggaagacaaacccccggctcatctgggctcaagcaaagattacaatgtagatatggtcccaaagtttatgatggcaaatgggacactggttaggaccctcattcacactgatgtgacaaagtatttgtcattcaaagctgtcgatggaagctatgtcttcagcaaagggaagattcacaaggtacctgctactgacatggaggctctgaagtcccctttgatgggtctttttgagaagcgcagagcaaggaacttcttcatttacgtccaagattacaatgaagctgatccaaaaacacatcaagggttggatcttactacaatgacaactagagaactgatagcaaaatatggtttaagtgacgataccgtggatttcatcggtcatgcacttgctcttcataaagatgatcgctaccttaatgaaccagcaattgatactgtaaaaaggatgaaagtatatgcagagtcccttgcaccttttcaaggaggctcaccttctatctatccactctatgggttgggtgagctgccacagggccatgctcgtttaagtgctgtttatggtggcacttacatattaaataagccggactgcaaggttgaatttgatatggaagggaaagtctgtggcgttacttcagaaggtgaaactgcaaaatgcaagaaagtggtttgtgatccttcatacttacctaacaaggttaggaaggataggaaagttgcacgagcaattgctataatgagccacccaattgcaagcacaaatgactctcactcagtccagattattttgccacagaaacaacttggacgcaagtcagacatgtatgtcttctgttgctcatacacacacaatgtcgctccaaaggggaagtttattgcatttgtatctacagaagcggaaactgacaatccacagtccgagctaaagcctggaattgatctacttggtcaagtagatgagctattttttgatatctatgatagatacgaacctgtgaatgaaccatctcttgataattgttttgtctcaactagctatgatgccaccacacattttgagacaacggtgacagatgttcttaacatgtatacattgatcaccggaaaggctgttgatctcagtgttgatttgagtgctgccagtgccgctgaagaatattagatttcacaaccaaagctcaatcatttcacaaagatatgctttttcttggtgggtaccgcaggacagatcgtaacgagtgactggtatagttattcaaactccacgttataccgagtgttctggccaatatggcttgttgctagcagtaatatgcacaactgttggccaagatgactgaaatgatggtggtttaatttgatacttcagtaatgcaatggtgtaaacagtgtacacactacacaatgacggtcgggcgttttgtgactgatgtatcataactgctggataattttgcatgtctacttctgcaaaaaaaaaaaaaaaaaaaaaaaaatgatctctaatagttattggactgtcctttggtgcccagaggaaaagatttgtgcgttgtttttccattcatattaggtttatatatgattttttttcttttattccaaactatagtggctgagttttattaataatttgataatgctgtatattctaggttcatagcaatttagcctgtgagtaaacagctgtttttgttgttcagtttacttaatttcccctttaaatgttgtggat

SEQ ID NO: 8007 - DNA, 6344 bp, Oryza sativa
  Clone ID: PAT_MRT4530_14550C.1
atgttggacttagggggaaagaatggggaaaatggaaatgaagatgaagcaagcagcaagggaactccaccacccaagggagctactataccttttgattacagcaaacttactattccctctcactacttcgtctccatgccttccgggcatactcctcaatttgatgggacatattatgacgcttggaagcacaaggtgaagttgcatctaatctctttgcatccaagtatttggaaagttgtttgtacaggtattgatataccccatgatgacatggagctcacttcggggcaagaacaattcatccaccgcaatgctcaagcttctaatgcaattctctccgccttgagtccggaggagttcaacaaggttgatggactagaggaggctaaggagatatgggatactttgcaattggctcatgagggatcacccgccgttcgtgaggccaagattgaattattggaaggaaggcttggaagatttgtgatggatgtcaaggagacaccacaagaaatgtatgataggatgatgattcttgtcaacaagattaaaggacttgggaagacttctgcgtgcatttggtccaagaaatcccactcttttttatcaatgatacgggaaaggaaacacttcaagagactcaccccaagtgacattcttggaagaattgtgtctcatgagatgcaagaagaggaagctcgtgaagtgagacaaatggtgaataatgccgccatgataaaaaatcaagaagttgctttgaaggcaaaacaagaagaagagtcaagttgtgaagaaagtgaagatgaagaaatggcttttattgtcaagagattcaagcactttcttcgcaagagtggctatgacaaagggaggaaggatgatgacaagggaaagaggcaatcaaagagagcgtgcttcaattgtggcgaatatggccacttcattgccgattgtcccaagtcaaatgaagctaaggctaagggaggcaagaagaagccggagcgtgctcatgtggcggaggcacacatggcggaagtgtggcactccggagatgaagaagatcccgaggtcaagcccaagcccaagtcaaaagacaaggttgaaggagaaggtggtgttgctaccgtcgccttcaagtcatcctcttcaagcaaggagtgtctcttcaacaacttgagtgatgatgacgacgactcctaccactactcttgcttcatggcccaaggccgcaagagctttagcaaacccgctatgcaacatttggctaagttaatgagagctttggatagtaaagaacaatcactcgaaaggcaagaagaattgcttattcttgagaagaaaagaaatcttgccttagaggagagcttagctaaagaatgtgctaaaaataaacaacttgctaatgagcttaatttggctaatggttctttagctagccttagggatgtcaatgaaactcttcaagaaaaatttgctaatttagacaaaagtcataaagatcttgaagttcaatttgacactctttggaatagcacctctcaaccaaatgtggtttctaattcttctaacccttttactagcaatggttgtgctaggtgttacgatattgatttgaactcttatgctactaatattgacgctatgcaagctcttaagaaagagaatgaaaggttgagcactttggtgaaatatggatgcatgaagacataccattcaaaagatgtcctttacaagaccatcaccgctcatcctaacaaggatggacacgagctcgggttttcgggtggaagtcctgtgcctaagcgtgtgatggtaaatgggaaagaatgcttgatgtttgtgcgagaaggtaaagctccacaagcaagtgaggtgactggtcttgtgagctgccagggacccggaacatccggacaaaccgggcgaaacctctgggtgggagtctctgtctctcaaaaattcccaccgggaagttccggccggtttgccaggaagtttcgggccaatggccgtgcacaagacatgaccggaagttccgggcataatgccaggaggttccagccagatggtctttactatgattcatatgtaatttccaaaaattcagagggcaaagtggttgcttattttaatgtgaattacaatgatgagtaccgcacttgtgtgtgggtgccaaaggctttggtaactaacatcaagggacccaaacttagacaggcatactcctccggtggttcaagttgggttgtggacagtggttgcaccaatcatatgactggagagaggagtatgtttacaagtcttgataaggagaacggaactcgtgagaatattgtgtttggagatgatggtaaaggaaagttgggttacaattgcttgtttaccgatgaggatgtgaccgtctttagaagggatgactcctccgtagcattcaaaggcaagttaaagggtgatctctatcttgtcgatttcgatgtggatagagtgaatccggaaacttgtttgattgctaaatcctccatgggttggctatggcatcgtagactagcccatgttggaatgcggaatttggcaactcttctaaagggggaacacatcctcgggctcactaatgtcacatttgagaaagatcgtagtgaggctcaagatgtcttcaagcgcttcgccaagcaagcccaaaacctctatgatctcaccatcaagagggtacgaagtgacaatggaggagaattcaagaacacacaagtggaggaattccttgatgaagtgggaatcaagcacgagttctccgccccttatgatcctcctaaaaatggcattgttgagaggaagaaccgaactcttattgaagccgcaagagcaatgcttgataagtacaagacttcggatatcttttgggcggaggccgtgagcaccgcatgccatgccatcaattgcctgtacctccacaaaattctaaagaaaacttcatatgagctcttgagtggtaagaaaccaaatgtttcctattttcgtgtctttgggagtagatgctttattttgagtaagaggcctcgttcatctaagttctcacctaaggtggacgagggattcttacttggctatgagtcaaatgcacatgcctaccgtgtcttcaataaaaccttcggtattgttgaagttataagggatgtgacatttgacgaatctaatggctcccaaggagagcaagttgttgtacatgttgtaggtgatgtggatccaagtcaagctataggtactaaggctattggagacatacgaccagtcgagacgcaggatgaccaagaagatagggatcaaccttcgtcatcgacatccaatagccctacatcgagtcaagagtcagttgacccggaagttccgggaccagatgatcggatcctccggacctccccaagccaggaagttccgggtccatctgccaggaagttccgggcagaggacagtcaaggcgtgcctgtggatgggattgatgccgagggcactgtagagcatcctgatcaggctcaggtcccctcggtgcaccatccaagaatacatcacactgtccaaagagatcatcccgtcgacaacatacttggtgacataagaaaggggataactactcgttctcgtgtcgctaacttttgtcaacactattcgtttgtctcttctttggaaccaaccagggttgaagatgcacttggtgatacggattgggtgatggctatgcaagaggagttgaataacttcactcgcaaccaagtatggacgttgttggagagacctgaccaaaatatcatcggcaccaagtggatcttccgcaacaagcaagatgaacatagagtggttgtaaggaacaaagtccggttagttgcgcaagggttcacccaagtcgagggtctcgattttggtgaaaccttcgcacctgttgctcgccttgagtcaatccgaatccttttagcctatgccgctcaccatgatttcaggttattccaaatggatgtcaagagtgcctttctcaatagacctatctcggagttggtctatgtggagcaaccaccggggttcgaggatccaaagttgccaaaccatgtgtacaagctccacaaggcgctctacgggctcaaacaagcccctagagcttgtagtatcatgactaaaaggttcgagatgtctatgatgggtgagttgaccttcttcctcgggctacaagtgaagcaagcacaagagggcactttcatctctcaaaccaagtacgtgaaggacattctcaagaagtttgggatggaagatgccaaacccatcaagactcctatgcctactaatggccacctagacctcgacgacaatggtaaatgtgtggaccaaaaggtatatcgctccaaaagtgtttgcatgtgtgctcactttcaagcggagcctaaagagtgccatttgattgccgtcaagagaattctaagatatttagttcatactcctaatattggcttgtggtatcctaagggttgtgactttgagcttttgggctattccgattcggattatgccgagtgtaaggttgatagaaaaagcacaaccgggacttgtcaattccttgggcggtcccttgtttcttggtcctccaagaagcaaaattccattgccctatccaccgccgaagccgaatatgtcgccgccggttcttgttgtgcccaactcctttggatgaaacaaaccctaaaagattttggctacaacttcaccaagatcccactcctatgtgataatgagagtaccatcaaaatagccaacaatcccgttcaacactcaagaaccaagcacatagatattcgccaccacttcttgagagatcatgaaaccaaaggagacatatgccttacccatgtgagaaccgagagccaattagccgacattttcaccaaacctttagatgagaaaagattttgcgagcttaggataagcactatgcctcgtgagaaaagacagaaagcctctcaggatgtgtccggtgataagagtcctcctattcgttttcctcgtggtcgtttgggtaaagagaaagtggttgatgcggcagtggtagcagtactcgtacttgtcctaggtttaccagtgattatggctagagaaaatccagtggttgagatgaagtggattgattgggcttacatgaggaagaagaacaatgaagtgttcaaccaagtgatgcaagtgtgccacaacaagaatcttggagatattcttgccttggagtatgattggaatgaggaggtcattgcacagttctatgcgacagcattctttggtactacaaggaagggaaccccttatgtgaagtggttgactgaggatgatgaggatctcaataggcccaacattcatagtgaagcatctctccccatgatcaagaccaagttcatgtatgcaaaggatgctcctaggacttgcatgggatctactcatggattgcatcccaactacaaggtgttgtactccatctttcattggtctttgcttccaaaggttggagatgctactgctttgccatccaagcatgctcatcttctcagtcgcatgcgctacaatcagcctcccttcaatgtgatgaaattgatttgccctttcttagcggagtgcctgaaggaatttcattcaacatatgatgatgaactcttgcagtggaatggtgctgaacttatgacaagagtaatcagaaatatgtccgacaaagcagatgacaacagtgggcatcttgacataaagtttgaaccttctgttgcattttatcccataagctcaacagatattacaaggtacttctcagaagcagatagcacggatgaaagagcccaacatgatgctctgttttctaggattgtaaatgactctactactttccacctctggaacagcattacttcttcgctggttcctgaacccaactctcttgttgagagaatccttaaccgttactgtcttcattgccttgatgttttatagtttgtagcgggttgaagttctgacgaagagcttcattttgggttagaatacatatacagaagaaattcatgagtttaatgggcgacaatatggctagtagtatattgttgaattttgcccaaaaattagttggggggataaaatggtggcattgtagatatatattcttttcaacagggctgcagtgttggtgctacaggcatgtacaattgtgttgacctgactacccattgtcactttttgacagcagatttgcttactggaaacactcaactcaagaactagaggcatttggaaattgagatgtttaaccagttaaaaaaaaaaaaaaaaaa

SEQ ID NO: 8008 - DNA, 509 bp, Oryza sativa
  unsure (1)..(509): unsure at all n locations
  Clone ID: PAT_MRT4530_14551C.1
ggaaaatttccaaaaaaaaattttttaaaagttttggnttttaanncccccccggtttgggaaaatggntttgggggaaaanaaaangtttgggaaattcctttgggttncccccaaaaattaaaccaaaaacccgccctttttcccttgggaaaaaagnccttgggtttatttaatttaattnccaaaaatttttaattaaaatttttttgggttcccattgggtttcccctccccangaaaattttggaaannaaattttgggggtnccccccctgggcccccaaaaccaatttttttttgggccttgggggggggncccaatcccccctgggggaaaccgcccccttggtttntttgnaaaacccaaaaaaaantcccttaatcccttttccncgaaaangggccntttanttttttggaattggaaatttcccccncccgttttnttttggccaattttcccaaggggccgnttccttggccccttggggggtttttnaaaaaaa

SEQ ID NO: 8009 - DNA, 327 bp, Oryza sativa
  Clone ID: PAT_MRT4530_14552C.1
tttttagagaaggggtggggcccctttaaaattttggaaccggcaaaacccggctggaaaactgtaacaaggggttgcccggggaaaaatggtctaacggaaaaaggggacaagtacccgttaccgcaagttggaacagaaaagcgccagaccttcaaggggaacggctggtatctaatagtctgcgggttcggcactctgcttgagggcgattttttgagtcgtattacaatttactggccgtcgttttacaacgtcgtgactgggaaaaccctggcgttacccaacttaattgccttgcagcacatacccctttcgccagctggc

SEQ ID NO: 8010 - DNA, 624 bp, Oryza sativa
  Clone ID: PAT_MRT4530_14553C.1
tttgaatcagagtaaatactgtagccggaaactgtagagaaattacttttgtggtcattttcagcagttgggtagcaaaatgaatggctaagattgtctgcaattgctattgcgcagtcaaaaactcacaatagcaactgcaccgatctgaattcaatggattgagggatcaaagagacaactgtaatcccccatgttaaacttttgtcagcaattactatgaaatgaaccttttcttttgcatggagctactataaatgaacttagattagtagaaatattaaaagatatattgcagaatatatctttatacttgcctcttgattaaactctcgcatgcttggcagaggttggcggctgtctctgttattgggaatctttacagcaacagtcttctcaccaattttgcactgaagaacagacccataactaccagttccaagaaaaattgcatctcggtcactgactacacgatgaatcagtgaaggcctgtactcggtgaacctaatcatctcatatgacctggaagcttgctcctccatccaccagcgatgtttggtataaattgatactatggtttccgttctcctgagttcttccctgagtttctggttctccctgatg

SEQ ID NO: 8011 - DNA, 886 bp, Oryza sativa
  Clone ID: PAT_MRT4530_14554C.1
atgcctgtggagtacgttggactgccgctgcttcgcttccgctatctcatctacttcttctgtgatccagggaatggtattgtaagacacatggggtttccggtgtgtaaaaccgggggcccacaatctaccaggaagccgtccccccaggtattctcagagttctacttggaagccaagggtatagatataagaccctcagagggtgcattagtccaaggtgtggaagatggatgcttggagacccccaaaaagtacaaaatcaaagcggaccggaactcgagaagtatcgcccgcgagaatccgttacatattgtggatgtcccgtgtaagtttgtgaaggatttcctctcctccgaaagggaacgagaacaccggaagttccgggcctgggaggccggaagttccggagttccttaccaggaagttccggggggaaagaacggggaaaatggaaatgaagatggagcgagcagcaaggaaactccatcacccaagggagctactataccttttgattacagcaaacttaccattccccctcacaactttgtctccgtgccttctgggcgtgttgatgtacctaatgatgacatggagctcacttcggagcaagagcaactcatccaccgcaatgctcaagcttccaatgcaattctctccgccttgagtctggaggagttcaacaaggttgatgggcttgaggaggccaaggagatatgggatactttgcaattggctcaagagggatcacctaccgttcgtgaggccaagattgaattattggaaggaaggcttggaagatttgtgatggatgacaaggagacaccacaagagatgtatgataggatgatgattcttgtcaacaagatcaaaggacttggga

SEQ ID NO: 8012 - DNA, 1632 bp, Oryza sativa
  Clone ID: PAT_MRT4530_14555C.1
ttttttttttttttttttttttttttttttttttttttttttttttttttttttttttttttttttttaataaacaaaagggtgtactagtgtaaattaagtaaggtataatgcacccgtacgtggtggaggcaatcaccagttgagttgtaaaactgcaacaagtatatataagctgctatgctatgcacactaataatttttgattgatgagatttagggcggctaagggtaataataataaaattgagttcagtagtagtagagtccaagtgaggtcctcggcaaggtggaggaacgaggaggcctgcttccagctccagctccagaattgttgggaatggagttggagtaatcattcttgggaaactgatacctgcaggaggaagacgaagagtacctggcgctgaaattcctctcaagcaaaacttcatctgccctcctcatccccaacctgccgccattgaatgagcttccaattccactgaatgagcttcttgcgctgacgctgctgttgcaccggagcatctggccgtcgtaaccccttgcccggagctccggtggcgccgcccgtgcctcgccggcgaacgcactggcagtggcacccacactgttggtggtgctgctcttcttgtgcaggaggccccagatgctccaccccttgatccccttgttcttaggcttgctctttgcctcttgtcgttcccgggccaataatggcggcggctcgaagcttggctggtgatagtggaacgtgtggggctggtggtacagctctgtggccggtgaaaccctggcattggcagccgcggccaccatcctggggatttggtcgccggcgtcggaggaggacttgcggtcgacgctccggcgcctcctgctggagctggaggagtcgaggtagtagtcccttgtctgggcggagccgccgggcacgtaagctcgctcctcctcctccacggggatctggtcgtcggagcgtggaacgaagagcgtgggatggtaggacgcgcggggctcgtccagcatggtgcgggtggagaaagcgtcgcaggagcggcgggccagcagcgcggggtcggtggcggtggcggggggcgggtggtggtgcttgagcttggacttgcgacgccattcctgccagcgcttgcccagggagcccaaggcgagcttggtgttggttggagcatcagcagcatcgggcaggactagagcatcctgctgcgggtgcggctccaagtaggatgaggagcgggcgtagtaggagaaggacttgcagcggcggaggtcggatggcgggtggaggccggcgaggcggtcgcggaggcaggccgggcagaaccccgtcaccgccacgcccgggtggagcccgcacaccgacaccgtctccattatccaaccacaatatgcctctgcaactgcaactggactagtagtagatttcttcttcttcttcttcttcttgcaattaaactcttgactgaatatgcatgctgctaggtttgagttgagtcttgagctgctgctgcttcttcttttccctttttccctttctcttttgcttttttcccttctctgaatccttctcttctttccccaccctctgcctccttggacttcactggaccccat

SEQ ID NO: 8013 - DNA, 765 bp, Oryza sativa
  Clone ID: PAT_MRT4530_14556C.1
atggagatgcagtcgttcgtgcggttcgacgggaggtactgcgtgtaccgcgccacgccggcgctcggctgcgggatcgccgcggcgatgttcgtgctgtccggccaggccgcggtcaccgcggcgagcggctgcttcggccgctgccgcgcgcgccgcggcgaggagtcgtcggcgcccacgccgggcgagcagcgcaggcgctccgtcgccgcctggctgtccgtcatctcgtgcatccgcacgcgcgcgcgcggcggcgatgaccattgtcgacgtcgctgcagggtgttggtggcgacggcggtggcgatgttcctgtacggcgcgtcgcggaacgcggccgtgaggagggggctcgcggcggccgcgctgggccggcgaggcaggcgaggcaggcgccgcggcggcggccacggccgcaacgtgtacggctgcgccgtcctcgggagcgggctgttctcggcggcgtccgtcgcgtcgctcgccgcctccgcctgcgggatcgccgcctacgtctacgtcgaggcggatggtgaatcattgacactcacgccgacgacgccgccgccgcggcctggtgggttcgccggggcgccgggcgcggcgacgggtggtcagccgtatttccagccgcaggtggcgtacccggccacgggctacgtcgccaaccctgctgcggctcctcccccaccaccgtacggcggcggcggcggcggcgactacgccggctatgtcgccaagtcgcgtgaaggcacagcttga

SEQ ID NO: 8014 - DNA, 1171 bp, Oryza sativa
  Clone ID: PAT_MRT4530_14557C.1
ctatccagcgttccagccgccaggccgaggccaccagggaggagaccgacgcgccgcgccgcgccggcgacttcgccctgcgcccgcgcacgcccgcccgtcgccccgtcgcccgtcgcccgtcgccgcgtcgcgctttgccaccgtcccctgtcccagtcgcgcggtcgccgcttcgctgcttcggcccctccacgcgccagcgccggcggcccgctctaggtgtctcggcgcctccagtccatgcgccagcgccagcgccagcggcgccgttccggagctccagacgaagcccgagggacgaagtaaatttctcccctggaaacatcccagaaagctgatccagtggaaccagcagctaagattgttcgacaaacctcacagttcaaacggtggggacggaaacatccatttgttcgatatgggctgccacttatctctttgacagtgtttggtgcagtaggactcgctcatcttatacagggcagcaaagaagtaacaaaggaaaaggaggacatggaatgggaggttgtagaaacaacaaaagccctgagccgaacaggaccggtggaaggagcctacaagcctaagaagctttcactagaggatgagctgaaggctttgcagcaaaaggtggacataaacaactatgactacaagaggattcccagacccaatgagaaataattgaagtaaagcatcatttaccaccctgagaagcaaagtaaaagtctcatcattttttccttcgtgacatctgtttaatgctgactgcccaaatgagatgaggaaattccagcattgtagccggcaacaacctccagtattatcatgagaactctatgttctttctgccaccattgtagagaattaaggtgatgattcttgaactgtacgaatcagcgtttgtaacgacggcactaggcatgataaacttggctgtagctttgtatgtctactcttgtgagatttttttggtgttggaatactgccccaggaatgggtgaataaattgcaagactactcttgacatgtgaaatacaaaaaaaaaatatgttattcttcttcaaagagaatttgaatcccccgttcaaataaatatatactcagctattgttctagaaatatcttcgacaacaaaaaaaaaaaaaaaaaaaaaaaaaaaaaaaaa

SEQ ID NO: 8015 - DNA, 378 bp, Oryza sativa
  Clone ID: PAT_MRT4530_14558C.1
atggctgatggggcgatgcgctaccttggacggaggatcaacaacgaccagcaacagggtggacgcggcgccgtcgcgtggattgtccaccggcgccggctgctactcgactccggccgtgccatgatgctactcggcgccatcgtcctcactagccgccagctgatcatcaccacgagcagcggggccacgcacagcgtcgacgccgagctgtatcatgcgtacgacgtcgtcttggtggcgttcctcctgtggctgctcggcgtggcgctcgcgacgctgtcgctcgtcgcgccgcgcgcgcagctcccggggctcgcgttcgccaacgccgccgtcgcgatggcgctccgcaaccacattcttcgcgacctctag

SEQ ID NO: 8016 - DNA, 355 bp, Oryza sativa
  Clone ID: PAT_MRT4530_14559C.1
atccatctcactcagacccttttgaatgtagcggataacaacggagcggggctatcgaattgatatgtattcgaatcttaggagctggtaatcactgatatgctcatattggtgacgttattgttgctgtaatcaaagaagcagtgcccaaaatgcctctagaaagatcagacagaagtaagacgagctgtaattgtacgtacatgtaaagaactcaaacgtgacaacggtatgataatacgatatgatgacggttgtcattaatcaagaaggaaatccaaaaggaactcgagtttttggggaattgagacttatgaatttcacaaaaagagtctcatgagctcctgaggtatta

SEQ ID NO: 8017 - DNA, 1581 bp, Oryza sativa
  Clone ID: PAT_MRT4530_1455C.1
atgctcagcctattggacattggtccaaaccaatgcaccatacttattccacgaacagaagcatataagttgcaatgcatcaaagagtgctgcagaaaagccaagggcctcacgtgtccttacggcaataacaacgcaaggcacattcatctggattctgagttaatgcgtggaggtcgtcctcgactgcatgatgtttgtatgtcccttggaagctggcaacgaactactgccacatatctccccaggaagagattgagttggtcgggagatgaacgagccacgaacgagcagatcctttcaacgcagctgatatacagtttgttagcgcgttgttgtctgctccggcgacatagagaactatggaatatacgtgtaagaactcctatgggtcagtgcttcaatcgtatttctctacggcccatgggcggaacttctcaggtacgagaggtgatcggtgtccccgtgatcttcgagaaccgcttgtcgatgctcagaagcactacactttcaaaaagggggaataatagcaaggctgagtacaaccaacgtactcagcaagccacactaatgatgcagacgtgcaaggggatacaaggacgggtttcacccccgccaccagctggcaacgggcatcccccctatgccacggtaaatccgcaagccgatcaaccaaacaccccggccgacccaactccatcatgctcacccttggctgagaacgtcagccagaggaaagctatacttcaagtcaggcagttacccattcccgcttgtggcaagcgttgtaagtcttccagggtttcccgcgaaccggaaaagggacacgctgacgtcagcaaggggccggacggtaccgacatgcaggccccacatgtcagcgggtcaaggggagggcacacggtggacacggtccaccacggccggggcggcatcgtggaccgagaccacgggagtggtccacgggcggccacgggcaaggcagccagggcatgggcgcggccgagaccggcccggccgagcggcggcgaacggcggcggcggcctggccggacggccaccagcgacggcggtgcggcacatggcggccagcgaagaggagatagagggagagggaggggaggtgcggggatggtttttataggcttgggaggcggagatagtggccgagaggggcggattcggggtggcaactggtgggaagtggggcgccgacgtggaggaaatggcggccggatttcgcgaggaaagtggggaaaactgacgcgggaggaagaggtgggcggcgaccgcatcgtgtgcgcgcgcgggagctacacaggaacgggaggagcggcgatgtggagcggattcggcgactatggcggttggagccgaagatcgaaaccgatgcagctcaacccgaaagcaagaactcgtcgaaacaaaactaaagcaaaaaggtggcgatacgctgaaattgtattgaactccgactcagacttcagccgattcttgctctgttctcggatcaatctccgccttcgactccaccttgatctaatctccttttccaatgctgatattaccaaatttggtcgt

SEQ ID NO: 8018 - DNA, 195 bp, Oryza sativa
  Clone ID: PAT_MRT4530_14560C.1
atggagaggattgagaacggagggaggaagatccatggaggggaccggcaacaaggaggaaaaagaggaggtggatgggagccaaggtcctacaaggacggggacagagctctcgccggagattatagccgcagtggtggacatcttgacgcccgagcgtcgtatttcgggttgatgaaaatgggaaacggttag

SEQ ID NO: 8019 - DNA, 697 bp, Oryza sativa
  unsure (1)..(697): unsure at all n locations
  Clone ID: PAT_MRT4530_14561C.1
tttttttttttttttttttttttgcgggtgcaatagagcactcgatctttctcttcccgtcacagcaaagaccatacaaccatatgtcatcatcatatctccaaagaccaaataatgtcgcagcagcaaaggatgttagcccgtttggcaggaaaaaccaccattctacatcgtacaccggactaagaaaaatgaggaagaaaagggcactgagctacagattgactattattctcattatacatcaggggcttcctgctcaactgcagggcctggaaacgcttcagctgcagcaaaatttggtggcattgctacatcagaaccctggaaagggagcaccccttgtgctgggacgaggccgccatcgttcccgccgttgaacggtgcaccttcttgtgctaggccacctggtgacattggtgacattgcagatgcatcagccagtgattttgcaggtacctgcgggggaacaggacctgctgatccaggtgcaggtacagctacaggcccaggaccagttgaagcaggaccggctccgggttgcagtggcaggacatcgaagccggatctaggccggggcctgcgtgccggtcctncaccctgggtcatagcttctgctcctgctgcgacttgggctncggctgcgggntacggctccgggtccagntcctgctgcgggntcctactaagtgaccag

SEQ ID NO: 8020 - DNA, 410 bp, Oryza sativa
  Clone ID: PAT_MRT4530_14562C.1
tttttgtttgtttttttttttttttttttttttttttttttttttttttttttttttttttttggggaaaaaaacaaggattcaaacattgcttttttaaacaataacctttccaaactccaaaaggggcccttgccatttacaaacccccccctaaatttcaaacaaatcctcaaaactatgccaagccctaactacatcacctagctccattttaagggggtcccacccaaacccttttaccttgcccgtgccgccgtaaacgtgcccgggggggacctccagcctaagttggacgagcaacagggggggggccacctccgagatgtccaccgacataggggggatccccgactacagccgcccccccggcagggggaaggcattaaccccttttttccccccaccac

SEQ ID NO: 8021 - DNA, 177 bp, Oryza sativa
  Clone ID: PAT_MRT4530_14563C.1
atggcatcccctcgcatcgccaccgccatccttgctcatgcctcctcctcgacggtggcgagcggaaggggccatgccatcctcgctcatgcttcctcctgcccgacggtggcgacgcgacaacagcctcccgtcatcaccgccatgccctgttgcttccgccagagaggaaagtga

SEQ ID NO: 8022 - DNA, 289 bp, Oryza sativa
  Clone ID: PAT_MRT4530_14564C.1
acgcgccacgcgaccggatcgaaagcatttgtttttttatgagagcaaaacgacgttccatctccaccccgagggagttgttttactgcaggctgaagctcacaccccaacgccttactggtcggacgggcgcgtcgactacgacggctaggcggagggcagcaaggagcgccgcgacggcgaccatggcgctcaatgaggagccgtaaggcaaccgtagcgggttccacggcggtgttccgagctgggaccccgggctggagacccaagtgcctttcgagcaaagacc

SEQ ID NO: 8023 - DNA, 443 bp, Oryza sativa
  Clone ID: PAT_MRT4530_14566C.1
gcttgccagtgggtgcgaaattactgaaatttcattctgaaattgcaatcactggtcttgaatcaaatggcactagatatacatgatacatttggtaaaaatgtaataaaaagttaactagctactccctccgtttcataatataagactttctagcattgcctacatttatttagatgttaatgaatctatgcatatgtatgtgtctagatttattaacatctaaatgaatgtgggcaatactatacagttttacattgtgaaacggaggaagtacctgttactaatgtagcatgacatccttgcatagatgcattcgtgcatatgatacatccttgtggagcttggcgtgggaggatgataagcgacaacattggtccaccggtgaagctagtggtctggtgatggcggaagggggatgggccgggggaggggaatgaggg

SEQ ID NO: 8024 - DNA, 825 bp, Oryza sativa
  Clone ID: PAT_MRT4530_14567C.1
gcacgaggccccggccgggataacacacaccagaaaccgataagggacacgaaacaggggaatccggagcaaagtgcgacgcgagcgcgcgaggaagcagcagccatggcgctctccctctccacctccttcctcccgacccaagccgccgcggcggccacgaggaccaccctccgctccctcgtcccctcccagaggatgcggtgctcgatgcggaagaaggggctgcacccggagatctacgaggacgcgaaggtgtactgcaacggggagctggtgctggtgacggggggaaccaagccggagtacacggtggacgtgtggtcggggaaccacccctactacgtcggcgacacgtcggcgatggtcgtcatggacagccagatcgagaagttccgcaagaagtggggccacatcaaggagtactggcccgaggaccagtggagggagatgcaccccgacggcgacccggagttcgacccggaggaggagggatccgccggcgccagctgagcccccgcttcgcctctcgcctccgccgccggcctcgccggtgcggtttctcttggttgattttgggaattgcgtaaaatggattagctcctcttgcttgcgcctctcgttacacgtgcattcgcattgctctctaggtgttcgatcggtgttctcagtggatacgtgtgatcatatttgtggtatcgaactgtttgttctctgcctgtactctttgacatcgatataaaatggagatattgcaatttgcacactctgtaaaaaaaaaaaaaaaaaaaaaaaaatcgatgcatgctagtgttggtctgggct

SEQ ID NO: 8025 - DNA, 6474 bp, Oryza sativa
  Clone ID: PAT_MRT4530_14568C.1
atgtcagacttagggggaaagaacggagaaaatggaaatgaagatggagcgagcagcaaggaaactccatcacccaagggagctactataccttttggttacaggaaacataccattccccctcacaactttgtctccgtgccttccgggcgtgctcctcaatttgatgggacacattacgccgcttggaagcacaagatgaagttgcatctaatctctttgtatctaagtatttggaaagttgtttgtaaaggtgttgatgtaccccatgatgacatggagctcacttcggagcaagagcaactcatccaccgcaatgctcaagcttccaatgcaattctctccgccttgagtccggaggagttcaacaaggttgatgggcttgaggaggccaaggagatatgggatactttgcaattggctcatgagggatcacccgccgttcgtgaggccaagattgacttattggaaggaaggcttggaagatttgtgatggatgacaaggagacaccacaagagaagtatgataggacgatgattcttgtcaacaagattaaaggacttgggagtgaggacatgacaaatcattttgtgctcaagagacttctccgtgcacttggtccaagaaatcccactcttgtatcaatgatacgggaaaggaaagacttcaagagactcaccccaagtgacattcttggaagaattgtgtctcatgagatgcaagaagaggaagctcgtgaaagattcaagcactttcttcgcaacagtggctatggcaaagggaggaaggatgatgacaagggaaagaggcaatcaaagagggcttgcttcaattgtggcgaatatggccacttcgtagccaattgtcccaagtcaaatgaagctaaggctaagggaggcaagaagaagccagagcatgctcatgtggcggaggcacacatggcggaggtgttttactccggagatgaagaagatcccgaggtcaagcccaagcccaagccgaaagacaaggttgaaggagaaggtggtgttgctaccgtcgccttcaagtcatcttcttcaagcaagaagcgtctcttcaacaacttgagtgatgacgacgacgacttctaccactactcttgtttcatggcccaaggccgcaaggtgatgactcaaaagcgctctcacacctctcttgatgttgattctagtgatgaggaaagtgataatgaattagatgatgtgcttaagagctttagaaaacccgctatgcaacatttggctaagttaatgagagctttggatagtaaagaacaatcgctcgaaaggcaagaagaattacttattcttgagaagaaaagaaaccttgccttagaggagagcctagctaaagaatgtgctaaaaatgaacaactggctaatgagcttaatttggctaatggttctctagctagccttagtgatgtcaatgaaactcttcaagagaagtttgctagtttagacaaaagtcataaagatcttgaagttcaatttgacactctttggaatagcacttctcaaccaaatgtggtttctaattcttccaacccatctacaagcaatggttgtgctaggtgttacaatattgatttgaactctcatactactaatgttgatgctatgcaagctcttaagaaagagaatgaaaggttgggcacattggtgaaatatggatgcatgaagacataccattcaaaagatgccctttacaagacaatcaatcatcttaacatggatggacacgggctcgggttttctggtggaagtcctgtgtctaagcgtgtgatggcatactcctccggtggctcaagttgggttgtggacagtggctgcaccaatcatatgacgggagagaggagtatgtttacaagtcttgatgagggggctggaagtcgtgaaaatattgtctttggagatgatggtaaaggaaaggtaatggatctcggtaagattgccatttccaagaatcaatctctatctaatgtcctccttgtcaattcattaagagtgaatccggaggcatgcttgattgctaaatcctctatgggttggctatggcaccgtaggctagcccatgttggaatgaggaatttggcatctcttctaaaaggggaacacattcttggtctatataatgtttcttttgagaaagattgtgtgtgtagtgcttgccaagccgggaagcaagttgggagtccacatcctataaaaaacatcatgactacaacaagaccactcgagcttcttcatatggatttatttgggcccgtggcctacataagcattggaggtaacaagtatggtttcgtcattgttgatgatttttcacgcttcacttgggtgtactttctccatgacaaaagcgaagatcaagatgtcttcaagcgcttcgcaaagcaagcccaaaacctctacgatctcactatcaagagggtgcaaagcgacaatggaggagaattcaagaacactcaaatggaggaatttcttgatgaagaaggaatcaagcacgagttctctgccccctatgatcctccccaaaacggcattgttgagaggaagaaccgaaccctcattgaagccacaagggcaatgcttgatgagtacaagacttcgaatgtcttttgggcggaagccgtgagtaccgcatgtcatgccatcaaccgcttgtacctccacaagatcctaaagaaaacctcatatgagctcttgagtggtaagaagcctaatgtttcatattttcgtgtctttgggagcaaatgttttattttaagtaagaggcctcgctcatctaagttttcacctaaggtggatgagggattcttacttagctatgaatctaatgcacatgcctattgtgtcttcaacaaaacctctggtattgttgaagtcactagggatgtgacatttgatgaatctaatggctcccaaggagagcaagttgttgtacatgttgtagggggtgtggatccaaatcaagctattggtactaaggctattggagacatacgaccagtcgagacgcaggatgaccaagaagatagggatcaacctccgtcaccggcatccaacagccctacaagtgttgtgtctgctgagtcggaaattccgggtcctattgaccggaacctccggacatctctaggcccggaagttccgggttctatagtccggaacctttggatcagtggcagtgaagacatgccaacggcacaagtggatgggatcgatgctgagggcactttagagcattctgatcaggctcaggtccccccagtgcaccatccaaggatacatcacactgtccaaagagaacatcctgttgacaacatacttggtgacataagaaaaggggtaactactcgctctcgtatcacaagtttttgtcaacacttctcgtttgtctcttctttggaaccaaccagggtggaagatgtgcttggtgatccggattgggtgatggctatgcaagaggagttgaataacttcactcgcaatcaagtatggactttggtggagagacccaagcaaaatgttatcgccaccaagtggatctttcgcaacaagcaagatgaacatggggtggttgtaaggaacaaagcccggttattccaaatggatgtcaagagtgcctttctcaatggacctatctcggagttagtctatgtggagcaaccaccggggttcgaggatccaaagttgccaaaccatgtgtacaagctccacaaggcgctctatgggctcaaacaagcccctagagcttggtatgaatgtctccgagattttcttttgaaaaatggttttgaaattgggaaggcggatacaactatcttcacaaaaaaatttaagagtgattcattcatttgccaaatttatgtcgatgacataatatttggttctacgaatgcctctttttgtgaagaatttagtagtatcatgactaaaaggttcgagatgtctatgatgggtgagttgaccttctttcttgggctacaagtgaagcaagcacaagagggcaccttcatctctcaaaccaagtacgtgaaagacatactcaagaagtttgggatggaggatgccaaacctatcaagacgcccatgcctactaatggacacctagacctcgaccataatggtaaatgtgtagaccaaaaggtatatcgctccatgataggatctttgctttacttatgtgcatctcgtctcgacatcatgcttagtgtttgcatgtgtgcccgttttcaagcggagcctaaagagtgccatttgattgccgtcaagagaattctaagatatttagttcacactcctaatcttggcttgtggtatcctaagggttgtggctttgagcttttgggctattccgattcggattatgccgggtgtaaggttgatagaaaaagtacaaccgggacttgtcaattccttgggtggtcccttgtttcttggtcctctaagaagcaaaattccattgccttatcaactgccgaagccgaatatgttgccgccgattcttgttgtgcccaactcctttggatgagacaaaccctaaaagactttggctacaacttcaccaagatcccactcctatgtgataatgagagtgccatcaaaatagccaacaatcccgtccaacactcaagaaccaagcacatagacattcgccaccacttcttgagagatcatgagactaaaggagacatatgccttacccatgtgacaaccgaaagtcaattagccgacattttcaccaagcctttagatgagaaaagattttgcgagctgaggagtgagctcaatatcttagactctcgtaacattaggctggaagttccggtcaccccagtccggaacttccgggggtcggggggtataaatacccagggggagcctgagcctgtagtcattatgcctcgtgagaagagacaaaagctttctcaagatattcctgctgactcgagccccccgattccgatccattccaggagggctggtagcattgtcattcgtgatgcaccccgctctccctccccaactgcatctgagtcagatgatggtggcaatgaggatgagccaggttctgaaagcaatcctttgaggctgtacaagacaagggctgttgatcctgatcctaaacgcccaagagtgaactatctgaagaatctactcaagtgtggaaaggacagaatggttagtcctgatactctgccagctgactctcaggatgacagattcaggaccttggtgcaggttgattggtataactctgtgatcatgggaagatctcatccagtggtagagatgaagtggctagactggaagtacatgtcctcaaagaacaacatagtcttcaatgaggtacgcaaggtgtgtgagcacaagcacgcggcagatttgttggccttgcagtattcctggaatgaggaagtgattggacagttctactccactgctttctttggcaccaccaagaaggggcttgattttgtgaagtggaccattcaggggcagcagtatagggtttctatggcacaatttgttgcagctttggggttagatgatgatgacctgagtcgtccacatatctttgtagaggatgctctgtcaccgaccagcactacctttatgtatgagaaggatgctcccaaggattgtttggggactactcgagggttgcatccatattatagagtgctatactctatcttcaggtggtctttgctccccaaagtgggagatgctacagctcttccaggtaggcatgcgctcctcctcagtcgcatgcgctacaacaagcccgatttcagcatcatgaagcttatctggagtgagatctatgagacagtgtgtgagccaaagaggggttgcatctatgctccttatatcatgaagatgattgaggccaagactgggatttgttatttcaaggacaatcaatacaagcctttccgtccacatgctcccactacttcagctactcctaccaccagagtgacaagtgcttccacctcagctgctccttctttctctgctgcacctcagcgttctgagtcttcttctcccataaagaaggctctcaaggctatcttttgcatgtgtgccaagacagctaagaaggtaaagaagatagagaggcgtcaaaaggaagattggattgcagtaggcaaggatgtctctgacatttctgatgatgaggagtttgttgatccttttgctgcttatgagactgctcaagacattggtagtggtgagggtccctctggcacttctcgtttcttcaatgaggagtcctgtcactccgaggagagcagtgatgatgaggagtcagatgcccctaccgagaatgttcctacagatcccgatgaggcagtggacgccgccgggcaagacatcgactctcctcactccggcgacactgagatcattccttctgatggcgatattgatgaggcttga

SEQ ID NO: 8026 - DNA, 495 bp, Oryza sativa
  Clone ID: PAT_MRT4530_14569C.1
atgctgagaatattcctttttgacgccacactatttcatccattgcagcgacgggaacgctgccgtgtcatcgccgactccggagcgagcaccgagtgccaccgtcgcttctctgtcgttgcgccggtcaccgtggaccaaaccaagccaagccttcgcgccagcatattctcctcagcatcctcatcaaaagcccccaagaatctccaagaaccgagcctcgagcaggcagaacggacgttgtcttccccagctccgaccaccgtctccatctcagattccgttcctccgatgagtcaagaaatgaagcgccgccggccgccgacaagctactacgcgtgctgctgctggatagggatttcgggtatgggggtgaacgatgagtgccctgccagcaccaccgtcgttgcttcccagcgctgcttggccgccgccgcatccaaccgaagctgccgtcgttgccagaagaaggcaagagcaaaggaagcagtatag

SEQ ID NO: 8027 - DNA, 225 bp, Oryza sativa
  Clone ID: PAT_MRT4530_1456C.1
atggcggcggtggtggtggcacaaccatccgtggtgagcgcgacggagggcgtggccgggacagtgtgctcggtgacgagccgctatggcgagaccagctaccgtggtggcgtccgcactgctgctgagatgagggatctcaatggtgttggcgatggtgactaccgcgtgctcctcgatgcaagtggggccaagctgttcgcagacagcatgcacactgcgtga

SEQ ID NO: 8028 - DNA, 4353 bp, Oryza sativa
  Clone ID: PAT_MRT4530_14570C.1
atggagctcacttcggagcaagaacaactcatctaccgcaatgctcaagcttccaatgcaattctctccgccttgaatccggaggagttcaacaaggttgatggactagaggaggccaaggagatatgggatactttgcaattggctcatgagggatgtcccgccgttcgtgaggccaagattgaattattggaaggaaggcttggaagatttgtaatggatgacaaggagacagcacaagagatgaaagacttcaagagactcaccccaagtgacattcttggaagaatagtgtctcatgagatgcaagaagaggaagctcgtgaagtgagacaaatgatgaagaatgccgccatgatcaaaaatcaagaagttgctttgaaggcaaaacaagaagaagagtcaagttgtgaagaaagtgaagatgaagaaatggcttttattgtcaagaggttcaagcactttctttacaagagtggctatggcaaagggaggaaggacgatgacaagggaaagaggcaatcaaagagagcgtgcttcaattgtggcgaatatggccacttcattgccgattgtcccaagtcaaatgaagctaacgctaagggaggcaagaagaagccggagcgtgctcatgtggcggaggcacacatggcggaagtgtggtacttcggagatgaagaagatcccgaggtcaagcccaagcccaagtcaaaagacaaggttgaaggagaaggtggtgttgctaccgtcgccttcaaatcatcctcttcaagcaaggagcgtctcttcaacaacttgagtgatgacgacgacgactcctaccactactcttgcttcatggcccaaggccgcaaggtgatgactcaaaagccctctcaaacttctcttgatgttgattctagtgatgaggaaagtgataatgaattagatgatgtgcttaagagctttagcaaacccgctatgcaacatttggctaagttaatgagagctttggatagtaaagaacaatcactcgaaaggcaagaagaattgcttattcttgagaagaaaagaaaccttgtcttagaggagagcttagctaaagaatgtgctaaaaataaacaacttgctaatgagcttaatttggctaatggttctttagctagccttagggatgttaatgaaactcttcaagaaaaatttgctaatttagacaaaagtcataaagatcttgaagttcaatttgacactctttggaatagcacctctcaaccaaatgtggtttctaattcttctaacccttctactagcaatgctcttaagaaagagaatgaaaagttgtgcactttggtgaaatatggatgcatcaagacataccattcaaaagatgccctttacaagaccatcaccgctcatcctaacaaggatggacacgggttcgggttttcgggtagaagtcctgtgtctaagcgtgtgatggtaaatgggaaagaatgcttgatgtttgtgcgagaaggtaaagctccacaagcaagtgaggtgactggtcttgtgagctgccagggacccggaacatccggacaaaccgggcgaaacctccgggtgggagtctctgtctctcaaaaattcccaccagaaagttccggccggtttgccaagaagttccgggccaatggccgtgcacaagacatgaccggaagttccgggcataatgccaggaggttccggccagatggtctttactatgattcatatgtaatttccaaaaatttagagggaaaagtgggtgcttattttaatgggaattacaatgatgagtaccgcacttgtgtgtgggtgccaaaggctttggcatactcctccggtggttcaagttgggttgtggacagtggttgcaccaatcatatgactggagagaggagtatgtttacaagtcttgatgaggagaacggaactcgtgagaatattgtatttggagatgatggtaaaggaaagctacaatttattatccgtttctcaattatggatgactcctctgtagcattcaaaggcaagttaaagggtgatctctatcttgtcgatttcgatgtggatagagtgaatccagaagcttgtttgattgctaaatcctccatgggttggctatggcatcatagactagcccatgttggaatgcagaatttggcaactcttctaaagggggaacacatcctcgggctcactaatgtcacatttgagaaagatcgtgtgtgtagtgcttgccaagcagggaaacaagttgggaatccacatcctatcaagaacatcatgactacaacacgccctcttgagcttctacatatggatttatttgggcccgtggcttacataagtattggaggtaacaagtatgtttttgtcattgttgatgatttttcacgcttcacttgggtgtactttctccatgacaaaagcaaagctcaagatgtcttcaagcgctttgcaaagcaagcccaaaacctctatgatctcactatcaagagggtgcgaagcgacaatggaggagaattcaagaacactcaagtggaggaatttcttgatgaagaaggaatcaagcacgagttctccgccccctatgatcctccccaaaatggcattgttgagaggaagaaccgaaccctcattgaagccgcaagggcaatgcttgatgagtacaagacttcggatgtcttttgggcggaggccgtgagtaccgcatgtcatgccatcaaccgcttgtacctccacaagatcctaaagaaaacttcatatgaactcttgagtggtaagaagcctaatgtttcatattttcgtgtctttgggagcaaatgttttattttaagtaagaggccttgctcatctaaattctcacctaaggtggatgagggattcttacttggctatgaatcaaatgcacatgcctatcgtgtcttcaacaaaacctccggtattgttgaagtcactagggatgtgatatttgatgaatctaatggctcccaaggagagcaagttgttgtacatgttgtaggtgatgtggatccaagtcaagctataggcactaaggctattggagacatacgaccagtcgagacgcaggatgaccaagaggatagggatcaacctccgtcatcgacatccaatagccctacaagtgttgtgtctgctgagccagaagttccgggtcctattgaccggaacctccggacatctccaggcccggaagttccgggttctacagtccggaacctccggaccagtggcagtgaagacgtgccaacggcacaagtggatgggatcgatgctgcgggcactttagaggttgaagatgaacttggtgatccggattgggtgatggctatgcaagaggagttgaataacttcattcgcaaccaagtatggacgttggtggagagacccgaccaaaatgtcatcggcaccaagtggatcttccgcaacaagcaagatgaacatggagtggttgtaaggaacaaagcccggttatatcaaatggatgtcaaaagcgcctttctcaatggacccatctcggagttagtctttgtggagcaaccaccggggttcgaggatccaaagttgccaaaccatgtgtacaagctccacaaggcgctctacgggctcaaacaagcccctagagcttggtatgaatgtctccgagattttcttttgaaaaatggttttgaaattgggaaggcggacactactctcttcactaaaaagtttgaaaataatttattcatttgccaaatttatgtcgatgacataatatttggttctactaatgcctctttttgtgaagaatttagtagtatcatgactaaaaggttcgagatgtctatgatgggtgagctaaccttctttctcgggctacaagtcaagcaagcacaagaaggtaccttcatctctcaaaccaagtacgtgaaggacattgttaagaagtttgggatggaagatgccaaacccatcaagactcccatgcctaccaatggtcaccttgatcttgatgaaaatggtaaatgtgtggaccaaaaggtatatcgctccataataggatccttgctttacttatgtgcatctcgtcccgatatcatgcttagtgtttgcatgtgtgctcgctttcaagcggagcctaaagagtgccatttgattgccgtcaagagaattctaagatatttagttcatactcctaatcttggcttgtggtatcctaagggttgtgactttgagcttttgggctattccgattcggattacgccgggtgtaaggttgatagaaaaagcacaaccgggacttgccaatttcttgggcggtcccttgtttcctggtcctccaagaagtaa

SEQ ID NO: 8029 - DNA, 492 bp, Oryza sativa
  Clone ID: PAT_MRT4530_14571C.1
atgggttacgttgaggacgacaagggttacattgaggacgacaagggttacgttgaggaggaatcagcccatgcccaaccagcagctgtctacgccaacaagaagatggtttacgctgcaaaggctcaacttacaaggcttgtgcgacccagccagtcaagagacgggttgcatggcatacatgattgtggttctgtgattgctcagtttgacgggtcggagtccaggaagcttcggatcgttctcaccctcaccacttggtcgcaaccaactttggcaggtataaagctagttattccgaatcgtggttctgcgatttctcagtgtgacgggtcagagtccaggaggcttcggatcgttctcaccctcaccacttggtcgcatccgaccttggcaagtataaagctagttatcctcttgctgctcgcagctagttaccctcttgtgtttcggtttacactggcactctctgtcttgaacctactgccatga

SEQ ID NO: 8030 - DNA, 1850 bp, Oryza sativa
  Clone ID: PAT_MRT4530_14572C.1
atgttggacttagggggaaaggacggggaaattggaaatgaagatggagcgagcagcaagggaactccatctcccaagggagccactataccttttgattacaggaaacttaccattccctctcacaactttgtctccgtaccttccgggcgtgctcctcaatttgatgggacacattacgccgcttggaagcacaagatgaagttgcatctaatctctttgcatccaagtatttggaaagttgtgtgtacaggtattgacgtacctcatgaggacatggagctcacttcggagaaagaacaactcatccaccgcaatgctcaagcttccaatgcaattctctccgccttgagtccggaggaattcgacaaggttgatggactagaggaggccaaggagatatgagatactttgcaattggctcatgagggatcacccgccgttcgtgaggcaaagattgaattattggaaggaaggctaggaagatttgtgatggatgacaacgagacaccacaagagatgtatgataggatgatgatccttgtcaacaagattaaaggacttgggagtgaggacatgacaaatcactttgttgtcaagagacttctccgtgcttttggtccaagaaatcccactcttgtttcaatgatacacgaaaggaaagacttcaagaggctcaccccaagtgacattcttggaagaattgtgtctcataagatgcaagaagaggaagctcgtgaagtgagacaaatggtgaagaatgccgccatgatcaaaaatcaagaagttgctttgaaggcaaaacaagaagaaatggcttttattgtcaagagattcaagcactttcttcgcaagagtggctatggcaaagggaggaaggttgatgacaagggaaagaggcaatcaaagagagcgtgcttcaattgtggcgaatttggccatttcattgccgattgtcccaagtcaaatgaagctaaggctaagggaggcaagaagaagctggaacgtgctcatgtggcggaggcacacatggcggaagtgtggtactccggagatgaagaagatcccgaagtcaagcccaagcccaagtcaaaagacaaggttgaaggagaaggtggtgttgctactgtcaccttcaagtcatcctcttcaagcaaggagcgtctcttcaacaacttgagtgatgacgacgacgactcctaccactactcttgcttcatggcccaaggccgcaaggtgatgactcaaaagccctctcacacttctcttgatgttgagtctagtgatgaggaaagtgataatgaattagatgatgtgcttaagagctttagcaaacccgctatgcaacacttggctaagttaatgagagctttggatagtacagaacaattactcgtaagacaagaagaattgcttattcttgagaagaaaagaaatcttgccttagaggagagcttagctaaagaaagtgctaaaaataaacaactagctaatgagcttaattttgctaatggttctttagctagccttagagatgtcaatgagactcttcaagagaaatttgcttgtttagacaaaagtcataaagttcaaattgacactctttggaatagtacctctcaaccaaatgtggtttctaattcctctaacccttctactagcaatggttgtgctaggtgttacaatattgatttgaactcttatgctactaatattgtggagatgcaagctcttaagaaagagaatgaaaggttgggcacattggtgaaatatggatgcatgaagacataccattcaaaagatgccctttacaagaccatcaccgctcatcctaacaaggatggacacgg

SEQ ID NO: 8031 - DNA, 175 bp, Oryza sativa
  Clone ID: PAT_MRT4530_14573C.1
ataaaaaaagtactcctgtatcgaagcagccaacagtcatccgagcagcagatgcctcgattccattccatacatcaacacaagtcgaaaacccttcaggagcatcggttggatacgcgccgcacgcagccctacagcctgctgtcgcctcccggagcactcctcctggtccctg

SEQ ID NO: 8032 - DNA, 1980 bp, Oryza sativa
  Clone ID: PAT_MRT4530_14574C.1
atgtcggacttagggggaaagaacggggaaaatggaaatgaagatggagcaagcagcaagggaactccatcacccaagggagctactataccttttgattacagcaaacttaccattccccctcacaactttgtctccgtgccttccgggcgtgctcctcaatttgatgggacacattacgccgcttggaagcacaagatgaagttgcatctaatctctttgcatccaagtatttggaaagttgtttgtacaggtgttgatgtaccccatgatgacatgaagctcactttggagcaagagcaactcatccaccgcaatgctcaagcttccaatgcaaattctctccgccttgagtccggaggagttcaacaagaggaagctcatgaagtgaggcaaatggtgaagaatgccgccatgatcaaaaatcaagaagttgctttgaaggcaaaacaagaagaagagtcaagttgtgaagaaagtgaagatgaagagatggcttttattgtcaagagattcaagcactttattcgcaagagtggctatggcaaagggagaaatgatgatgacaagggaaagaggcaatcaaagagagcttggtttaattgtggcgaatatggccacttcattgccgattgtcccaagtcaaataaagctaaggctaagggaggcaagaagaagccggagcgtgctcatgtggcggaggcacacatggcggaggtgtggtactccggagatgaagaagatctcgaggtcaagcccaagcccaagccaaaagacaaggttgaaggagaatgtggtgttgctaccgtcgccttcaagtcatcctcttcaagtaaggagtgtctcttcaacaacttgagtgatgacgacgacgactcctaccactactcttgtttcatggctcaaggccgtaaggtgatgactcaaaagccctctcacacctctcttgatgttgattctaatgatgaggaaagtgataatgaattagatgatgtgcttaagagctttagcaaacccgctatgcaacatttggctaagttaatgagagctttggatagtaaagaacaatctctcgaaaggcaagaagaattacttattcttgagaagaaaagaaaccttgccttagaggagagcctagctaaagaatgtgctaaaaatgaacaactagctaatgagcttaatttggctaatggttctctagctagccttagggatgccaatgaaactcttcaagagaaatttgctagtttagacaaaagtcataaagatcttgaagttcaatttgacactctttggaataacacttctcaaccaaatgtggtttctaattcttccaatccatctactagcaatggttgtgctaggtgttacaatattgatttgaactctcatgctactaatgttgatgctatgcaagctcttaagaaagagaataaaaggttgggcacattggtgaaatatggatgcatgaagacataccattcaaaagatgccctttacaagaccatcaccgctcatcctaacaaggatggacacgggctcgggttttctggtggaagtcctgtgtctaagcatgtgatggtaaatgtgaaagaatgcttaatgtttgtgagagaaggaaaagctccacaagcaagtgaggtgacttgtcccctcactggtcagacacctggaagttccgggcaaaatgaccggaagttcctgccctgtaagacaggaagttccaggaagttccgggcttctgataggccgaaggggctgactggaagttccgggtataatgccaggaagttccggccagagggtctttactatgatttatatgtaatttccaaaaattcagagggcaaagtggttgcttattttaatgggaattacaatgatgagtaccgcacttgtgtgtgggtgccaaagggtttggtgactaacatcaagggacccaaacttagacaagtttgggttcctaaatcccaagcttga

SEQ ID NO: 8033 - DNA, 505 bp, Oryza sativa
  Clone ID: PAT_MRT4530_14575C.1
cctgcgcggtggttcctctcgcggcatatgggcgcctctgtcgcccacgctgtgcctggcccctttggcttgccggaatggaaaaacggaggaataggaaaaacgtaagattctgacaggaatgcatgtgtaaaacacaaggattggaaaatacacagaaaaacacaggaataactgtttaattggaccacaggaaaaacgcaagaatcggatgagagagatagactcaaaggaatttttccaagaggccaacatgacctgtttgcagctctattccgagatcttcagaaatcacgagcactggaatcggtggatcacaattcataccaaggccaggccagcagcagcagcagcaggtctctgccttgtaagctttgataccatcatacattcgcgaacttgatgatcaatgtactggattagaaatataaattcgacccatgtatgataatttgatcacgaatatatagttttgtgataatttgatcaaaaaaaaaaaaaaaaa

SEQ ID NO: 8034 - DNA, 1749 bp, Oryza sativa
  Clone ID: PAT_MRT4530_14576C.1
atgggttggctatggcatcatagactagcccatgttggaatgcagaatttggcaactcttctaaagggggaacacatcctcgggctcactaatgtcacatttgagaaagatcgtgtgtgtagtgcttgccaagcagggaaacaagttgggaatccacatcctatcaagaacatcatgactacaacacgccctcttgagcttttacatatggatttatttgggcccgtggcttacataagtattggaggtaacaagtatgtttttgtcattgttgatgatttttcacgcttcacttgggtgtactttctccatgacaaaagcaaagctcaagatgtctttaagcgctttgcaaagcaagcccaaaacctctatgatctcactatcaagagggtgcgaagcgacaatggaggagaattcaagaacactcaagtggaggaatttcttgatgaagaaggaatcaagcacgagttctccgccccttatgatcctccccaaaatggcattgttgagaggaagaaccgaaccctcattgaagccgcaagggcaatgcttgatgagtacaagacttcggatgtcttttgggcggaggccgtgagtaccgcatgtcatgccatcaaccgcttgtacctccacaagatcctaaagaaaacttcatatgaactcttgagtggtaagaagcctaatgtttcatattttcgtgtctttgggagcaaatgttttattttaagtaagaggccttgctcatctaaattctcacctaaggtggatgagggattcttacttggctatgaatcaaatgcacatgcctatcgtgtcttcaacaaaacctccggtattgttgaagtcactagggatgtgatatttgatgaatctaatggctcccaaggagagcaagttgttgtacatgttgtaggtgatgtggatccaagtcaagctataggcactaaggctattggagacatacgaccagtcgagacgcaggatgaccaagaggatagggatcaacctccgtcatcgacatccaatagccctacaagtgttgtgtctgctgagccagaagttccgggtcctattgaccggaacctccggacatctccaggcccggaagttccgggttctacagtccggaacctccggaccagtggcagtgaagacgtgccaacggcacaagtggatgggatcgatgctgcgggcactttagaggttgaagatgaacttggtgatccggattgggtgatggctatgcaagaggagttgaataacttcattcgcaaccaagtatggacgttggtggagagacccgaccaaaatgtcatcggcaccaagtggatcttccgcaacaagcaagatgaacatggagtggttgtaaggaacaaagcccggttatatcaaatggatgtcaaaagcgcctttctcaatggacccatctcggagttagtctttgtggagcaaccaccggggttcgaggatccaaagttgccaaaccatgtgtacaagctccacaaggcgctctacgggctcaaacaagcccctagagcttggttcgagatgtctatgatgggtgagctaaccttctttctcgggctgcaagtcaagcaagcacaagaaggtaccttcatctctcaaaccaagtacgtgaaggacattgttaagaagtttgggatggaagatgccaaacccatcaagactcccatgcctaccaatggtcaccttgatcttgatgaaaatggtaaatgtgtggaccaaaag

SEQ ID NO: 8035 - DNA, 1647 bp, Oryza sativa
  Clone ID: PAT_MRT4530_14577C.1
atgtcggccttagggggaaaggacgggaaaattggaaatgaagatggagcgagcagcaaaggaactccatcacccaaggttgccactataccttttgattacagcaaacttaccattccctctcacaacttcgtctccgtgccttccgggcgtgctcctcaatttgatgggacacattacgctgcttggaagcacaagatgaagttgcatataatctctttgcatccaagtatttggaaagttgtgtgtacaggtattgacgtaccttatgaggacatggagctcacttcggagcaagaacaactcatccaccacaatgctcaagcttccaatgcaattctctccgccttgagtccggaggagttcaacaaggttgatggactagaggaggccaaagagatatgggatactttgcaattggctcatgagggatcacccgccgttcgtgaggccaagattgaattattggaaggaaggctaggaagatttgtgatggatgacaaggagacgccacaagagatgtatgataggatgatgatccttgtcaacaagattaaagaacttgggagtgaggacatgacaaatcactttgttgtcaagagatttctccgtgcttttggtctaagaaatcccactcttgtatcaatgatatgggaaaggaaagacttcaagaggctcaccccaagtgacattcttggaagaattgtgtctcatgagatgcaagaagaggaagctcgtgaagcaaaacaagaagaagagtcaagtggagaagaaagtgaagatgaagaaatggcttttattgtcaagagattcaagcactttcttcgcaagagtggctatggcaaagggaggaaggatgatgacaagggaaagaggcaatcaaagatagcgtgcttcaattgtggcgaatttggccatttcattgccgattgtcccaagtcaaatgaagctaaggctaagggaggcaagaagaagccggagcgtgctcatgtggcggaggcacacatggcagaagtgtggtcctccggagatgaagaagatcccgaagtcaagcccaagcccaagtcaaaagacaaggttgaaggagaaggtggtgttgctaccgtcgccttcaagtcatcctcttcaagcaaggagcgtcttttcaacaacttgagtgatgacgacaacgactcctaccactactcttgcttcatggcccaaggccgcaaggtgatgactcaaaagccctctcacacttctcttgatgtttattctagtaatgaggaaagtgataatgaattagatgatgtgcttaagagttttagcaaacccgctatgcaacatttggctaagttaatgagagctttagatagtaaagaacaattactcgaaaggcaagaagaattgcttattctggagaagaaaagaaaccttgccttagaggagagcttagctaaagaatgtgctaaaaatgaacaactagctaatgagcttaatttggctaatggttctttagctagccttagagatgtcaatgagactcttcaagagaaatttgcttgtttggacaaaagtcataaagatcttgaagttcaatttgacactctttggaatagtacctctcaaccaaatgtggttatgttaggtgttacaatattgatttga

SEQ ID NO: 8036 - DNA, 739 bp, Oryza sativa
  Clone ID: PAT_MRT4530_14578C.1
atggaccttctgggagttagttatgtgagcaacccccggggtctagtatccaaagttgccaaacatgtgtacaagctccacaaggcactctacgggctcaaacaagcccctagagcttggtatgaatgtctccgagattttcttttgaaaaatggctttgaaattggaaaggcggatactactctcttcactaaaaaatttaagagtgatttatacatatgccaaatttatgtcgatgacataatatttggttctactaatgcctctttttgtgaagaatttagtagtatcatgactaaaaggttcgagatgtctatgatgggcaagttgaccttcttcctcgggcttcaagtgaagcaagcacaagagggcaccttcatctctcaaaccaagtacgtgaaagacatactcaagaagtttgggatggaggatgccaaacctatcaagacacccatgcctactaatggccacctagacctcgatgataatggtaaatgtgtggaccaaaaggtatatcgctccatgataggatctttgctttacttatgtgcatctcgtccggatatcatgcttagtgtttgcatgtgtgctcgctttcaagtggagcctaaagagtgtcatttgattgtcgtcaagagaattctaagatatttagttcacactcctaatcatggcttgtgttattctaagggttgtggctttgagcttttgggctatttcgaatcggatattgccggtg

SEQ ID NO: 8037 - DNA, 3237 bp, Oryza sativa
  Clone ID: PAT_MRT4530_14579C.1
atggcggaagtgtggtactccgaagatgaagaagcctccgaggccaagcccaagcccaagccaaaagacaaggttgaaggagagggtggtgttgctaccgtcgccttcaagtcatcttcttcaagcaaggagcgtctcttcaacaacttgagtgatgacaacgacgactcctaccaatactcttgcttcatggctcaaggccgcaaggcatactcctccggtggttcaagttgggttgtggatagtggttgcaccaatcatatgactggagagaggagtatgtttacaagtcttgatgaggagaacaaaactcatgagaatattgtatttggagatgatggtaaaggaaagggggaacacatcctcgggctcactaatgtcacatttgagaaagatcgtgtgtgtagtgctttccaagccgggaaacaagttgggaatctacatcctatcaagaacatcatgactacaacacgccctcttgagcttctacatatggatttattcgggcccgtggcttacataagtgaggctcaagatgtcttcaagcgcttcgccaagcaagcccaaaacctctatgatctcaccatcaagagggtgcgaagtgacaatggaagagaattcaagaacactcaagtggaggaattccttgatgaagagggaatcaagcacgagttctccgccccctatgatcctcctcaaaatggcatcgttgagaggaagaaccaaactcttattgaagccgcaagagcaatgcttgatgagtacaagacttcggatatcttttgggcggaggccgtgagtaccgcatgtcatgccatcaaccgcttgtacctccacaagatcctaaagaaaacttcatatgagctcttgagtgtcactagggatgtgacatttgatgaatctaatggctcccaaggagagcaagttgttgtacatgtttcgagacgtaggatgaccaagaagatagggaccaaccttcgtcatcgacatccaatagccctacatcaagtcaagagtctgttgactcggaagttccgggaccagatgatcggaacctccggacctctccaggccaggaagttccgggtccatctgccaggaatttccgggcagaggacagtcaaggcgtgcctacggcacaaggttgaagatgcacttggtgatccggattgggtgatggctatgcaagaggagttgaataacttcactcgcaaccaagtatggacattggtggagagacccgaccaaaatgtcatcggcatcaagtggatcttccgcaacaagcaagacgaacatggagtggttgtaaggaacaaagcccggttagttgcgcaaggattcacccaagtcgagggtcttgattttgatgtcaagagtgcctttctcaatggacctatctcggagttggtctatgtggagcaaccaccggggttcgaggatccaaagttgccaaaccatgtgtacaagctccacaaggcactctacgggctcaaacaagcccctagagcttggtttgagatgtctatgatgggcgagttgaccttcttccttgggctacaagtgaagcaagcacaagagggcactttcatctctcaaaccaagtacgtgaaggacattctcaagaagtttatgatggaagatgccaaacccatcaagactcctatgcctactaatagccacctagacctcgacgataatggccgaaagttccgggcctccctgtccggaacctccggtgatgagagtcctcctattcggtttcctcgtggtcgtttgggtaaagagaaagtggttgagggcggcagtggcagcggcactcgtacttctcctaggttcaccaggcaatccaacaaccgtccagttcatattcgggatgttgacagtggtcaaggaagtgatgctcctaatacaagaggttgtgggagaggtggtggtcacagttgtggggctggaagggcctctcatgatttcccgataggatctcgtgagaatcccgttcgactctacaagtctcttggatttgacaccactcctatgcaccacattggaagacccaagtccaactaccttcatcagcttgccaagtgcagaagggaccgtttgattgatccagagacacagcctgaggagtcacaggatcctcgttttaggacgttcacccaattggattggtataactcagtgattatagctagagacaatccaatggttgagatgaagtggattgattggacttacataaggaagaagaacaatgaagtgttcaaccaagcaatgcaagtttgtcacaacaagaatcttggagatattcttgccttggagtatgattggaatgaggaggtcattgcacaattctatgcgacagcattgtttggtactactaggaagggaactccttatgtaaagtggatgactgagggtgttaggcacaaaatttccatagcacagtttgctaagatattgggcttagaggatgaggatctcaatagccctaatattcatagtgaagcacccctccccatgatcaagactaagttcatgtatactaaggatgctcctcggacttgtatgggaactactcatggtttgcattcaaactacaaggtgctgtactccatctttcgttggtctctgcttccaaaggttggagatgctactgctttgccatccaagcatgctcatcttctcagtcgcatgcgctacaatcagcctcctttcagtgtgatgaagtttatttggtatgagattgccaacaccattcttgagcctaagcgaggttgcatttatgctcctttcattatgaagatgattgagacagtcaccggagtgttctacatcaaagatgggcgccacaatccttttcatcctcgtgttccaccttcctcttatccagtgatacctagatccatcccttctacctcagctggtccttcttctagtgccccaccgcaatcctcgagctcttctcccatcaagaaggcacttcaggcgatcttctatgaggtctatgtggatccttttgaggcttatgaggcagcccgcaatgttgccggtgaaggtccatccacctatttcaatgaagagtcttcccgatcagatgatgatgaggaggaggatgacgccgaggcagctgctgagaatgctcccactgatgttgacaccgctgcacagtccgatgagtctcatctctccggtgataccgagattgttccctccgatggaaatgaagatgagtga

SEQ ID NO: 8038 - DNA, 324 bp, Oryza sativa
  Clone ID: PAT_MRT4530_1457C.1
atacagctcaacatgaaagcaagaactcgtcgaaataaaacaaaagcaaaaggatggcgatgcgccgaaattgtattgaacgtgactctatccacgtgcggtaatcatcttgaagcatatcaactcaacccgatgttgtacaccaagtcgtattgtcggaatccgttgcatcggcttacctagtccgattcggacccagccaatcctaatcgtagccgatctggactccagccgattcttgctctgttctcgaatcgatctccgcttcgactccacttcgatataatcttcttttccgatgcttatattaccaaatttggtcgt

SEQ ID NO: 8039 - DNA, 399 bp, Oryza sativa
  Clone ID: PAT_MRT4530_14580C.1
atgccgtcggcgaacgacgattctttggccgacacaaccacaagaagaaatgctgagaacttccttgcgatcctgttgaaggtggtctcatcgccggaggtggccggaatcgatgccagtggtgtcgcgaatggcggtggtcttcgcagcaatggaaaagacagcccggcggtggtggataacgtcggcttcacggcgacggctcgcttgggtggtggaatgcttagagaaggtgcatggatgtggataaaacgagatggggtcaaaaggagatttgctcggcatgatgtgggaagtatggaacgggaaagatttggagatggagacgactcgtcggcaacagcgagcgtcgtcttcttcgcgaccgacgacgagaatgtgggcgacggagaggcatag

SEQ ID NO: 8040 - DNA, 6150 bp, Oryza sativa
  Clone ID: PAT_MRT4530_14581C.1
atgttggacttagggggaaaggacggggaaattggaaatgaagatggagcgagcagcaagggaactccatctcccaagggagccactataccttttgattacaggaaacttaccattccctctcacaactttgtctccgtaccttccgggcgtgctcctcaatttgatgggacacattacgccgcttggaagcacaagatgaagttgcatctaatctctttgcatccaagtatttggaaagttgtgtgtacaggtattgacgtacctcatgaggacatggagctcacttcggagaaagaacaactcatccaccgcaatgctcaagcttccaatgcaattctctccgccttgagtccggaggaattcgacaagggatcacccgccgttcgtgaggcaaagattgaattattggaaggaaggctaggaagatttgtgatggatgacaacgagacaccacaagagatgtatgataggatgatgatccttgtcaacaagattaaaggacttgggagtgaggacatgacaaatcactttgttgtcaagagacttctccgtgcttttggtccaagaaatcccactcttgtttcaatgatacaggaaaggaaagacttcaagaggctcaccccaagtgacattcttggaagaattgtgtctcataagatgcaagaagaggaagctcgtgaagtgagacaaatggtgaagaatgccgccatgatcaaaaatcaagaagttgctttgaaggcaaaacaagaagaagagtcaagtggtgaagaaagtgaagatgaagaaatggcttttattgtcaagagattcaagcactttcttcgcaagagtggctatggcaaagggaggaaggttgatgacaagggaaagaggcaatcaaagagagcgtgcttcaattgtggcgaatttggccatttcattgccgattgtcccaagtcaaatgaagctaaggctaagggaggcaagaagaagctggaacgtgctcatgtggcggaggcacacatggcggaagtgtggtactccggagatgaagaagatcccgaagtcaagcccaagcccaagtcaaaagacaaggttgaaggagaaggtggtgttgctactgtcaccttcaagtcatcctcttcaagcaaggagcgtctcttcaacaacttgagtgatgacgacgacgactcctaccactactcttgcttcatggcccaaggccgcaaggtgatgactcaaaagccctctcacacttctcttgatgttgagtctagtgatgaggaaagtgataatgaattagatgatgtgcttaagagctttagcaaacccgctatgcaacacttggctaagttaatgagagctttggatagtacagaacaattactcgtaagacaagaagaattgcttattcttgagaagaaaagaaatcttgccttagaggagagcttagctaaagaaagtgctaaaaataaacaactagctaatgagcttaattttgctaatggttctttagctagccttagagatgtcaatgagactcttcaagagaaatttgcttgtttagacaaaagtcataaagttcaaattgacactctttggaatagtacctctcaaccaaatgtggtttctaattcctctaacccttctactagcaatggttgtgctaggtgttacaatattgatttgaactcttatgctactaatattgttgctatgcaagctcttaagaaagagaatgaaaggttgggcacattggtgaaatatggatgcatgaagacataccattcaaaagatgccctttacaagaccatcaccgctcatcctaacaaggatggacacgggctcgggttttcgggtggaagtcctgtgtctaagcgtgtgatggtaaatggaaaagaatgcttgatgtttgtgagagaaggaaaagcaccacaagcaagtgaggtgactaatcttgtgagcagccagggacccggaacatccggacaaaccggccaaaacctccgggtgggagtttctgtctctcaaaaattcccaccaggaagttccggccagtttgccaggaagttccgggccaatggtcgtgcacaagacataaccggaagttccgagcataatgctaggaggttctggccagatggtctttactatgattcatatgtaattttcaaaaattcagagggcaaagtggttgcttattttaatgggaattacaatgatgaatatcgcacttgtgtgtgggtgccaaaggctttggcatactcctccggtggttcaagttgggttgtggacagtggttgcaccaatcatatgactggagagaggagtatgtttacaagtcttgatgaggagaacggaactcgtgagaatattgtgtttggagatgatggtaaaggaaagttgggttacaattgcttgtttaccgatgaggatgtgaccgtctttagaagggatgactcctccgtagcattcaaaggcaagttaaagggtgatctctatcttgtcgatttcgatgtggatagagtgaatccggaagcttgtttgattgctaaatcctccatgggttggctatggcatcgtagactagcccatgttggaatgcggaatttggcaactcttctaaagggggaacacatcctcaggctcactaatgtcacatttgagaaagatcgtgtgtgtagtgcttgccaggccgggaaacaagttgggaatccacatcctatcaagaacatcatgactacaacacgtcctcttgagcttctacatatggatttattcgggcccatggtgtacataagtattggaggtaacaagtatgattttttcattgttgatgatttttcccgcttcacttgggtgtattttctccatgacaagagtgaggctcaagatgtcttcaagcgcttcgccaagcaagcccaaaacctctatgatctcaccatcaagagggtgcgaagcgacaatggaggagaattcaagaacactcaagtggaggaattccttgatgaagtgggaatcaagcatgagttctccgccccatatgatcctcctcaaaatggcattgttgagaggaagaaccgaactcttattgaagccgcaagatcaatgcttgatgagtacaagacttcggatattttttgggcggaggccgtgagtaccgcatgtcatgccatcaaccgcttgtacctccacaagatcttaaagaaaacttcatatgagctcttgagtggtaagaaacctaatgtttcatattttcgtgtctttgggagcaaatgctttattttgagtaagagacctcgctcatctaagttttcacctaaggtggatgagggattcttacttggctatgaatcaaatgcacatgcctatcgtgtcttcaacaaaacctccggtattgttgaagtcactagggatgtgacatttgatgaatctaatggcttccaaggagagcaagttgttgtacatgttgtaagtgacgtggatccaagtcaagctataggtactaaggctattggagacatacgaccagtcgagacgcaggatgaccaagaagacagggatcaaccttcgtcatcgacatccaatagccctaaattgagtcaagtgtcagtcgacccggaagttccgggaccagatggtcggaacctccggacctctccaggccaggaagttccgggtccatctgccaggaagttccgggcagaggacagtcaaggcgtgcctatggcacaagtggatgggattgatgccgagggcactgtagagcatcctgatcaggctcaggtcccctcggtgcaccatccaagaatacatcacactgtccaaagagatcatcccgtcgacaacatacttggtgacataagaaagggggtaactactcgttctcgtgtcgctagcttttgtcaacactattcgtttgtctcttctttggaatcaaccagggttgaagatgcacttggtgatccggattgggtgatggctatgttattccaaatggatgtcaagagtgcctttctcaatggacctatctcggagttggtctttgtggagcaaccaccggggttcgaggatccaaagttgccaaatcatgtgtacaagctccacaaggcgctctacgggctcaaacaagcccctagggcttggtatgaatgtctccgagattttcttttgaaaaatggttttgaaattggaaaggcggatactactctcttcactaaaaaatttaagagtgatttattcatatgccaaatttatgtcgatgacataatatttggttctactaatgcctctttttgtgaagaatttagtagtatcatgactaaaaggttcgagatgtctatgatgggtgagttgaccttcttccttgggctacaagtgaaacaagctcaagagggtactttcatctctcaaaccaagtacgtgaaggacattctcaagaagtttgggatggaagatgccaaacccatcaagacgcccatgcctactaatggccacctagacctcgacgataatggtaaatgtgtggaccaaaaggatgtgtccggtgatgagagtcctcctattcgttttcctcgtggtcgtttgggaaaagagaaagtggttgaaggtggcagtggcagcggcactcgtacctctcccaggtttagaaggcaaaccagcaatcgcccagttcaaattcgagatgttgacagtggtcagggtagtgatgctccttcttcaagaggtcgtgggagaggtggtggtcgctcttctggggctggaagggcttctcatgatttccctgttgggtctcgtgagaatctcgttcggctctacaagactattggttttgacaccactcctatgcaccacattgggagacccaagtccaactaccttcatcagcttgccaagtgccgaaggggccgattgattgatccagagacacagcctgaggagtcacaggatccacgtttcagaaccttaactcagttggattggtacaactcagtgattatggctagagacaatctagtggttgagatgaagtggattgattggacttacatgaggaagaaaaacaatgaagtgttcaatcaagcaatgcaagtttgccacaacaagaatcttggggatattcttgccttggagtatgattggaatgaggaggtcattgcacagttctatgcgacagctttctttggttctacaaggaagggaactccttatgtaaaatggatgactgagggtgttaggcacaagatttccatagcacagtttgctgagatattgggcttggaggatgaggatctcaataggcctaatattcatagtgaagcacccctccccttgatcaagaccaagttcatgtatactaagaatgctcctagaacttgtatgggacctactcatggtttgcatccaaactacaaggtgttgtactccatctttcgttggtctttgcttccaaaggttggagatgccactgctttgccttccaaacatgctcatcttctcagtcgcatgcgctacaatcagcctcctttcagtgtgaagttgatttggtatgagattgccaacaccattcttgagcctaagcgaggttgcatctatgctccattcattatgaagatgattgagtcagtcaccggggtgttctacatcaaagatgggcgccacaatccttttcgtcctcgtgttccaccatcctcttcttcagtggcacctagatccatcccctctacctcggctggtccttcttctagtgctccaccgccatcctcgagctcttctcccatcaagaaggcacttcaggcaatcttctgtatgtgtgctaagactgcaaagaaagtgaagaagatagaaaggcgtcagaaggaagatagaagagaggctgggaaagaagtgtcagatgattctgaagatgaggtctatgtggatccttttgaggcttatgaggcagcccgtaatgttgccggtgaaggtccatccacctatttcaatgaagagtcttcccaatcagatgatgatgatgatgatgatgatgatgaggatgacattgacgcagctgctgagtatgttcctactgatgttgaggaagctgttgacaccgctgcacaatccgatgagtctcatctctccggcgataccgagattgttccctcagatggagatggagatgagtga

SEQ ID NO: 8041 - DNA, 494 bp, Oryza sativa
  Clone ID: PAT_MRT4530_14582C.1
gcacgaggtggtgtactacttgtagttggaacagaagatggaaagggacacaatttgctaggtgcaggaaacaaccttcaaatcttagtccaaccagttgttttgaatcagcttactggtacaagaaaaatgaccaacaggagtaacaaaacaactaaacaagtatccagagttttaggaagtgcttgtgaatcttcatgcatattactactggtatttgtgggtttatgtataaatagaacaacagaaagttataaattttgttgcaaaatggggagtccttattcgatcttcccatttttttctctttgataatgctggtgcttgtcaatttcagaatgaacttattactggtgactattaatcaggaatcatgtggaaatacgttttcaattcaaaattccaattgtaattcaggattgtgatgcttgtggaattaaggtggtgaatctggaatctttttagcataataactactattcatcattcttttc

SEQ ID NO: 8042 - DNA, 242 bp, Oryza sativa
  Clone ID: PAT_MRT4530_14583C.1
cgtctagaatagtggatcccgggctgaggaatcggacgaggaaccccaaaaaatctcaagcatataccacttgacacttaattgagagagagagagagaggagagataagagagcaacacaaagcagagagtccagagagatagagagggactgggagaaataaataaaagaggacaataacaagcaagagtggagatagagagagggagagagaaagacaagtgaagtctaaagagaggag

SEQ ID NO: 8043 - DNA, 2005 bp, Oryza sativa
  Clone ID: PAT_MRT4530_14584C.1
ttactcatactcgctctggctccattgtttgatatgaatctgaacagaggacattccactattcacaaagaagttgaccacgtcgttgaccaggggatcatcctccaagcatatgacttcaacactcgtaaggtgctcacatgtaaatgatctttcttcaatctggccaatgattctttgtaattttcctgtacgatacattgcgagttctagggttagcttctccaatattggtgagttctgaaggaagacgattagtccatagaagttggcatccagacaccatggaccgagagtcagactgacaagattgatgaatttcggacacaattgcaaattattttccattgtcagcttcttcccgtgataactgaaatccaaaatttcaacattataaaggctccagagatagtcgcggagatcattagcagcaaaatcgtcgtctttcacatgacaaagcagcatcgacgtgctcactagtgcttccatgtcattcagtacaggtttgccactcataggatagtgcaaggccagagaagtaatactcggacttgaaatggaagtcttgaagccacagcagaaatgagtggcatcgagggtcaaaaccttcagtgtctgggaggagatctcatcatccacaatgaaacattcatccaagaagagctcttccaattctggacaccccatctcgagttgcttgaagaaaccttggttcatcacgacattgctgaagtccattgtcctcaggtagcgcgatgaaaacaccgagtgatcgagctccaatgcgtaggacagcacggaaacctccagaatccggacattcttctgcagagcgtagctgatccatctgttcccttctgctgagccatcatcgcctccatccgatctgcagaatctgaggaagaacgatcgaatcgaggcattgggatcacggagctccagcagccggttgacgaacctgttgaacaccacctcgtcctccgctacggccgcttcgtccacctcgtcgtcgtcgctggtccagttcagagtgaagtcgcagaaatcggcgtggacgcggggaacggtgcgccagacgtcgcgccaccgccgcgacagcacgcacgtccgcacggcctggcgcgagtccaggaacgacatgacgcggtggaggacaccctcggggaggtcgctgagccggtcctccctgccgccggcgtgcgccggggccatgacccgccacccactcttgacaggcggcgcctccatggcgcgggctggaagccgagcacgtcgcagaggcgtttcgtcgaacaggtagtgcgcgtgcgtggaagctccacttccagacgggcacccgcccgctccggccgccggcctggcctgccacggtagcgcctacgtgtcagtggggacccacatgtcagtcacagctgctgctgcagagtttgccggccggcgttccttcacgacgatgccgtcggcgaacgacgattctttggccgacacaaccacaagaagaaatgctgagaacttccttgcgatcctgttgaaggtggtctcatcgccggaggtggccggaatcgatgccagtggtgtcgcgaatggcggtggtgctcactggaacttgattgcggcatggcgtctgggtaacagcagcaatggaaaagacagcccggcggtggtggataacgtcggcttcacggcgacggctcgcttgggtggtggaatgcttagagaaggcgatgactttggcgcgatggcttggcttgagatggaccatgtcggccggaacagcgacgacgtcatggcggcggcgcccggtgcgagttctggagctctcgtgggcaaggtcgcgtttccgttgctgcagtggataaaacgagatggggtcaaaaggagatttgctcggcatgatgtgggaagtatggaacgggaaagatttggagatggagacgactcgtcggcaacagcgagcgtcgtcttcttcgcgaccgacgacgagaatgtgggcgacggagaggca

SEQ ID NO: 8044 - DNA, 582 bp, Oryza sativa
  Clone ID: PAT_MRT4530_14585C.1
ctacggcatcttagactagcccatgttggaatgcggaatttggcaacccttctaaagggggaacacatcctcaggctcactaatgtcacatttgagaaagatcgtttgtgtagtgcttgccaagccgggaaacaagttgggaatccacatcctatcaagaacatcatgactacaacacgccctcttgagctttttcgtatggatctattcgggcctgtggcctacataagtattggaggtaacaagtatggttttgtcattgttgatgatttttcccgcttcacttgggtgtattttctccatgacaagagtgaagcacaagatgtcttcaagcacttcgccaagcaagcccaaaatctttatgatttcactatcaagagggtgcgaagtgacaatggaggagaattcaagaacactcaagtagaggaattccttgatgaagagggaatcaagcacgagttctctgccccttatgatcctcctcaaaatggcatcgttgagaggaagaaccgaactcttattgaagccgcaagagcgatgcttgatgagtataagacttcggatatcttttgggcggaggcc

SEQ ID NO: 8045 - DNA, 1036 bp, Oryza sativa
  Clone ID: PAT_MRT4530_14586C.1
acaattattgtaaaaacaaaacagataggttcagccttgaaccgaaaagtttatttgagaacacaactcataagaaaaacgaccggaacccggcggcggggagccacggccgcgagacctggtgcggcggcggcagcggcgccgccgcgaggggggcagaccgggaggcggacgcggccgggcggaggaagggggaggcggaggtggaggcggcggcgagggctcgccggagtcgcagcgcgagggccatggcggcgagggctagggtttgggcggcgcggggtggaggagagaggagaagcttctagtagtctaggggtttattgcggaatgtccaaacgggcaccgacccgctccatccgctgacatggcatgccacggtagcgcctacgtgtcagtggggactcacatggagaaagcagcagcagccgcagagttcgccggccggcgttccttcacgacgatgccgttggcgaacggcgattcttcggccgacacaaccacaagaagaaatgctgaggacttccttgcgatcctgttgaaggtggtctcgtcgccggaggtggccggaatcgatgccagtggtgtcgcgagcggcggtggtcttcagtccctgggtgctcactggaacttgattgcggcatggcgaggtctgggtaacagcggcaatggaaaagacagcccggcggtggtggataacgtcggcttcacggcgacggctcgcttgagcggtggaatgcttagagaaggcgatgactttggcgcgatggcttggcttgagatggaccatgtcggtcggaacagcgacgacatcatggcggcggcgcctggtgcgagttccggagctctcgtgggcaaggtcgcatttccgttgctgcagtggataaaacgagatggggtcaaaatgagatttgctcggcatgatgtgggaagtttggaacgggaaagatttgacgatggagacgactcgtcggcaacagcaagcgtcatcttcttcgcgatcgacgacgagaatgtgggcgacggagaggcatag

SEQ ID NO: 8046 - DNA, 357 bp, Oryza sativa
  Clone ID: PAT_MRT4530_14587C.1
atggccgcggccacgacgagcagccgccccctcggcatggggatggatggcggcgggggcgggcggagggcggacgtggacggcggacacggagaccctcctgcaccggagggagttcgccggagctccttcctggagttcgccgctccctcctctctgtcccgcactgtcgccgcctccacgttctgcatcgccgcttcttcctcgtccccggccgccgccgcctccatccggacacgcaggggcggtcggcccgggaatgggcggggttgcggcggcgcactgggggtgggcggtcagcgcggggacggacggtgggcggcgacacgcacggcgcgcccttgcctcgcccgctag

SEQ ID NO: 8047 - DNA, 1592 bp, Oryza sativa
  Clone ID: PAT_MRT4530_14588C.1
tcactttctgtctaatgattttgagcagttagcaatcttgaccacaccaaaaatatcaatgttcttatatactgtgtcaattaaggttcttccaataaatatgtacccaaaaaaaaaacatttttcccttccttgacaaggattggcaaactcttccttcttcatagctgaacactgaatttcattgtttttgaaggaacgacattgaatttcatcacttgtataaaacagtgaggagctgttcctgggctccctcgacttgctcttaatcaacttgatcttctcgagagcctcaacgacttccttcatggatggtcggctcttgggatcaccagacagacacttgagagtgagctgagcagcttggagggctcccctggaatgatactgcccctcaagacgactgtccatcagctggctcagcttcctccggtcagccagtaacggttttgcccagtctaccaagttcagcttcccactggggcggcttgggtccagcgccctcaggccagagagcatctcaagcagcacgacgccgaagccatacacatcactcttcacatacaggtggccggtagcaacatactctggagccgcatagccataagtacccatcactcgtgttgtcacatgggacaatccaccgtctggaccatgcttggccaacccaaagtctgagagctttgcattgaagttcgaatctagtaagatgttggaagccttgaagtccctgtagatgatctgtctctctgatgaatgaaggaaggcaaggccacgagctgcaccaatgagaatcttcagtctgaggctccaaggcagtggctcgtaaactgctcctctgcggaacagatgattctccaaactcccctttgccatgaactcgtacacaagaagtagttcgtcattatccttgcaatagcccaagagtttgacaaggttggggtgtgaaatcctcccaaggaaattcacttcagactcccattgctccgttccctgtacactctcagggttgagcttcttgacagcaaccaccacaccggtgctactcttggatggattcatggtcctctcatcaacccatcccttgtaaaccttcccaaatccaccctccccaagaactgtatcagtcctgaaattcttggtagcattcttgagttcagcaaaggtgaagatcctgagatttcgggactcaagaatctggccgtctggataagcatcgtcagtgcttacaccgctaatggtggatggaatgaaagtactgttactaagtgttgacagcttcccggtggtggtggagctagtagtcctcttggatgcagacattcctggggcagcatcgtcatcgtcgttctcgttattggcccttttggtgaagaagaaggaatctatggcgctggcgcagttgcccatggccttgctttccccggttgagaggaaggagaagatcgagtcaagcgggggagactatcctcctatcctatcgacttcgattagagaacgcgcgcgcgcaacaaggaagacgatcgagagccctcctctctctctctctctctcagctcaaatctctcaagagcgaagaagaggaagccaaa

SEQ ID NO: 8048 - DNA, 255 bp, Oryza sativa
  Clone ID: PAT_MRT4530_14589C.1
atgatgaagcccattaacagcggcggagtccgccaatcgtataggcaaaagcaccagtcggcggtggaagcaagccggtcggtgaaagcgaagacgcccatcaacgatggagcgggagacggcggcgacattgaccccttggctcctaacagcgggagccgatcatccgccagatctgagcgctggacggtggtgctcaagtggagaggtaggctagagctggccatcccagcgccgataaggacgacgacgtga

SEQ ID NO: 8049 - DNA, 1218 bp, Oryza sativa
  Clone ID: PAT_MRT4530_1458C.1
gaaccgtcagaaaaattggtctttgaagccaaaataataataataaaaacagaataaatgcaatgctaatggcattttcgaccagtacatcaaaatttaagattccaaagcttacatgaatatccatcaaatatcactatcaacgaattctttcaaactcaaattagtaaatacgcagaggattaattcgtaagaaaaaaattcagtgttaattagttttcacttccaaaaattcatcaattaagtagggagagaacggagggagaggtaaaaatattataagtaaataagttgaaaaaaatcgatcagctagaagttcttcttggcctggtaggtgttgtcgtaggtccagtcgcggggggcgacgcgccaggaggtggccttgcggtggtcgccggtcatgacccggaaggtgagcgactcgccggtgaggttggcctccgtcttccagagctggccccagctgcgctgcagcggcgtccacttcacccgcttggtccccttcaccgtcagcttcaccacgtcccccgcgccgcccacgttcttcaccatcaccatgttgtacgacgggttccccgttatcgtgtactttatcccgccctgcctcacgcacgccacctttcggtaggagacgggcacgacgccgagcttctcctcggcgatggagaggaacgccggcatggtgaggtcgaagtgctcgcccttcatcccgttcactggcggcggcgcctggttggtggccgtcaccacgacggtcttcccggaatcccccttgagctcgtagcacgcgccgcacccggcgccgttgtcgaacagggcggggctcaccgccgccgtcatcgcgccgtacccgtcggcgtccttgtacccgcacgcgccgccctccgtcgtgcccgacgcgtcgcgcccgccgtagaacgtcgcgtgcccgtccacccacggcccgcacttgtacctgccgtggttcacgtgcggcatcttggctccgccgccgccgccgccgccttcgccgtcgccgccgccgccgccttcgccgtcgccgccgccgtcgtagccgccgccgccgccgccgccgcccgcgacgacgacgtcggcggcgaacgacgacgcgaggaagaagaagagcagcagagacgtcgtggtgaggagagggagaggcgccatggtcgtcgttgtgtccatgaaattaaccggagaagatcgcggacgctgggtcga

SEQ ID NO: 8050 - DNA, 149 bp, Oryza sativa
  Clone ID: PAT_MRT4530_14590C.1
tactcataacggactaccggaccgcgagctagacttacctcactacgaggtgggacggtattctaaagctgctggaatcccagcttgttccctcaaacagaggggctgcgtccacaggttcctacctcaaaatgaaaggtgactactac

SEQ ID NO: 8051 - DNA, 252 bp, Oryza sativa
  Clone ID: PAT_MRT4530_14591C.1
atggcggcgcccagcttggacatggacatggacatggcagcgcatgtactcggcgaggaagaagcatcgcatgagcaaattgtgatggaacacagagaattcagggaagccgaaggtgaagaaaccggcctcttcggaaaatcagcttttgctgctctgaaagccgccacaattgaaatctgctacctgcctctgaaggcggcatctcggaatacgccttcttggacggacagtgcaagaagagatttgtga

SEQ ID NO: 8052 - DNA, 182 bp, Oryza sativa
  Clone ID: PAT_MRT4530_14592C.1
atggcgtggccgcagctagcatgccagatcacggggtcttctcccccaaatctcacgtgccagtcgctgccgcgagatggacgcaacggcgtcatcctcctgctcctcgccggcggcggctgcggccgcggatgcctcgtcgtcggctcacctgcttcttcaggaacgctcgccatatcagc

SEQ ID NO: 8053 - DNA, 1477 bp, Oryza sativa
  Clone ID: PAT_MRT4530_14593C.1
ggctgcgcccagccctcctcggcgtcgcccgcgccgccgcgtcgtcccgccggcggcggatctcctgcccgcgtggccggtcgcggccatgtcgtcgtcgtcgtcgtcttcggcggcggccgcgcacaaggccggggcgtggtacgcggtgcccgacctcagcctccgcgaccaccggttcgccgtcccgctcgaccactcctccccctccccgtccgcccccaccatcaccgtcttcgcccgcgaggtcgtcgccgctggaaaagaggacttgcctttgccttatttgttgtttctacaaggcggacctggatttgaaagtccccgtcccacagaagcaagtggatggatgaagaaagcatgtgaagaataccgtgttgtgttgctagatcagcgaggaacaggactgtcaacaccgttgacaacatcatctctttcccaaataacatctgcagcagaacaggtggagtatttgaagcatttcagggcagatagcatagttaaagatgcggaatttattcgcctgcatcttgttccagatgccaagccttggacggttttaggacaaagttatggtggattttgtgctgttacctatttgagttttgctccagaaggcctgaaatctgttcttttgactggggggcttccacctctagggagtgcctgtactgcagatactgtgtacagggcctgctttaaacaagttcagcagcaaaatgagaagtactatgcgagatatcctcaagatatacaagtcattcatgagcttgtaagatatttaaatgaatctgaaggtggaggagtttctcttccatcaggtggcaggttaactcctaagatgttgcagtgccttggattatctggtttgggctccggtggaggatttgaaaggctgcattatctgtttgagagggtgtgggaccctatattagtccctggcgcaaaaaagactataagttattacttcctgaaagagtttgagaggtggttaggttttgatcaaaatcctctttatgctctcttgcatgagtctatctattgtcagggttctccatcaaaatggtcggctcacaagattggcagtgagtgtgaaagtttgtttgatcctatcaaggctataaaagaaggcagacctgtttattttactggagagatggtatttccatgtatttttgatgagattcacgccttacgacccctgaaggagactgcccatatgttagcgcacaaagaggactggcccccactgtatgatgtcaacgtgctgaacaacaataaggtcccggtggctgccgccgtctactacgaggacatgtacgtcaacttcaacatcgccaaggagacggcctcccagatcgcgggcatccggctctggattaccaacgagtacatgcactcgggcatccgcgacggcggctcgcacgtcttcgaccacttgatgggtcttctcaacggcaagaagcctctgttttag

SEQ ID NO: 8054 - DNA, 268 bp, Oryza sativa
  Clone ID: PAT_MRT4530_14594C.1
aagctttttttttttatgaaacaatggctttataacaacaataattaatgctgtacttttcctttgttgaaaataagcttgtaaaatccagctccagtcaatgcaagggatgtaaagaacatagcggttgcaacacgattaatattagcatcagcaagttttctcatgtgcataggaacttctgggtgcgattgaacaaaagattggaactcgtggctaaactttttaacggaaactaatttgccaaactctatcatggtgcaagctt

SEQ ID NO: 8055 - DNA, 711 bp, Oryza sativa
  Clone ID: PAT_MRT4530_14595C.1
atgatcgatcgatatcccctgtgtcaccaagttttttctatggtatccatgaagaaaataattaactcaaacattcggccggatttgacggagaagatcagctccagcatcgtatgggtacgggactatcttcgggaggttgaaggcggtagtcggctattcgagatgggcagaaggaggaaggtcaagcagagggaggaaacagagctaggcgcaatttcgaagctacggggtagaacgactcgactacggatcttgacgtatgcggacaatgtcgtcatcttcattaatcccacccaaggcgatgtaaaagctttcgcggacattttggaccgctttgtaaccaaccttcagaaatcctcagtagcggccatcagatgtgatagcattgacttgacgggtgtccttgatggtgttccagcgatgagggcaaatttccctctaaaatacctagggcttcccctagtacgtgggaggttgcggaagatgaacttgcagcctgttttcgacaaaatctcagggagggtagcaggaggggaaaaaacctgggtcagctgggagaaccacgctcgtcaaatttgtgctttcgacacaaccaatctacctccattttcacatgcaaaaatcgacctccattttcacatgtggctccttaagaggtatgcatgcaaaaatcgattttcgcatgcagacctattaagtggatgcatg

SEQ ID NO: 8056 - DNA, 3576 bp, Oryza sativa
  Clone ID: PAT_MRT4530_14596C.1
atggaactaggcgcttgcactgatgagctccttgacattatcaagcctctgtgtattatcatatacactctggtcacagtatgcgggtacaaaagcgtcatcaagttcttccctcatcaagtttcagatctagagcctgcagttgctctccttgaggagtgtcataaaatgagctcagcaacagctcttaggcaggagagcacaggagaaatggagactaagtgtgtcgttctattgtggctttatatactggtcttgatcccatttgatatctccagtgtggatacaagcattgctactgctgatcacgtggatgggcctgaaactgttccacttgtgacaaggatattagacatatgtaaggattatctctgcagttctggtccaatgagaaggatgtcaggattgctgctcgcaaggctattgactcgtccagacatgccaaaggttttcagcagttttatggaatgggcacaaaggatcttgttatctgtcacagatgactttgtggatcaatttagatcgattggtatagtggaagcattagcatcaatatttaagattggtaaccggaaagtgctatgtgatgctgtttctggaatttggaatgattgttcagttgtgatgaagactaacattgcatccagaagctctctccttagaaagtttctggtcaaactggcgcaacgagttgcactcattagcttgcctccccgttcaccgtcatggcgctatcagtcgataagtagttcactgggtgcaaacctttcaacttctactgatggaactgggacttcaagtggttcaactaaacaagtgaacattgaccagacagacacatcttctttagaggaagatatggatgttccagaaatcgtggaagagattattgacttgctgttgactggtttgagggattccgatactattgtgagatggtctgctgccaaaggagttggtaggataactgcacgtttaacacctgcattgtcagaggaagttctatcatcaatcttgcagcttttttctcctggggagggtgatggttcctggcatggaggctgcttggctttggctgaacttgctcgtaggggactgttgctgccttctagctttcctgatgttattcctgttataataaaggttaattgcagaagagctgcttctgctgcctttcaagagaatgttggaagacagggaaattttccgcatggcattgatattgtgaatgcagcagactactttgcactggcttccagatcaaactcttatctgaatgtcgctgtttttgttgctcaatataaggagtatcttcatccgtttgcagaggagctactgtgcaacaaaatatcccactgggagagaagcttgcgagagttggctgctcaggccctttctatgcttgtacagtatgacatgaactactttgctggatatgcccttgaaaagttagttccctgcactctttcatcagatttgtgcactcgacatggggccactttagctgctggtgagattgctttgaagttgtatcagctcggttttacttttaccacagacatgcagaaagctctgtcaggaattgttcctgcaattgaaaaggcacgcctttatcgaggtaaaggaggagagataatgcgttctgctgtttcccgattcattgcatgcatttctatgtctgggatatccttgaatgagaagacaaagagaagtttgttagaaacccttaatgagaatttgaggcatcccaatgctcaaatacagtgtgctgctgttgatgcattgaagcattttattccaacatatctggtttcttccggtgaaaagactgctaatggcatcatcacgaagtacttgacccttctagatgacccaaatgttgctgcaagacgaggtgcagcacttgcccttggaacattaccatatgagttcttggtattaaaatggatgcctgtcataagtaagctgtgcagctcatgcacaattgaggataagcctgatgaccctgatgctgaagcacgtgtgaactctgttagggggctaattttggtttgcgaaacattaactgcttctgttgaacacagctcaagttttggcgattccatgtattcatacattaaagataaggtcatgcaagctttatttagagcacttgacgattatgctgtagataacagaggtgatgtgggttcctgggtacgtgaagctgcaatggatgcactagaacggtgcacatttattctctgcaagagagataatattgcagtgaaaataacaccagttgctgagcatgagtctaaatcgattgacattgacaccaatgcagttaacaccagatgccaactatttgattctagtattgcacaggatctggttgcaggcattgcaaaacaggctgttgagaaaatagataagataagagaaattgcagtcaaaactctgaagaggattctttacaatgaggaactgtttgtcccatctataccatacagggagctgctggaacaaattatacccaacagtgcagatctggagtgggcagttcctgcagtatcatatccacgatttgtgaagcttcttcaggtcagctgttacagcaagcctgtgctttctgggcttgtgatttctactggaggattgcaggaatctttgaggaaagcttcaacatcagctttagtagattatcttcaagattcagacatcaatacaaatgatgaaggaaaaaacagagaatatctattgagttgtgatcttctatgggttcttgagcattaccagaagtgtgaccgtgtagttactcccacattgaagactgttgaaactctcctcagtaaaaaggttttcttgcgtgaggggcattgtgagttctatagtggactgataaaatcgctgggcccggagctgaagggatcaaaggactttgcaaagttaagcgcaggtctctcaatacttgggtacatttcttcccagtcggatggaaatggcagcacggccttctctcaactcctcacattcctaggccacagataccccaagatccggaaagccgcagctgatcaggtgtacctcgtactgctgcaaaatgatagtttgatcgccgcggaaaatatggaaaaagcccaggaagtcatcgcggagacatgctgggaaggtgatgtggaggaagctaggcgcaagaggtcagaactgaatgagatggccggcttcggcgccgccacttcacagaagcctgggaatgaacaaacaaggaggaaaaccgaagagagaaatgctgcttcaactgacgagaacaaatcttactcttctttggttgatttcagtggatactaggaagcaggaagttccgccttttccctccctgtgcgtttttggttgttttgcgaaatggttgaggcgacacttgtacactagcattgcccaatgccccaattgcacaatttacactagtgtagaaactttgcagaaaagaatagttgttttgtttgtagcattttctgccataggattgtacctttttaaggaacaaggtgttgagtgattgaaattgttttgttcgatgaaaaaaaaaaaaaaaaa

SEQ ID NO: 8057 - DNA, 158 bp, Oryza sativa
  unsure (1)..(158): unsure at all n locations
  Clone ID: PAT_MRT4530_14597C.1
agcagaggcggcgccacgttntggaagctctcgggttttaatccaaggcgtttggaattgggaaggatttcccangaactngggatcctangttnacttttagtatcaaacccgagtgaattggtacagtttcggtcccggatnngattttttnaggg

SEQ ID NO: 8058 - DNA, 326 bp, Oryza sativa
  Clone ID: PAT_MRT4530_14598C.1
aacgtgacatgccgccactcatggctcgctgccggccacagttcggcgctgggagtggaggagctggatccagatggccaagtagcccaccccgcggggaggagatatgctcgaccgaaagaggaggggagggggtggaaaacgggaaagcgaagaaccggggcaaagcggtaaaccaaaccatcggcaagccgcatcgccgtctcgggtcggctaagcaagctctcgttctagctgggaattggaagttggaacccgtcgtcgtcctcggcctctcgacccgtcgcgtggcgtggcgcggcgtgcccccgttcccgcacgttctc

SEQ ID NO: 8059 - DNA, 675 bp, Oryza sativa
  Clone ID: PAT_MRT4530_14599C.1
atgggagtccgtgaagattcaagacctttgggaggtctagatggactctacggggtacaacttgcaggccggtcaatgtacagtgatgatgaagccgtcaaaactagcattatagatcctttggctcgtgaaccgcaggagggtgttggcacaagccgaagattgctaatccggcggctctggcagcagagacccccatgtctgaggcctatccactgtagtctctcatgcgataaacatccgggcgaaactattgctaatgttgtcacctctattcctttcattgttcttgggctgcagacaccaaggcgatgccaactaacagtcatgtgccagtcctgcagaaagaacttgaacactgcactttacgcgaactcactaattggagttggaatagcttctagtttgtatcatacgtcaagaggacgaatcagaaaatatatgcgatgggcagactatacaatgattgccactacaacacttgtttcattcgcgaagcgagcatccatggaaccagagctcaggatggcccataacctacacaagatgtcctccctactgggaggcgcgctgttcatcgccgacgacgccttcccggagaccccctatctccatgcggcatggcatctagctgcagcattgggggtgggcacatgcaacaagcttcttgaatga

SEQ ID NO: 8060 - DNA, 325 bp, Oryza sativa
  Clone ID: PAT_MRT4530_1459C.1
atgcagctcaacccgaaagcaagaactcgtcgaaataaaactaaagcaaaagggtggcgatgcgccgaaattgtattgaacgtgactctatccatgtacggcaatcatcttgaagtacctcaattcaacccgatgtcatacaccaagtcgtattgtcggaatcggctgcatcggcttacctagtctgactcagactcagccgatcctaatcgtagccgatctggactccagccgattcttgctctgttcttgaatcgatctccgccttcgactccacttcgatctaatcttcttttccgatgccgatattaccaaatttggttgt

SEQ ID NO: 8061 - DNA, 1326 bp, Oryza sativa
  Clone ID: PAT_MRT4530_145C.1
atgacgaatcccacgcgccgcaagcaccgtccgacgacccgccagcggcgcaaacaccggcagatcaatccaccgcatccgccggccgccgccaccgacgacgccgccgcgatcccagaagctcctgcggtcgccgcagccatcggcatccccgacgacgtgtttttctcccacatctttgtgaacctccccgtgagatccctctcgcgtttcagggcggtctgccgctcgtggcacgccgccgtcgacgaccccgccctgcttccaccggctaacgcttaccctgcgagcggtggcggcggaccgagagcgagagcgagagcgagagcggtggcggtggctgtggcggtgccgtcacacatcacctccgagactgatccgatgctacacaagtctatccctaacggcggccggatcgcacgccgtatcatccccacccactgcgacggccttgtcgccgtcgccacctgcggcggggccacgttcgtgtgcaacccggccacccaggagctcgtcgtgttgccgcccggcaccagcggccgcagccgccgcggcccgtccccagtgtctaccgaatcgacggcggcgatcggcttcgatccgtggcggaacaggtacgtcgtcgccagatgcttctactaccggaagtccggcaaccactatccgccggtctacaacgtcgggcacgagatcttcacgctcggcggcggcgccggcgacggatggctggcggactgcaggacccgccgcgcgccatcagccccgacgggagacccgccgcctgcacgcgcggcggcggggcctccttctactggttcatcgacgagcatgagccgtgcgcgctgctgcggttcagcctgcgggacgaggcgttcgacgtggtccccgtgccccccgggctgcacgggcttcacgtacgacgaccgcctggcggacctcgccggcgagctgtgctacgtgcatcgtgtccgcacgggggttgccacccacgaagtttggatggcggcggcggcggtcgacgacgacgagccggagtggtggctgcgataccgagtggacctgtgggggtacgcgtggggcttggtcgccggcgaacgctggttccacagcttcggcgccacggccggcgatgacggcgtggacgaggaggcgacgttggtgaccatgttgtacaaggagctgtgctggcacagggagcggagcaaaccggtggtgaaagacgtgaacgtgcgagggagccggtacagctgtgagccgactccgactatacaccatgtcatccgttacgtggagagcctcgtctccattacagcacctaactactga

SEQ ID NO: 8062 - DNA, 1317 bp, Oryza sativa
  Clone ID: PAT_MRT4530_14600C.1
ctagcgcggcggcggctgcagggaggaggcagccatggaggacgaaggtctgacgacggcgtcggcgtcggagacggcgccgtcgtcgtcgtcggcgtcgagggcggtgtgggcgtggccgaaggcgcgggcgtggtccttgagggagcgcttgtgcttgaactcggagccgcagaggcagtaccagagcttgccgcagttcttctcgtgggtgcgccagtcgcccttgacggcgaaggccttgccgcacttgcggcagaggaagggcttgaggccgtgcttgcgcttgtagtgcgtctgcagcgtgcggaagtccttgagcggccgcgcccgcgggtggtcgatgttgttccggcaccccgccgcgcagcagtagcacggcagccgcagcatcgccgtcggctgcaccccgcgcagcgactccggccccttcctgtactgcgacccatgcccccacatatgcatctgcatgttattgtatctgttgaaggttttgaagcagacagggcaggagaactgggttgggccgatgaggatctgcgatggcgtcggaatccagtactgccctttgttcagcttcccgatcggcgtcgacgagaaccctagcggcaccacctcgtcgtcgccgccgctgccgccgccgtccaccttgcagtcctcctcctcctcctcgtgttcgacgccggcgccggtgagcccggagaggagatcggcctccgtgccgccggcaggcaggccgatgcgcagggcgaccgcggcgtcgatgtccgccgttgtcccggcgacctccacgtccatcgggtcgccgccgtcgttgtcgtcgccgcagcaggtggggatgcagttgaggtcggcgaagagcggcgcgcgcgcggcggcggcggcgggggtggccgtcgacccggccgccgccccctcctgatcctgcaggtggtggtagcagcagtcgccgtcgtcgtcgtcgtcggagtccgagtcagccgctgcgtcgacgacgccgccgcggcgcgccggcgtgggcgacagggacagcagcggcagcgcttcccgcagcggcggcgacggcggcgcctgatgctgctggtgcaccggcggcgggtggaagaatgcggccggcgggtactgatgatgatgatgcgcgccgacgccgacgccgacgccaccggcggtaggatacagggcagcgtaaggcggcggcagcggcggagggaggtgagcggcggcggcggcggcggcgggcgcggtggggaaggagctagccgaggtgcagtagtagtagtaagggttcttgaagaagctagtgtaggggtcttccat

SEQ ID NO: 8063 - DNA, 1317 bp, Oryza sativa
  Clone ID: PAT_MRT4530_14601C.1
agtgtgaactatttaactgccaaaatattacattcagtttatgtgaacatgcatgtttagctacgatatatatatttctttgagaccaaagtttacatactagggtacattattcacggaacaacaatacaacatacgactacaatatacagtaatacaggcacaagatggtaccatatacacctggctatgaatgcactaccagtctaccctactgtgccaatatttctccggttcaatgtgaacctacacaatgtgacgcgatcagtgtcggcaggttgatgtattgctataatgctatcatattcatatcaactggttgttgaaaactagctatagcctagataggcaggaaggacgtgatcattcaagaagcttgttgcatgtgcccacccccaatgctgcagctagatgccatgccgcatggagatagggggtctccgggaaggcgtcgtcggcgatgaacagcgcgcctcccagtagggaggacatcttgtgtaggttatgggccatcctgagctctggttccatggatgctcgcttcgcgaatgaaacctccattatcccagtgtggacggctgaaaccaccaatggctggaaaggtaggagcaatgtggatgctgccatcagtaattttggatgctcatttcggagtgctctgcttaaacaaagtgttgtagtggcaatcattgtatagtctgcccatcgcatatattttctgattcgtcctcttgacgtatgatacaaactagaagctattccaactccaattagtgagttcgcgtaaagtgcagtgttcaagttctttcttggtgtctgcagcccaagaacaatgaaaggaatagaggtgacaacattagcaatagtttcgcccggatgtttatcgcatgagagactacagtggataggcctcagacatgggggtctctgctgccagagccgccggattagcaatcttcggcttgtgccaacaccctcctgcggttcacgagccaaaggatctataatgctagttttgacggcttcatcatcactgtacattgaccggcctgcaagttgtaccccgtagagtccatctagacctcccaaaggtcttgaatcttcacggactcccatttattcactttatttatgtgaacactattaactaagaagaacaaatggtactcctcacctcgcgattgttggagcggccgcgccaccaccaccaccaccgcctcctcctcgacggagacgggcgaggagccggaggaggagggggggattccgatcccgacaggatcttctcctccctcccgcgggccgagttccccgcag

SEQ ID NO: 8064 - DNA, 759 bp, Oryza sativa
  Clone ID: PAT_MRT4530_14602C.1
atggattccaacctcgccgtgctcctcgccatcgtcgtcgccgtcgtctgcgtcgcgcgcaccacgccaccggcgttcgcgcagacggtgcaggtgtggtcggagtgctcgccgcagaactacaccgccgggagcgcctacggcacgagcctccgcggcgtgctgaaggacgtcgtcgacgccgcggtgtccggcggtggatacgcggtggccaacgacgccggcggcgccgcgcacggcctcgccatctgctacgccgacgcgccgccggaggtgtgccggctctgcctggccatggcggcgggcaacctgtcgctcgcctgcccgcgcgccgtgggcggcgccatgctgtacaacaactgcctgctccgcgccggcgacgccgcccagttcggcgccgcgctcagccggctcatggaccgcctcgcgctcgccgccgcgtcgtcgtcgtcgtcttcccgtggccggcggttcgcgttcgggcagacgaacatcaccggcgacggcggcgacagcctctacgcgttcgtgcagtgcgtcgacgacctctcgccggacgactgccgccgctgcctccagagcatcgcggcgtcgctgcccatgacgagaggagggcgtgcctactcgctgacgtgctacacgcggttcgaggtggtgccgttctacaggccaccgaccgcgacgaacctcgtggtggtggcgtcgacggcgccggcgccggaatcggctttgctccccacggaatcaagaggcgagtaa

SEQ ID NO: 8065 - DNA, 598 bp, Oryza sativa
  Clone ID: PAT_MRT4530_14603C.1
gaatacggcacgaggctacgctcggccgcgcccggcactagagcggagcaggaggaaaaccagcaggcgagttagagttatcgccatgcttggcctccgcggcctcgtcgccgcgtcacctgtcaccgcgccgcggtgtagggggcggtgcagtgccgcgaccgcggcgacgtcggcgccggagaagacggctggccacgtcggccggcttccactggccatcgtcccagcggccgccgcctcgctctcacttgtcctctggtccagtccagtacatgctggcatcatgtcagggttcaaagggatggaatcggttccaggcccagatctgccacgagtggagttcttggaaaaatggaatgcggagaaccagaagaagtacgccgagttcgactccaggttcaagtcttcccaagtgctcaaggatctgctcgagaagtccaagcagaacaaactgaagaatgagagggagattcaggataaatactgcctgcgtggcgccgagtggggcgtcggggactgctcgacggaggggatgtcggaccaggagaaggaggatttcatcgcagagctgaagaaaagaactggacaagagtga

SEQ ID NO: 8066 - DNA, 4068 bp, Oryza sativa
  Clone ID: PAT_MRT4530_14604C.1
atggaactcacctcggagcaagagcaactcatccaccgcaatgctcaagcttccaatgcgattctctccgccttgagtccggaggagttcaacaaggttgatggacttgaggaggccaaggagatatgggatactttgcaattggctcatgagggatcaccagtcgttcgtgaggccaagattaaattgttggaaggaaggcttgaaagatttgtgatggatgacaaggagacacctcaagagatgtatgataggatgatgatccttgtcaacaagatcaaaggacttgggagtgaggacatgacaaatcactttgtggtcaagagacttctccgtgcttttggtccaagaaatcccactcttgtatcaattatacgggaaaggaaagacttcaagaggctcaccccaagtgacattcttagaagaattgtgtctcatgagatgcaagaagaggaagctcgtgaagtgaggcaaatggagaagaatgccgccatgatcaaaaatcaagaagtggctttgaaggcaaaacaagaagaagagttaagttgtaaagaaagtgaagatgaagagatggcttttattgtcaagagattcaagcactttcttcgcaagagtggctatggcaaagggaggaaggatggtgacaagggaaagtggaaatcaaagagagcttgcttcaattgtggcgaatatggccacttcattgccgattgtcccaagtcaaatgaagctaaggctaagggaggcaagaagaagccagagcgtgctcattactccggagatgaagaagatcccgaggtcaagcccaagcccaagccaaaagagaaggttgaaggagaaggtggtgttgctaccgttgccttcaagtcatcctcttcaagcaagaagcgtctcttcaacaacttgagtgatgacgatgacgactcctaccactactcttgtttcatggcccaagccctcaaggtgatgactcaaaagccctctcacatctctcttgatgttggttctaatgatgaggaaagtgataatgaattagatgatgtgcttaagagctttagcaaacccactatgcaacatttggctaagttaatgagagctttggatagtaaagaacaatcactcgaaaggcaagaagaattgcttattcttgagaagaaaaaaaaccttgccttagaggagagcttagctaaagaatgtgctaaaaatgaacaactagctaatgagcttattttggctaatggttctttagctagccttagagatgtcaatggaactcttcaagaaaaatttgttaatttagacataagtcataaagatcttgaagttcaatttgtcactctttggaatagcacctctcaaccaaatgtggtttctaatccttccaacccatctactagcaatggttgtgctaggtgttacaatattgatttgaactcttatgctactaatgttgatgctatgcaagctcttaagaaagagaatgagaggttgggcacattggtgaaatatggatgcatgaaaacataccattcaaaagatgccctttacaagaccatcatcgctcatcctaacaaggatggacacaggctcgggttttcgggtggaagtcctgtgtctaagcgtgtgatggacccaaatttatttgggtccgtggcctacataagcattggaggtaacaagtatggttttgtcattgttgatgatttttctcgcttcacttgggtgtactttctccatgacaaaagcgaagctcaagatgtcttcaagcatttcgcaaagcaagcccaaaacctctatgatctcactatcaagagggtgcgaagcgacaatggaggagaattcaagaacactcaagtggaggaatttcttgatgaagaaggaatcaagcacgagttctccgccccctatgatcctccccaaaatagcattgttgaaaggaagaaccgaaccctcattgaagctgtaagggcaatgcttgatgagtacaagacttcggatgtcttttgggcggaggccgtgagtaccgcatgtcatgccatcaaccgcttgtacctccacaagatcctaaagaaaacttcatatgagctcttgagtgtcactagggatgtgacatttgatgaatctaatggctcccaaggagagcaagttgttgtacatgttataggagatgtggatccaagtcaagctataggtactaaggctattggagacatacgaccagtcgagacgcaggatgaccaagaagacagggatcaacctccatcatcgacatccaatagccctacaagtgctgtgtctgctgagccggaagttccgggtcctattgaccagaacctccagacatctccaggcccggaagttctgggttctccagtccggaaccttcggaccaatggcagtgaagacgtgccaacattgcaagtccccctagtgcaccatccaaggatacatcacactatccaaagagatcatcccgtcgacaacatacttggtgacataagaaaaggggtaactactcgctctcgtgtcgcaagtttttgtcaacactactcgtttgtctcttctttggaaccaaccagggtggaagatgtgcttggtgatccggattgggtgatggctatgcaagaggagttgaataacttcactcacaatcaagtatggactttggtggagagacccaagcaaaatgtcatcggcaccaagtggatctttcgcaacaagcaagatgaacatgtggtggttgtaaggaacaaagcccggttagttgcgcaagggttcatccaagtcgagggtctcgattttggtgaaaccttcacacctgtcgctcgccttgagtcaattaaaattcttctagcctatgccgctcaccatgattttaggttgttccaaatagatgtcaggagtgcctttctcaatggacctatctcagagttggtctatgtggagcaaccatcagggttcgaggttccaaagttgccaaaccatgtgtacaagctccacaaggcgctctacgggctcaaacaagcccctagagcttggtatgaatgtctccgagattttcttttgaaaaatggttttgaaattggaaaggcggatactactctcttcactaaaaaatttaagagtgatttattcatatgccaaatttatgtcgatgacataatatttggttttactaatgcctctttttgtgaagaatttagtactgtcatgactaaaaggttcgagatgtctatgatgggcgagttgaccttcttcctcgggctacaagtgaagcaagcacaagagggcaccttcatctctcaaaccaagtacgtgaaagacatactcaagaagtttgggatggaggatgccaaacctatcaagacacccatgcctactaatggccacctagacctcaacgataatggtaaatgtgtggaccaaaaggtatatcgctccatgataggatctttgctttacttatgtgcatctcgtcccgacatcatgcttagtgtttgtatgtgtgcccgttttcaagcggagcctaaagagtgccatttgattgccgtcaagagaattctaagatatttagttcatactcctaatcttggcttgtggtatcctaagggttgtgactttgagcttttgggctattctgattcggattatgccgggtgtaaggttgatacaaaaagcacaaccgggacttgtcaattccttgggcggtcccttgtttcttggtcctccaagaagcaaaattccattgtattgtccaccgccgaagccgaatatgtcgtagccggttcttgttgtgcccaactcctttggatgaaaccaaccctaaaagattttggctacaacttcaccaagattccactcctatgtgacaatgagagtgccatcaaaatagccaataatcccattgaacattcaagaaccaagcacatagatattcgccatcactttttgagagatcatgagactaaaggagacatatgccttacccatgtgagaaccgagacccaattagccgacattttcaccaagcctttagatgagaaaagattttgcgagcttaggagttag

SEQ ID NO: 8067 - DNA, 275 bp, Oryza sativa
  Clone ID: PAT_MRT4530_14605C.1
cgagccggccgggatcgtcaagcacactcctctcccctccaacaaacatcccaacatgaaggtagcaatcattggggccacgggccaaactggcacgtccattgtcaatggtctactcgcctcgactgaaacacagtttgacatcaccgcccttgtcagaccgtcatcactcaagaagccaaatgtgatggaactgcagggcaagggtgtaaacataatgtctttcaacattaacgaccccgaggaccatctcgccgcccagctcaaaggcatcg

SEQ ID NO: 8068 - DNA, 2410 bp, Oryza sativa
  Clone ID: PAT_MRT4530_14606C.1
ttttttttttttttttttttagtatcgaaatatcttttcagcatgaattaagaaataaatgtgacaaacagtaagatggaatacatgagagatcgtgcatgaaacccagcaggtttccccacactatgtgctgcagagctttgttttactatggcgtcctccctgatggataggaaactaaaggaaagggaaggaaaaggggatttacaaatgccagtcatccatccattggttagcaagccatgttcatttgctgctgttcccgttgcactggtgtaccacaccattgctgggtgtattaccatttgcatagatcccattgctgctgccaacatccttgcgcttcagattggccttctttaaaccccatatacgaattgtgtgatcatcacttgcagatgcaagcatgtgcggattcgcaggattccagctcacacagttgaccgtgccggtgtgaccaggcagagtttcaataagatctccagtagctctatgccatatatagatctgtgaatcttcactaccactagcaataaaggcctgctcggatccaccaaaacaagaccttatcacaaaccggctgcgcttatgaccagcataccggttaactcgaatggggcaattccttatgttccacaaatgaatcgcctcacttataaggtttacaagcaagaaatcaccatcttctgaaagagaaaatgatgtgattgtattgtcctcctcaatcaatctctcctgttttgtctcccgatcaaataaacgaatggtggactctctattcatgcttattataagcttgccatcgtttgatacggcaaaatcagatgttttagatgatctctggcctttccaacaatctacttctttaccatctaaatcccacaagcaaaagttatgatcagttagaccagacaatatatgctttccatctggaaaccaaccacatgagatcagaccaatgccagacttttcataaacatgaagacatttgccagattcaacatcccaacaccgaatgacttcttccattccacatgtgagaagctggcaatcatcagggctccatgcaaccatcatgactggcttgtcatgaccagtcaatgtgtgctttagcaatagctctccatcttcatcaaccttccatatgattgcggatttatcatttgatgctgaggctaaatactttccattgtttgaaaattgaagaaaccatacttcatcacggtgtgcacgcagaacctgcaccgtgcaagatggtagctgatccttcccacagtgatgatcagtgtagagtgacaagccatcaatagaattatggaaataacaagcttcacgctggacagtaagtgcttgctcaagcaaattctctaacctcctctctggtaccataacagttgggggaagcaccttttgcaattcctctagcagcttcagccgtgagtttgaagattcaatgccaagcttcgaaaaaccaagtaatacatgctgtggagaagaaattatgcagcctgacagttcatgaactctttttttgttgacaccaagtggtgtaatttcactctgcaaagtccttatagcacccatgacattgtcatttctcaaaagttcaagaaatttttgttccagtatcagaaatatagcagactttacaatgttttcgtccaaaaggccaaccttcttcaaggtaaccactgcactatcccaattcccatcaagtacctgccttctgaaaagattcactgttggggaatgcagagttattcctgattcttcctcaagaactgctccgcttttttcataaccaaggctatacagagcctttgtgattatcctcacaaattcatccctcttaataacacctttagagccaaccataacttctttcccctgggaaggcaaaggtctagccattgtgcttcccaaaggagcggcaggtttcaagcaagaaaaactatctaacaaacttgctggttctactgaggatgctcttgcgcgtttcgagggtggttcatcgtcttcaaaacctcccatgaaatgttaaaatcagcccatatatatttttgacttctagggagatgatgttatgcagctccgagcggaatgcttgcaatgggtggtgtataacgaaaggacgttgctccacggccgcctctcccacccccccccccccacctccctcccttccgcgggctcgcccaacgaactctgcaccgactttggagggcgcgatcgattcgatgcggagaggggcgggcgcacgggaggacgaagggggcgttgggtgcggtcgccggcggcgggaggcggcggcggggggcggagatgatgctttcgttcctcgtcacgcaaacgcaggaggaaggagaggaaagagccgggcccaaggcaaagggaggagggcagtggcttc

SEQ ID NO: 8069 - DNA, 474 bp, Oryza sativa
  Clone ID: PAT_MRT4530_14607C.1
atgtcggtgttgacctcctctgcccatgtgatgccaaagcagatcccctcgctgacgtggcaagacctcatcaccaattgtcttggtgctaagctcccaacctcagtgctagtcccgtatttgagctgcaactacacatacaccctagagaagccaaagccaaagggaaagaaagaaaagtcgaaaaagccgatagaggtaccgaagccaccacctcctctatgtgactttgtggtgtggatcgataaggagacccacctgaaagatgtcgaggatcttcgcaggggggagctttgaaaaaagaagtgggtcaaggagaaagaacagaaggagaaggaggaccttgcggctgaaagggagagaaaggttgctagggagaagcatgcaaggaagccggaccagaggccgctaggaagggcaagtacccccgttgcacctagtaggatgtatttaattcccctaagctgcatgtga

SEQ ID NO: 8070 - DNA, 5337 bp, Oryza sativa
  Clone ID: PAT_MRT4530_14608C.1
atgtcggacttagggggaaagaacggggaaaatggaaatgaagatgaagcaagcagcaagggaactccaccacccaagggagctactataccttttgattatagcaaacttaccattccttctcacaacttcgtctccgtgccttccgggcgtgctcctcaatttgatgggacatattatgccgcttggaagcacaagatgaagttgcatctaatctctttgcatccaaatatttggaaagttgtttgtacaggtattgatataccccatgatgacatggagctcacttcggagcaagaacaacttatccaccgcaatgctcaagcttctaatgcaattctcttcgccttgagtccggaggagttcaacaagattgatggactagtggaggccaaggagatatgggataccttgcaattggctcatgagggatcacccgccgttcgtgaggccaagattgaattattggaagaaaggcttggaagatttgtgatggatgacaaggagacaccacaagagatatatgataggatgatgattcttgtcaacaagattaaaggacttgggagtgaggacatgacaaatcactttgtggtcaagaaacttctccgtgcatttggtccaagaaatcccactcttgtatcaatgatacgggaaaggaaagacttcaagagactcaccccaagtgacattcttggaagaattgtgtctcatgagatgcaagaagaggaagctcgtgaagtgagacaaatggtgaagaatgccgccatgattaaaaatcaagaagttgctttgaaggcaaaacaagaagaaatggcttttattgtcaagatattcaagcactttcttcgcaagagtggctatggcaaagggaggaaggatgatgacaagggaaagaggcaatcaaggagagcgtgcttcaattgtggcgaatatggccacttcattgccgattgtcccaagtcaaatgaagctaaggctaagggaggcaagaagaagccggagcatgctcatgtggcggaggcacacatggcggaagtgtggtactctggagatgaagaagatcccgaggtcaagcccaagcccaggtcaaaagacaaggttgaaggagaaggtggtgttgctaccgttgccttcaagtcatcctcttcaagcaaggagcgtctcttcaacaacttgagtgatgacgacgacgactcctaccactactcttgcttcatggcccaaggctgtaaggtgatgacacaaaagccctctcaaacttctcttgatgttgattctagtgatgaggaaagtgataatgaattagatgatgtgcttaagagctttagcaaacccgctatgcaacatttggctaagttaatgagagctttggatagtaaagaacaatcactcgaaaggcaagaagaattgcttattcttgagaagaaaagaaaccttaccttagaggagagcttagctaaaaaatgtgctaaaaatgaacaacttgctaatgagcttaatttggctaatggttcttcagctagccttagggatgtcaatgaaactcttcaagaaaaatttgctaatttagacaaaagtcataaagatcttgaagttcgatttgacactcgttggaatagcacctctcaaccaaatgtggtttctaattcttctaacccttctactagcaatggttgtgctaggtgtttcaatattgatttgaactcttatgctactaatattgatgctatgcaagctcttaagaaagagaatgaaaggttgggcacattggtgaaatatggatgtatgaagacataccattcaaaagatgccctttacaaaaccatcaccgctcatcctaacaaggatggacacgggctcgggttttcgggtggaagtcctgtgtctaagcgtgtgatggtaaatgggaaagaatgcttgatgtttgtgagagaaggtaaagcaccacaagcaagtgaggtgactagtcttgtgagctgccagggacccggaacatccggacaaaccgggagaaacttccgggtgggagtctctgtctctcaaaaattcccaccaggaagttccggccagtttgccaagaagttccgggccaatggccgtgcacaagacatgaccggaagttccgggcacaatgccaggaggttccggccagagggtctttactatgattcatatgcatactcctccggtggttcaagttgggttgtggacagtggttgcaccaatcatatgactggagagatgagtatatttaccagtcttgatgaggaaaacggaactcgtgagaatattgtgtttggagatgatggtaaaggaaagataattggtctagccttcataagtattggaggtaacaagtatggttttgtcattgttgataatttttcccgcttcacttgggtgtattttctccatgacaagagtgaggctcaagatgtcttcaagcgcttcgccaagcaagcccaaaacctctatgatctcaccatcaagagggtacgaagtgacaatggaggagaattcaagaacacgcaagtggaggaattccttgatgaagagggaatcaagcatgagttctccgccccctatgatcctcctcaaaatggcattgttgagaagaagaaccgaactcttattgaagccgcaagagaaatgcttgatgagtacaagacttcggatagcttttggacggaggccgtgagcaccacatgccatgccatcaatcgcctctacctccataagattctaaagaaaacttcatatgagctcttgagtggtaagaaacctaatgtttcatattttcatgtctttgcgagcaaatgctttattttgagtaagaggcctcgctcatctaagttctcacctaaggtggatgagggattcttacttggctatgagtcaaatgcacatgcctaccgtgtcttcaacaaaacctccggtattgttgaagttacaagggatgtgacatttgacgaatctaatggctcccaaggagagcaagttgttgtacatgttatagatgatgcggatcctagagaagcaattggttctaaggctattggagacatacgaccagtcgagacgcaggatgaccaagaagatagggatcaaccttcgtcatcgacatccaatagccctacaacaagtcaagagtcagttgacccggaagttccgggaccagatgatcggaacctccagacctccccaggccaggaagttccgggtccatctgccaggaagtttcgggcagaggacagtcaaggcttgcctacgacacaagtggatgggattgatgccgtgggcactgtagagcatcctgatcaggctcaggtctcctcagtgcaccatccaagaatacatcacactgtccaaagagatcatcccgtcgacaacatacttggtgacataagaaagggggtaactactcgttctcgtgtcgctaacttttgtcaacactattcgttcgtttcttctttggaaccaaccagggttgaagatgcacttggtgatccggattgggtgatggctatgcaagaggagttgaataacttcactcgcaaccaagtatggacattggtggagagacccgaccaaaatgtcatcggcaccaagtggatcttccgcaacaagcaagatgaacatggagtggttgtaaggaacaaagcccggttaattgtgcaagggttcacccaagtcgagggtctcgattttggtgaaaccttcgcagccgttgcttgtcttgagtcaatccgaatgcttttagcctatgccgctcaccatgatttcaggttatatcaaatggatgtcaagagcgcctttcttaatggacccatctcggagttggtctatgtggagcaaccaccggggttcgaggatccaaagttgccaaaccatgtgtacaagctccacaaagcgctctacgggctcaaacaagcccctagagtttggtatgaatgtctccgagattttcttttgaaaaatggttttgaaattgggaatacgtacactactctcttcaccaaaaagtttgaaaatgatttattcatttgccaaatttatgtcgatgacataatatttggttctactaatgcctctttttgtgaagaatttagtagcatcatggctaaaaggttcgagatgtctataatgggtgagctaaccttcttcctcgggctacaagtcaagcaagcacaagaaggtactttcatctctcaaaccaagtacgtgaaggacattctcaagaagtttgaaatggaagatgccaaacccatcaagactcccatgcctaccaatggtcaccttgatcttgatgaaaatggtaaatgtgtggaccaaaagggttgtgactttgagcttttgggctattccgattcggattacgccgggtgtaaggttgatagaaaaagcacaaccgggacttgccaatttcttgggcggtcccttgtttcttggtcctccaagaagcaaaattccattgcgttatccaccaccgaagccgaatatgtcgccgccggttcttgttgtgcccaactcctttggatgaaacaaactctaaaagactttggctacaacttcaccaagatcccactcctatgtgacaatgagagtgccatcaaaatagccaataatcccgttcaacactctcgaaccaaacacatagatattcgccaccactttttgagagatcatgaaaccaaaggagacatattccttacccataaaagacagaaagcctctcaggatgtgtccggtgatgagagtccccctattcggtttcctcgtggtcgtttgggtaaagagaaagtgattgagggtggcagtggcagcggcactcgtacttctcctaggtttaccaggcaatccagcaatcgtccagttcagattcgggatgttgacagtggtcaaggaagtgatgctcctaatacaagaggtcgtgggagaggtggtggtcgcagttctggggctggaagggcatctcatgatttccctattggatctcgtgagaatcccgttcagctctacaagactcttggatttgacaccactcctatgcaccacattggaagacccaagtccaactaccttcatcagcttgccaagtgcagaagggacctgattacggctagagaaaatccaatggttaagatgaagtggattgattggacttacatgaggaagaagaacaatgaagtgttcaaccaagtgatgcaagtgtgccacaacaagaatcttggagatattcttgccttggagtatgattggaatgaggaggtcattgcacagttctatgcgacagcattctttggtactacaaggaagggaattgtcacgccctga

SEQ ID NO: 8071 - DNA, 256 bp, Oryza sativa
  Clone ID: PAT_MRT4530_14609C.1
agcacgtcggtacagtacatgctcgcgttgcaaggcgttgcagaggtgtccgatgcaacagctccactattcgtctcgagggatgagcaatgactgacacggtgaagttcaggcgcacaccccagattaggtcaggagccaacacaccaaatgatctcgaagagctaggtctacaccgcagtccgtcgctcgtgatgatgtgtggagcgttggagcggactgcctggtctgtgtcgaggccttcccctggccagat

SEQ ID NO: 8072 - DNA, 510 bp, Oryza sativa
  Clone ID: PAT_MRT4530_1460C.1
cggcgatggagaggaacgccggcatggtgaggtcgaagtgctcgcccttcatcccgttcactgacggcggcgcctggttggtggccgtcaccacgacggtcttcccggaatcccccttgagctcgtagcacgcgccgcacccggcgccgttgtcgaacagggcggggctcaccgccgccgtcatcgcgccgtacccgtcggcgtccttgtacccgcacgcgccgccctccgtcgtgcccgacgcgtcgcgcccgccgtagaacgtcgcgtgcccgtccacccacggcccgcacttgtacctgccgtggttcacgtgcggcatcttggctccgccgccgccgccgccttcgctgtcgccgccgtcgtcgtagccgccgccgccgccgccgcccgcgacgacgaagtcggcggcgaacgacgacgcgaggaagaagaagagcagcagagacgtcgtggtgaggagagggagaggcgccatggtcgtcgttgtgtccatgaaattaaccgaaa

SEQ ID NO: 8073 - DNA, 211 bp, Oryza sativa
  Clone ID: PAT_MRT4530_14610C.1
tttcctacacccccaaacccacagccacgacgcggccgcaatggcggagcccgagtcctccacggccgcggccggcggcagccgcctccgcatcgcctgcggtggcgtgctgtgcgccttcaccctacttctcatcggcgtactctcgttctcgatcctctttttcttcgtgatttatgtctagagcgtgatccacgtgtttgacctcttc

SEQ ID NO: 8074 - DNA, 1617 bp, Oryza sativa
  Clone ID: PAT_MRT4530_14611C.1
atgactcgtgagaaaagacagaaagcctctcaggatgtgtccggtgatgagagtcctcctattcggtttcctcgtggtcgtttgggtaaagagaaagtggttgagggcggcggtggcagtggcactcgtacttctcccaggttcaccaggcaatccaacaaccgtcctgttcagatttgggatgttgacagtggtcaaggaagtgatgctcctaatacaagaggtcgtgggagaggtggtggtcacagttctggggctggaagggcctctcatgatttccctgtaggatctcgtgagaatcccgttcggctctacaagtctcttggatttgacaccactcctatgcaccacattggaagacccaagtccaactaccttcatcagcttgccaagtgcagaagggaccgtttgattgatccagagatacagcctgaggagtcacaggatcctcgtttcaggactttcactcaattggattggtataactcagtgattatggctagagaaaatccagtggttgagatgaagtggattgattgggtttacatgaggaagaagaacaatgaagtgttcaaccaagcgatgcaagtgtgccacaacaagaatcttggagatattcttgccttggagtatgattggaatgaggaggtcattgcacagttctatgcgacagcattctttggtactactaggaagggaaccccttatgtgaagtggttgactgagggtgttaggcacaagatttccatggcacagtttgctgagatattgggcttagaggatgaggatctcaataggcctaatattcatagtgaagcactcttccccatgatcaagaccaagttcatgtatgctaaggatgctcctaggacttgtatgggaactactcatggtttgcatccaaattacaagatgttgtactccatctttcgttggtctttgcttccaaaggttggagatgccacagctttgccatccaagcatgctcatcttctcagtcgcatgcgctatcatcagcctcccttcagtgtgatgaagttgatttggtatgagatagctaacaccattcttgagcctaagcggggttgcatctatgctcctttcattatgaagatgattgagtcagtcaccggggtgttctacatcaaagatgggcgccacaatccttttcaccctcgtgctccacttgcctcttctctagtggtacctagatccattccttctacctcagctggtccatcttctagtgccccactgagttcctcaagttcttctcccatcaagaagacacttcaggcaattttctgtttgtgtgctaagactgctaagaaagtgaagaagatcgaacggcgtcagaaggaagatagaagagaggctgggaaagaagtgtcagatgattctgaagatgaggtctatgttgatccatttgaggcttatgaggcagcccgcaacgttgccggtgaaggtccatcctcctacttcaatgaaaagtcttcccattcagatgatgatgatgatgatgatgatgatgatgatgatgatgatgatgagggtgacaccgaggcagctgctgaggatgctcccactgatgttgatgagggtgacaccactgcatag

SEQ ID NO: 8075 - DNA, 5976 bp, Oryza sativa
  Clone ID: PAT_MRT4530_14612C.1
atggtgaagaatgctgccatgatcaaaaatcaaaaagttgctttgaaggcaaaacaagaagaagagtcaagttgtgaagaaagtgaagatgaagaaatggcttttattgtcaagagattcaagcacttttttcacaagagtggctatggcaaagggaggaaggatgatgacaagggaaataagcaatcaaagagagcgtgcttcaattgtggcgaatatggccacttcattgccgattgtcccaagtcaaatgaagctaacgctaagggaggcaagaagaagccggagcgtgctcatgtggtggaggcacacatggcggaagtgtggtactccggagatgaagaagatcccgaggtcaagcccaagcccaagtcaaaagacaaggttgaaggagaaggtggtgttgctaccgtcgccttcaagtcatcctcttcaagcaaggagcatctcttcaacaacttgagtgatgacgacgacgactcctaccactactcttgctttatggcccaaggccgcaaggtgatgactcagaagccctctcaaacttctcttgatgttgattctagtgatgaggaaagtgataatgaattagatgatgtgcttaagagctttagcaaacccgatatgcaacatttggctaagttaatgagagctttggatagtaaagaacaatcactcgaaaggcaaaaagaattgcttattcttgagaagaaaagaaaccttgccttagaggagagcttagctaaagaatgtgctaaaaatgaacaacttgctaatgagcttaatttggctaatggttctttagctagccttaggaatgtcaatgaaactcttcaagaaaaatttgctaatttagacaaaagtcataaagatcttgaagttcaatttgacactctttggaatagcacctctcaaccaaatgtggtttctaattcttctaacccttctactagcaatggttgtgctaggtgttacaatattgatttgaactcttatgctactaatattgatgctatgcaagctcttaagaaagagaatgaaaggttgggtactttggtgaaatatggatgcatgaagacataccattcaaaagatgccctttacaagaccatcaccgctcatccttacaaggatggacacgggctcgggttttcgggtggaagtcctgtgtctaagcgtgtgatggtaaatgggaaagaatgcttgatgtttgtgcgagaaggtaaagctccacaagtaagtgaggtgactggtcttgtgagctgccaggaacccggaacatccggacaaaccgggcgaaacctccgggtgggagtctctgtctctcaaaaattcccaccaggaagttccggccggtttgccaggaagttctgggccaatggccgtgcaaaagacatgaccggaagttccgggcataatgccaggaggttccggccagatggtctttactatgattcatatgtaatttccaaaaatttagagggcaaagtggttgcttattttaatgggaattacaatgatgagtaccacacttatgtgtgggtgccaaatgctttggcatactcctccggtggtacaagttgggttgtggatagtggttgcaccaatcatatgactggagagaggattatgtttacaagtcttgatgaggagaacgaaactcgtgagaatattgtgtttggagatgatggtaaaggaaagttgggttacaattgcttgtttactgatgaggatgtgaccgtctttagaagggatgactcctccgtagcattcaaaggcaagttaaagggtgatctctatcttgtcgatttcgatgtggatagagtgaatccggaagcttgtttgattgctaaatcctccatgggttggctatggcatcgtagattagcccaagttggaatgcggaatttggcaactcttctaaagggggaacacatcctcgggctcactaatgtcacatttgagaaagatcgtgtgtgtagtgcttgccaagccggaaaacaagttgggaatccacatcctatcaagaacatcatgactacaacacgccctcttgagcttctacatatggatttatttgggcccgtggcttacataagtattggaggtaacaagtatggttttgtcattgttgatgatttttcccgcttcacttgggtgtattttctctatgacaagagtgaggctcaagatgtcttcaagcgcttcgccaagcaagcccaaaacctctatgatctcaccatcaagagggtacgaagtgacaatggaggagaattcaagaacacacaagtggaggtattccttgatgaagtgggaatcaagcacgagttcttcgccccctatgatcctcctcaaaatggcattgttgagaggaagaaccgaactcttattgaagccacaagagcaatgcttgatgagtacaagacttcggatatcttttgggcggaggccgtgagcaccgcatgccatgccatcaatcgcctatacctccacaaaattctaaagaaaacttcatatgagctcttgagtggtaagaaaccaaatgtttcctattttcgtgtctttgggagtagatgctttattttgagtaagaggccttgttcatctaagttctcacctaaggtggacgaggattcttacttggctatgagtcaaatgcacatgcctaccgtgtcttcaacaaaacctctagtattgttgaagttacaagggagccctacatcgagtcaagagtcagttgacccggaagttccgggaccagatgatcggaacctccggacctccccaggccaggaagtttcgggtccatttgccaggaagttccgggcagaggacagtcaaggcgtgcctacggcacaagtggatgggattgatgccgagggcactatagagcatcctgatcaggctcaggtcccctcggtgcaccatccaagaatacatcacactgtccaaagagatcatcccgtcgacaacatacttggtgacataagaaagggggtaactactcgttctcgtgtcgctaacttttgtcaacactattcgtttgtctcttctttggaaccaaccagggttgaagatgcacttggtgatccggattgggtgatggctatgcaagaggagttgaataacttcactcgcaaccaagtatggacgttggtggagagacccgaccaaaatgtcatcggcaccaagtggatcttccgcaacaagcaagatgaacatggagtggttgtaaggaacaaagcccggctagttgcgcaagggttcatcaaagtcgagggtctcaattttggtgaaaccttcgcacccattgctcgccttgagtcaatccgaatccttttagcctatgccgctcaccatgatttcaggttattccaaatggatgtcacgagtgcctttctcaatggacctatctcggagttggtctatgtggagcaaccaccagggttcgaggatccaaagttgccaaaccatgtgtacaagctccacaaggcgctctacgggctcaaacaagcccctagagcttgtagtatcatgactaaaaggttcgagatgtatatgatgggcgagttgaccttcttcctcgggctacaagtgaagcaagcacaagagggcactttcatctctcaaaccaagtacgtgaaggacattctcaagaagtttgggatagaagatgccaaacccatcaagactcctatgcctactaatggccacctaaacatcaacgacaatggtaaatgtgtggaccaaaaggtatatcgctccatgctaggatccttgctttacttatgtgcatctcgtcatgatatcatgcttagtgtttgcatgtgtgctcgctttcaagcggagcctaaagagtgtcatttgattgccgtcaagagaattctaagatatttagttcatactcctaatcttggcttgtggtatcctaagggttgtgactttgagcttttgggctattccgattcggattatgccgggtgtaaggttgatagaaaaagcacaaccgggacttgtcaattccttggacggtcccttgtttcttggtcctccaagaagcaaaattccattgtcttatccaccgccgaagccgaatatgtcgccgccggttcttgttgtgcccaactcctttggatgaaacaaaccctaaaagattttggctacaacttcaccaagatcccactcctatgtgataatgagagtgccatcaaaatagccaacaatcccgttcaacactcaagaaccaagcacatagatattcgccaccacttcttgagagatcatgaaaccaaaggagacatatgccttacccatgtgagaactgagagccaattagccgacattttcaccaagcctttagatgagcaaagattttgcgagcttaggataagcactatgcctcgtgagaaaagacagaaagcctctcaggatgtgtccggtgatgagagtcctcctattcggtttcctcatggttgtttgggtaaagagaaagtggttgagggcggcagtggcagcggcactcgtacttcttctaggtttaccaggcaatccagcaaccgtctagttcagattcgggatgttgacagtggtcaaggatgtgatgctcctaatacaagaggtcgtgggagaggtggtggtcgcagttctggggctggaagggcatctcatgatttccctgttggatctcgtgagaatcctgttcggctctacaagactcttggatttgacaccactcctatgcaccacattggaagacccaagtccaactaccttcatcagcttgccaagtgcagaagggaccgtttgattgatccagagactcggcctgaggagtcacatgatcctcgtttcaggactttcactcaattggattggtataattcaatgattatggctagagaaaatccagtggttgagatgaagtggattgattgggcttacatgaggaagaagaacaatgaagtgttcaaccaagtgatgcaagtgtgccacaacaagaatcttggagatattcttgccttggagtatgattggaatgaggaggtcattgcacagttctatgcgacagcattctttggtactacaaggaagggaaccccttatgtgaagtggttgactgagggtgttaggcacaagatttccatggcacagtttgctgagatgttggggttagatgatgaggatctcaataggcccaacattcatagtgaagcacccctccccatgatcaagaccaagttcatgtatgcaaaggatgctcctaggacttgcatgggatctactcatggattgcatcccaactataaggtgttgtactccatcttttgttggtctttgcttccaaaggttggagatgctactgctttgccatccaagcatgctcatcttcttagtcgcatgcgctacaatcaacctcccttcagtgtgatgaaattgatttggtatgagatcgccaacaccattcttgagcctaagcggggttgcatctatgctcctttcattatgaagatgattgagacaatcaccggggtattctacatcaaagatgggcaccataatccttttcgccctcgtgctccaccttcctcttctccagtggtccctcgatctattccttctacttcagctggtccttctactagtgccccaccaagttcctcgagttcttctcccatcaagaaggcacttcaggcaattttctatatgtgtgctaagactgccaagaaagcttatgaggcagcccgcaacgttgtcggtgaaggtccatccaccttcttcaatgaagaatcttcccattctgatgatgatgatgatgatgatgatgatgatgatgatgatgatggtgatcagggtgacactgaggcagctgctgaggatgcccccactgatgttaatgagggtgacaccgctgctcagtccgatgagtctcatctctccggcgatatcgagattgttccctctgatggagatgagtga

SEQ ID NO: 8076 - DNA, 6297 bp, Oryza sativa
  Clone ID: PAT_MRT4530_14613C.1
atgacaagggagacgcttctagcaccaaggataaagggagctactattcactttgattacagcaaacttaatgttcctcctcataactttgtctccgtgccttccgagcgtgctcctcaatttgatgggacacattacgccgcttggaagcacaagatgaagttgcatctaatctctttgcatccaagtatttggaaagttgtttgtacaggtattgatgtacccaatgatgacatggagctcacctcggagcaagagcaactcatccaccgcaatgctcaagcttccaatgcaattctctccaccttgagtccggaggagttcaacaagatgtatgataggataatgatccttgtcaacaagatcaaaggacttgggaatgaggacatgacaaatcactttgtggtcaagagacttctccgtgcttttggtccaagaaatcccactcttgtatcaatgatacgggaaaggaaagacttcaagaggctcaccccaagtgacattcttggaataattgtgtctcatgcgatgcaagaagaggaagctcgtgaagtgaggcaaatggtgaagaatgccgccatgatcaaaaatcaagaagtagctttgaaggcaaaacaagaagaagtgtcaagttgtgaagaaattgaagatgaagagatggcttttattgtcaagagattcaagcactttcttcgcaagagtggctatggaaaagggaggaaggatgatgacaagggaaagaggcaatcaaagagagcttgcttcaattgtggcgaatatggccacttcattgccgattgtcccaagtcaaatgaagctaaggctaagggaggcaagaagaagctagagcgtgctcatgtggcagaggtgtggtactccggagatgaagaagatcccgaggtcaagcccaagcccaagccaaaagacaaggttgaaggagaaggtggtgttgctaccgtcgccttcatgtcatcctcttcaagcaaggagcgtctcttcaacaacttgagtgatgacgacgacgactcctaccactactcttgtttcatggcccaaggccgcaagttaatgagagctttggatagtaaagaacaatcactcgaaaggcaagaagaattgcttattcttgagaagaaaagaaaccttgccttagaggagagcctagctacaaaatgtgctaaaaatgaacaactagctaatgagcttaatttggctaatggttctctagctatccttagggatgtcaatgaaactcttcaagacaaatttgctaatttagacaaaagtcataaagatcttgaagttcaatttgacactctttggaatagcacctctcaaccaaatgtggtttctaatccttccaacccatctactagcaatgattgtgctaggtgttacaatattgatttgaactcttgtgctactaatgttgatgctatgcaagctcttaagaaagagaatgaaaggttgggcacattggtaaaatatggatacatgaagacataccattcaaaagatgccctttataagaccatcaccgctcatcctaacaaggatggacacgggctcgggttttctagtggaagtcctgtgtctaagcgtgtgatggtaaatgggaaagaatgcttgatgtttttgagagaaggtaaagctccacaagcaagtgaggtgacttgtcccttcactggtcagacactcggaagttccgggcaaaatgacgggaagttcctgccctgtaagacaggaagttccgaacattttgtcaggaagttccggacttctgatgagtcgaaggggctgaccggaagttcctggtataatgccaggaagttccggccagaaggtctttactatgatttatatgtaatttccaaaaattcagagggcaaagtggttgcttattttaatgggaattacaatgatgagtaccgcacttgtgtgtgggtgccaaaggctttggtaactaacatcaagggacccaaacttatgacgggagagaggtgtatgtttacaagtcttgatgagcagggtggaagtcgtgaaaatattttctttggagatgatggtaaaggaaaggattgtgtgtgtagcgcttgccaagccgggaagcaagttgggagtccgcatcctatcaaaaacatcatgactacaacaagaccactcgagcttcttcatatggacttatttgggcccgtggcctacataagcattggaggtaacaagtatggttttgtcattgttgatgatttttcacgcttcacttgggtgtactttctccatgacaaaagcaaagctcaagatgtcttcaagcgtttcgcaaagcaagcccaaaacctctatgacctcactatcaagagggtgcgaagtgacaatggaggagaattcaagaacactcaagtggagaaatttcttgatgaagaaggaatcaagcacgagttctccgccccctatgatcctccccaaaatggcattgttgaaaggaagaaccgaaccctcattgaagccgcaagggcaatgcttgatgagtacaagacttcggatgtcttttgggcggaggccatgagtgatgtggatccaagtcaagctataggtactaaggctattggagacatacgactagtcgagacgcaggatgaccaagaagatagggatcaacctccgtcatcaacatccaatagccctacaagtgctgtgtctgctgagccggaagttccggatcctattgaccagaacctccggacatctccaggcccgatccccccagtgcaccatccaaggatacataacactgtccaaagagatcatcccgtcgacaacatacttggtgacataagaaaaggggtaactactcgctctcgtgtcgcatgtttttgtcaacactactcgtttgtctcttctttggaaccaaccagggtggaagatgcgcttggtgatccggattgggtgatggctatgcaagaggagttgaataacttcactcgcaaccaagtatggactttggcggagagacccaagcaaaatgttgtcggcaccaagtggatctttcgcaacaagcaagacgaacatggggtggttgtaaggaacaaagcccagatagttgcgcaaggattcacccaagtcgagggtctcgattttggtgaaaccttcgcacctgtcgctcaccttgagtcaattagaattcttttagcctatgccgctcaccatgatttcaggttattccaaatggatgtcaagagagcctttcttaatggacctatctcagagttggtctatgtggagcaaccaccggggttcgaggatccaaagttgccaaaccatgtgtacaagctccacaaggcgctctacgggctccaacaagcccctagagcttggtatgaatgtctccaagattttcttttgaaaaatggttttgaaattggaaaggcggatactactctcttcactaaaaaatttaagagtgatttattcatatgccaaatttatgtcgatgacataatatttggttctactaatgcctctttttgtgaagaatttagtagtatcacgactaaaagtttcgagatgtctatgatgggcgagttgaccttcttcctcgggatacaagtgaagcaagcacaagaggggaccttcatctctcaaactaagtacgtgaaagacatactcaagaagtttgggatggaggataccaaacctatcaagacgcccatgcctactaatggccacctagacctcgacaataatggtaaatgtgtggaccaaaaggtatatcgctccatgataggatctttgctttacttatgtgcatctcgtcccgacatcatgcttagtgtttgcatgtgtgcccgttttcaagcggaacctaaagagtgccatttgattgccgtcaagagaattctaagatatttagttcatactcctaatcttggcttatggtatcctaaggattgtgactttgagcttttgggctattccgattcggattatgccgggtgtaaggttgatagaaaaagcacaaccgggacttgtcaattccttgggcggtcccttgtttcttggtcatacaagaagcaaaattccattgcattatccaccaccgaagccgaatatgtcgccgccggttcttgttgtgcccaactcctttggatgaaacaaaccctacaagattttggctataacttcaccaagatcacactcctatgtgacaatgagagtgccatcaaaatagccaataatcccgttcaacattcaagaaccaagtacatagatatttgccatcactttttgagagatcatgagactaaaagagacatatgccttacccatgtgagaaccgagacccaattagctgacattttcactaagcctttagatgagaaaagattgtgcgagcttaggagtgaactcaatatcttagactctcgtaacattaggtttctatttctaatcgttgaattctcgtctattcctttgaacttgggcctgactgccctctgttctgtcaggccggaagttccggtcaccctagtccggaacatccgggggtcggggttttgcaggccggaagttccagtgttcttggtccggaacttccggtctctatccagccagccagcaaaccttgattcctccaatttttattttaaccattgcacttcaaccttgttgattcttgttgcagtggtcagtatgcctcatgagaagagacagaagctttcacaggatgttcctgctgactcgagtcccccggttcatggtcctaggaggagattgggcaaagaaaaagttggaaatttttacagtgggagtcaaattcctattcattctaggagggctggtagcattgtcattggtgatgctccccgctctccctctccagttgcatctaagtcagatgatggtggcaatgaggatgagcctagttctgagagcaatcctttgaggctttacaagacaagggttgttgatcctgatcctagacgtccaagtgtgaactatttgaagaatctgctcaagtgtggaatggacagaatggtgagtcctgacacaatgcctgctgactctcaggatgacagattcaggaccgtggtgcaagttgattggtataattctgtgatcatgggaagatctcatccagtggtagagatgaagtggctagactggcagtacatgtccttaaagaacaacttagttttcagtgaggtacgcaaggtgtgtgagcgcaagcacgtggcagatctgttggccttgcagtattcctggaatgaggaagtcattggtcagttatactccaccgctttctttggcaccaccaagaagggcattgaatttgtgaagtggaccattcaggggcagcagtatagggtctctatggcacagtttgctgcagctctggagttagatgatgatgacctgagtcgtcctcatatctttgtagaaaatgctttgtcaccgaccagcactactttcctgtatgagaaggatgctcccaaggattgtttggggactactcgtgggttgcgtccatactatagagtgctttattctatcttcaggtggtcattgctccccaaagtgggagatactacagcacttccagataggcatgcgctcctcctcagtcgcatacgctacaacaagccagatttcagcatcatgaagcttatctggagtgagatatatgagatagtgtgtgaactaaagaggggttgtatctatgctccttatataatgaagatgattgaggcaaaaattgggattagttatttcaaggacaaccagcacaagccttttcgtcctcatgttccctcctcttcagctcctccttctaccagggcgactcgtgcttctacttcagctgctcgttcttcctctgcagctccacagcgctctgagtcttcttcccccataaagaaggctctccgggctatcttttgcatgtgtgctaagacagctaagaaagtgaagaagatagagaggcgtcaaaaggaagattggattgcagcaggcaaggatgtctctaatatttctgatgaagaggagtttgttgatccttttgctgcttatgagactgctcaagacattgctagtggtgagggtccctctggcacttctcatttcttcaatgaggagtcctcccactccaaggagagcagcgatgatgaggagtccgatgcacctacagagaatgtgcctacagatccagatgaggcagtagacatcgccgggcaagacattgactcacctcactccggcgacaccgagatcattccttctgatggcgatgatgatgaggcttga

SEQ ID NO: 8077 - DNA, 318 bp, Oryza sativa
  Clone ID: PAT_MRT4530_14614C.1
atggtgatcgtccaacaggtccgagacatcaggcagtcgaagcgacagtgcaatgagctgtggctagacagcaggagcggacgcaatcagatctttgcgctagcatggaggcagcggcccatgggcgacgacgttccagacaacgccaaagtgcagcatcacagcggcggaggtggtagcggccgggctgcagtccggtggaggcggcagtggctccaggcggtggtgccaccctgccctccgccagatccggccggaggggaggtggcggacctcggcaactgcagcggcggtggcgccctcccctccgccagatag

SEQ ID NO: 8078 - DNA, 3179 bp, Oryza sativa
  Clone ID: PAT_MRT4530_14615C.1
ttgtaggcgtactcctccggtggttcaagttgggttgtggacagtggctgcaccaatcatatgacgggagagaggagtatgtttacaagtcttgatgaggaaggtggaagtcgtgaaaatattgtctttggagatgatggtaagggaaaggtaatgggtctcggtaagattgccatttccaagaatcaatctctatctaatgtcctccttgtcaattctttaagctacaatttattatccgtttctcaattgtgtaagttaggatttaattgcttgtttaccgatgtggatgtaaccgtttttaggtgagatgactcatccatagcattcaagggtgtgttaaaaggtgacctctatctcattgatttcgacgtggatagagtgaatctggaggcatgcttgattgctaaatcctctatgggttggctatggcaccgtaggctagcccatgttggaatgaggaatttggcatctcttctaaaaggggaacacatccttggtctatctaatgtttcttttgagaacgatcgtgtgtgtagtgcttgtcaagccgggaagcaagttggaagtccacatcctatcaagaacatcatgactacaaacgaccactcgagcttcttcatatggacttatttgggcccatggcctacataagcattggaggtaacaagtatggttttgtcattgttgatgatttttcacgcttcacttgggtgtactttctccatgacaaaagcgaagctcaagatgtcttcaagcgtttcgcaaagcaagcccaaaacctctatgatcttactatcaagaaggtgcgaagcgacaatggtggagaattcaagaacactcaagtgaagaatttcttgatgaagaaggaatcaagcacgagttctccgccccctatgatcctccccaaaatggcattgttgaaaggaagaatcaaaccctcattgaagccgcaagggcaatgcttgatgagtacaagacttcggatgtcttttgggcgaaggccgtgagtaccgcatgtcatgccatcaaccgcttttacctccacaagatcctaaagaaaacttcatatgagctcttgagtggtaagaagcctaatgtttcatattttcgtgtctttgggagcaaatgctttattttgagtaagaggtctcgctcatctaagttctcacctaaggtggatgagggattcttacttggctatgaatcaaatgcatatgcctatcgtgtcttcaacaaaacctctggtattgttgaagtcactagggatgtgacatttgatgaatctaatggctcccaaggagagcaagttgttgtacatgttgtaggtgatgtggatccaagtcaagctataggtaccaaggctattggagacatacgacaagtcgagacgtaggatgaacaagaagatagggatcaacctccgtcatcgacatccaatagccctacaaccagtgacagtgaagacgtgccaacggcgtaagtggatgggatcgatgctgcgggcactttagagcatactgatcaggctcatgtccccttagtgcaccatccaaggatacatcacatagtccaaagagatcatcccgtcgacaacattcttggtgacataagacaaggggtaactactcgctctcgtgtcacaagtttttgtcaatactactcgtttgtctcttctttggaaccaaccagggtggaagatgcgcttggtgatccggattgggagatggctatgcaagaggagttgaataacttcactcgcaaccaagtatggacgtcatgggcaccaagtagatttttcgcaacaagaaagaagaacatggggtggttgtaagaaacaaagcccggttagttgcgcaagggttcacccaagttgagggtcttgattttggtgaaaccttcgcacctgtcgctcgccttgagtcaataagaattcttttagcctatgctgctcaccataatttcagattgttccaaatggatgtcaagagtgcctttctcaatggacctatctcggagttggtctatgtggagcaaccaccagggttcgaggatccaaagttgccaaaccatgtgtacaagctccacaaggcgctctacgggctcaaacaagcccctagagcttggtatgaatgtctccaagattttcttttaaaaaatggttttgaaattggaaaggcggatactactctcttcactaaaaaatttaagagtgatttattcatatgccaaatttatgtcgatgatataatatttggttctactaatgcctctttttgtgaagaatttagtagtatcatgacttaaaggttcgagatgtctatgatgggcgagttgaccttcttcctcgggctacaagtgaagcaagcacaagagggcatcttcatctctcaaactaagtacgtgaaagacatactcaagaagtttgggatggaggatgccaaacctatcaagacgcccatacctactaatggccacctagacctcgacgataatggtaaaagtgtggaccaaaaggtatatcgctccatgataggatctttgctttacttatgtgcatctcgtcccgacatcatgcttagtgtttgtatgtgtgcccattttcaagcggagcctaaagagtgccatttgattgccgtcaagagaattctaagatatttagttcatactcctaatcttggcttgtggtatcctaaggattgtgactttgagctttttggctattctgattcggattatgcagggtgtaaagttgatagaaaaagcacaatcgggacttgtcaattccttcccttgtttcttggtcctctaagaagcaaaattccattgccttatccaccaccgaagccgaatatgttgccgctggttcttgttgtgcccaactcctttggatgaaacaaaccctaaaagattttggctacaacttctccaagattccactcctatgtgacaatgagagtgccatcaaaatacctaacaatctcgttcaacactcaagaaccaagcacatagatattcaccatcacttcttgagagatcatgagactaaaggagacatatgccttacccatgtgagaaccgaaagccaattagccgacattttcaccaagcctttagatgagaaaagattttgcgagcttaggagtgagctcaatatcttagattctcgcaacattagg

SEQ ID NO: 8079 - DNA, 4125 bp, Oryza sativa
  Clone ID: PAT_MRT4530_14616C.1
acaaataaaaaaatagtaccacaattaaataacaacatacaaaaagaactagactccaagacaaaagatgacatacaaaattgttttctctaccttaggcttgtgtcgaacattcttagaagtactcactaattcctttttcatcttttgaatgacctacaaacaagtgaaaatcgggcgtggagacggtgaggtgggcggcggcggcggcggcggcgggggtgtgaatgggaacggcagtcagcgggggaaggggaggggagcgaatcgagggcggcgagggagaccgggacaggaaggggagcgccgccgttggagaaggccggcgaggcagtggcgcgcgaagccggcggcacggagcgggacggggcggtggcgaacgacgacgacgacgatggcgacatgttcgaggaggaggaggacgcgcgcaactcctccctcgccgcggccgcacgcgcgatcgaggagggtggggccgccgcgctcgcctccgacgaggccgatggcctctccctgccgcccgcccacccgtagctcctccccccaccactgccgcgtcgcccgtcgccgccatcaccgccgtcgcgtcacccgtcgccggctgccgacgccctcctcctcccgccggttgagtcagagaagggagagagagagagagatgaggaagggagagactgccctcgtcgtctcgtcgtctgccacggcaaacacagcgtcgagcccgtcttccccgaccacggtgactgtcgacgcatcggcgcttcgcgccgccctcggtgttcctcaacccgacgcgccctcttccgctggcgcgcccgtcgaccgccccgaacccgacctgtcaagtctcttcgcagcgctcggtgttccgcctcctcaccagcatgacgagcaacccgccggcgccgcgtccggtggcgcgccgctcgtcgacgacaccgttgatgcactccacgctcaagctgtgtcggtcctcaacgttaaggctcttgttccagtcgtcctcgacctcggcgcggcgaactactctaagtggcgcggcctcttccgatctttctaccaggaccgtggtcgccaggtgcaatagtttcggtgacctttactcctttccggcgaacttcttcaacaccatggccagctcctttgccgccagcaccaccacactttggcatcgtcggcttggacacctcggtcacgaggctcttgctcgcttggcccactcctcggtcattccttcacccaaaggcggctcctccaccatatgtcatgcttgtcagcttggtcgtcacattcgtttaccctttactacattgttttctagggctaagggaaactttgagttaatccattgtgatctgtggacctctcctgttcccagtgtgtcgggttttaaatattacctagtcattcttgatgattgctctcactatgtttggacgtttcctctacgtttgaaatccgacacttttaccacactttctcatttttttgcctatgtcaggactcagttttccacaccgattcgcagcattcaatgtgacaatggccgtgagttcgacaactccgccgcccgtaccttcttcctcactaacggcgtcaccatgcgcatgtcctgcccccacacctctccccaaaatggtaaagccgagcgcactctccgttccctcaacaacattgtacgctcgcttctctttcaagccaacctccctggctccttttgggtcgaggccctctacaccgctacctatctcatgaaccgccaccccactaaaactctccaacgccacactccctactttgccctccatggtgtccacccgtcttacacacatcttcgggttttcggttgccgttgttatcctaacctatccgccaccacacccaacaaactacccccccccccgctccaccatgtgtatctttcttggataccccagcgatcacaagggataccggtgttttgatcccattactaacagggttattatttctcggtatgtcgtgtttgatgagaacacgttcccctttgctgagaactctactgttgacacatgtactactgatctcttcttcttggatgattttactgctccagtacaggcgccgatcggctccggcaggcccagtggcgcgcggcctgggccctctccctccactcggctgcttggtgggccctccactacaccgcctggaccaccgcctgctctgcccactagcccacggcctgcgaactctccggctgtctctgggccaccctctactccaacaccgacaaggttggcctagcacacggcgctccaggacttccccagcacctcggccacctcggtcgacctcatcgatgctgggccgcgcgctcccccaagcacggccacgtcgccccatgacggatcttctagcgcttcatcaccgtttctaccgccgctcatgattccgacccgcgcaaggagtgcgcgcgttcctcttccacgcccgctcatcaccggcttcggcaagtctccggttgacaacgaccacggcatgaccaccagaggcaaggctggtgtaccggtacccactacacgtatgaaccttcaagccgctaccctgtctccgatcccgcgcacctaccgtgccgcgctcgctgacaccaactggcgagacgccatgcaagaggagtactcggcgttgatggccaaccgcacttgggatcttgtccctcctccaccaggcgccaacattgtcaccggcaagtggatttttcgacataagttccacgccgatggcagtctggaccgctacaaggctcgctgggtacttcgcggtttctcgcaacgccccggcattgacttcgacgagaccttcagccccgtcgtcaagccggccacagttcgcaccgtcctcaatctcgccgtctcccgcggctggcccattcatcagcttgatgtgaagaatgccttcttgcatggtaccctggccgaggcagtttactgcatccagccatctggtttcgtcaacactgcccaccccaactccgtctgccgcctcaacaagtccctctatggtctcaagcaagcgccacgggcttggtacaatcgctttgctaccttcttgcaatccattggtttcattgaggccaagtcggccacgtctctcttcatctatagacgtgacagcgatgtgatatatcttctgctttatgtcgacgacattgttcttactgcctcgtccacctcgctccggcgctagaccatctcatctatgcagacagagttctccatgaaggatcttggcgagcttcatcactttctcggtgtttcagtctctcgtcagtcctcagggttgtttctctcacagcggcagtattgcttggagatcttggagcgcgctggcatgacagattgcaagccctgcaacacccctgttgatactacctccaagctatcctccacagatggttccccagttgcagatcccaaagactaccgcagccttgcgggtgcattgcagtatctgaccttcactcgccctaacatacagtatgttgttcagtagatctgtctacacatgcatgaccctcgcgagactcatctcaccgctctcaagaggatcttacgctatgttcgcgacactacagatcttggactacacatccgccagtcttcttctcatgacttggtggcctattctgatgtggactgggctggctgtccagacacacgcaagtccacctcgggctacgctgtgttcttgggagacaacctagtctcctagtcctccaagcgtcagaacactgtctctcgttccagtgctgaggctgagtaccgagctgttgcaaatgccgtcgctgagacctgttggctgcgccaactcttgaccgagctgcatgccccgccagtccgagatactcttgtgtattgcgacaatgtcagtgcagtgtatctctcaactaatccagtgcagcatcaacgcacgaaacatgttgagattgatttacattttgtgcgcgagaaggtcgccattggatctgtgcgagttctacatgtgccaaccacatcccaatacgccgacatcttcaccaaggggttgccaactcctgtgttcacggagttccggtccagcctgaacgttcgctctaacaacgtt

SEQ ID NO: 8080 - DNA, 1350 bp, Oryza sativa
  Clone ID: PAT_MRT4530_14617C.1
atgtcgcatcaagagggaaacggagagatagatgaaggggacaagggagacgcttccagcaccgaggagattgcatcaaagggggctactattcactttgattacagcaaacttaatgttccttctcataacttcgtctccgtgccttccgggcgtgcacctcattttgatgggacacactatgccgcttggaagcacaagatgaagtggcatttaatctctttgcatccaagtatttggaaagttgtttgtacaggtattgatgtaccccatgatggcatggagctcacttcggagcaagagcaactcatccaccgcaatgctcaagcttccaatgcaattctctccgccttgagtccggaggagttcaacaaagtggatggacttgaggaggccaaggagatatgggacactttgcaattggctcatgagggatcacccgccgttcgtgaggccaagattgaattgttggaagaaaggctaggaagatttgtgatggatgacaaggagacaccacaagagatgtatgataggatgatgattcttgtcaacaagattaaaggacttagaagtgaggatatgacaaatcactttgtggtcaagagacttctccgtgcttttggtccaaggaaccccactcttgtatcaatgatacatgagaggaaagacttcaagaggctcacctctagtgacattcttggaagaattgtgtctcatgagatgcaagaagaggaagctcgtgaagtgaggcaaatggtgaagaatgccgccatgatcaaaaatcaagaagtggctttgaaggcaaaacaagaagaagagtcaagttgtgaagaaagtgaagatgaagagatggctcttattgtcaagagattcaagcactttcttcgcaagagtggctatgggaaaggaaggaaggatgatgacaagggaaagaggcaatcaaagagagcttgcttcaattgtggcgaatatggccacttcattgccgattgccccaagtcaaatgaagctaaggctaagggaggcaagaagaagccggagcgtgctcatgtggcggaggcacacatggcggaggtgtggtactccgaagatgaagaagcttccgaggccaagcctaagcccaagcccaagccaaaagacaaagttgaaggagagggtagtgttgctaccatcgccttcaagtcatcctcttcaagcaaggagcgtctcttcaacaacttgagtgatgacgatgacgactcctaccactactcatgtttcatggcccaaggccgcaaggtgatgactcaaagccctctcacacttctcttgatgatgattctagtgatgaagaaagtgataattaattag

SEQ ID NO: 8081 - DNA, 246 bp, Oryza sativa
  Clone ID: PAT_MRT4530_14618C.1
atgtcattagctgtacgtgttatccgtgataagatgaacattgatgcaaaagtgctgctgctctgcgccgcggcggtgcaggcctcggctgcgcggccgttgttgcgggagacggcggtggtgggcggcggcgacgaggggtcgcaggtgggaggaggagtagtggccggtggcaatcagtcgccggcggcgtacgacgacgagaagcgacttagccctggagggccagatccccagcaccactga

SEQ ID NO: 8082 - DNA, 1238 bp, Oryza sativa
  Clone ID: PAT_MRT4530_14619C.1
caataaattagtttcagtctcttgtttttaaaattttcgttttaggacgcgacagtgagttgaccttcttcctcgggctacaagtgaagcaagcacaagagggcactttcatctctcaaaccaagtatgtaaaggacattctcaagaagtttgggatggaagatgccaaacccatcaagactcctatgcctactaatggccacctagacctcgatgataatggtaaatgtgtggaacaaaagggttgtgactttgagcttttgggctattccgattcggattacgccgggtgtaaggttgatagaaaaagcacaaccgggacttgccaatttcttgggcggtcccttgtttcttggtcctccaagaagcaaaattccattgcattatccaccgccgaagccgaatatgtcgccgccggttcttgttgtgcccaactcctttggatgaaacaaactctaaaagactttggctacaacttcaccaaaatcccactcctatgtgacaatgagagtgctatcaaaatagccaataatcccgttcaacactctcgaaccaaacacatagatattcgccaccactttttgagagatcataagaccaaaggaaacatatgccttacacataaaagacagaaagcctctcaggatgtgtctggtgatgagagtcctcctattcggtttcctcgtggtcgtttgggtaaagagaaagtggttgaaggtggcagtggcagcggcactcgtacttctcctaggtttaccaggcaatccagcaaccgtccagttcagattcgagatgttgacagtggtcaaggaagtgatgctccttcttcaagaggtcgtgggagaggtggtggtcgcacttctagggctggaagggcgtctcatgatttccctgttggatctcgtgagaatcccgttcagctctacaagactcttggatttgacaccactcctatgcaccacattggaagacccaagtccaactaccttcatcagcttgccaagtgcagaagggacctgattatagctagagacaatccaatggttgagatgaagtggattgattggacttacataaggaagaagaacaatgaagtgttcaaccaagcaatgcaagtttgtcacaacaagaatcttggagatattcttgccttggagtatgattggaatgaggaggtcattgcacaattctatgcgacagcattgtttggtactactaggaagggaactccttatgta

SEQ ID NO: 8083 - DNA, 209 bp, Oryza sativa
  Clone ID: PAT_MRT4530_1461C.1
ggtgttcatgaattagggtaaatggaacgacctatagaagcacaagggccggcggagacaatcaaccaattagcacaatgcaggagagcaaggaaaccacgaatagacgtccaagaaagaagatatgaatgaccataaagaacacaggtagatgggatgatcgacatattataatgaataagtatgtcaggctgcataaacaaagaaaa

SEQ ID NO: 8084 - DNA, 510 bp, Oryza sativa
  Clone ID: PAT_MRT4530_14620C.1
atgcagtatgattatgcatgcagcacgttgtctaaatccgcgtacgtgctaagccacgatctgcaagatcacgtcggcgatgagcagtgtttgatcgttggagcacttgcaatactagcttgtgggtcagtgtttgtaggctccaaagggttcaactcagtttcattcaagaaaagaagaacaaaaaagaatgaaaaagatggctgcgagacagggctagtggtgaaagctactactaaatttatcttcgtgtggaatttcaccatcgtcctgtctgcacgattggtgattacaggaagcacagcaaagttagaaggggataagagagtgtggccaccaatgatggttctgaagttgatagggcaccaacaaccagtagcatgtagcagtagtttttcaagcatgctactctattacctatcattagatcttagtggtttccacgccatccttggtcattacaaacggggattcagttctcctctgaataacaagtggcacaatccttaa

SEQ ID NO: 8085 - DNA, 2067 bp, Oryza sativa
  Clone ID: PAT_MRT4530_14621C.1
cttcgcctccgcgtccgttgctccggtcctgcctccgtctccgcctcctcgccgcggcgcggcggcgacgtccaccgccgcctagggttcgccggggagggcgccgccctcgtcgccgtcgcaggtcgcccgccgccgggtatgccactccgatctgccacccgccagctctccttcgagctcctgggggagggcggcctcgccgcggccgacgacgccgacgacgacctctccccgcgctccttccccgacaccacctccgatgggcagcggcgccggaggcggcgctccaagcgcaagcgcgggctccggagccccccgatcgaggaggaggagaaggaggggacgccgcgccgcggcggcgtcgtcggggtgtcggatctggtgtccgtgtccgtggtggagcgcgagagctccgacgcggagaggtccgcggcgagctgcgtgacgtacgtgggcgtcggggtggagctgcggcagaggagcgtctccgggagcgggagggtggtgtcccgggaggacgcgaccagcagctgcggcagcagcgcgcgggagagcgccgcggcggctgccgcggtgccggaggcggcgcccgcggcgtggcggcctgaggcgaacggtggcgggaagaagctggagaaggaggattcgctagactgggagaggtacatgaaggagaatggcaacgttcttggagaagttgagcgccttgacaactcaccattcagatacttccttggagaactatatggtggaaattcacttagaggcacaatttcagcgggcaatgataagaaacgacagcgggtctacaacactatgtttcatgtgccgtggagatgtgaacgggagctgattgtcgcaggattctttgtctgcttggattcatttctatctctactcaccattatgcctgcaagaattgccattacagtctggcgggtgcttaaaaccaggcagtttctgaggcctaatgctgctgatttatcagattatggatgctttgtagttctagctttaggagttgcttctttgcaaatgatagctcaggcgatcaccctgtcaacatgtattattgcccacaacaatgcactattggctcttttggtgtccaataattttgctgagataaaaagcaatgtatttaagcgtgttagcaaagagaaccttcacaatttggtatactatgacatcattgagaggtttcacatcacatcctttctattgtttgtactagctcagaatatcttagaagcagagggaccatggtttgacagttttcttattaatgcctccttggtatttatgtgtgaagtacttattgatgctatcaagcactctttccttgcaaagttcaatgagataaagccagttgcttattcagagtttttggaagacctatgcaagcagattttgaatgacaaaactgatgaccgtcagaaggacctaacattcatcccccttgcccctgcgtgtgtggtgattcgtgtattgactccagtatatgccaccctccttcctgctggcccatttatctggagagtattttggatcctgctttggtcagtcctgacctacttcatgctcgccgtattcaagatactagtgggattggtattgcgctgccttgcaacttggtatgtaaatcttcgtctcaaaaacaaacaacatgtggactgagcattttgcacttggcaccaaagtttggtgtgaaagataacatccccgggaagacagacatttgctgtggttcgtgaagtacagcaaccgctgcagctgctgcttgagttcagatatacatatatgcccatatggcaaaattcttgatgatagtatagtacagcttagaggttctctgatcctgaggaactgggtaaagtccaattttgcggtgttcacggtttattttatttctagtacctattgttcatatagctcatagcttcatcatatataagtatattctcaacctagagaagatgtttgcaaagcctgctcttctgtccacaagacatgtttgtacatttcctttgagaaaaaaaaaagacatgcttatctcatgtgtgc

SEQ ID NO: 8086 - DNA, 5292 bp, Oryza sativa
  Clone ID: PAT_MRT4530_14622C.1
atgtcgtacttagggggaaagaacggggaaaatggaaatgaagatgaagcaagcagcaagggaactccaccacccaagggagctactataccttttgattacagcaaacttaccattccttctcacaacttcgtctccgtgccttccgggcgtgctcctcaatttgatgggacatattatgccgcttggaagcacatgatgaaggtgcatctaatctctttgcatccaagtatttggaatgttgtctgtacaggtattgatataccccatgatgacatggagctcacttcagagcaagaacaactcatccaccgcaatgctcaagcttccaatgcaattctctccgccttgagtccggaggagttcaacaaggttgatggactagaggaggccaaggagatatgggatactttgcaattgacacatgagggatcacccgccgttcgtgaggccaagattgaattattggaaggaaggcttggaagatttgtgatggatgacaaggagacaccacaagagatgtatgataggatgatgattcttgtcaacaagattaaaggacttgggagtgaggacatgacaaatcactttgtggtcaagagactttttggtccaagaaatcccactcttgtatcaatgatacgggaaaggaaagacttcaagagactcaccccaagtgacattcttggaagaattgtgtctcatgagatgcaagaagaggaaggtcgtgaagtgagacaaatggtgaagaagtttctttgaaggcaaaacaagaagaagagtcaagttgtgaagaaagtgaagatgaagaaatgacttttattgtcaagagattcaagcactttcttcgcaagagtggctatggcaaagggaggaaggatgatgacaagggaaagaggcaatcaaagagagcatgcttcaattgtggcgaatatggccacttcattgccgattgtcccaagtcaaataaagctaaggcgaagggaggcaagaagaagccggagcgtgctcatgtggcggaggcgcacatggcggaagtgtggtactccagagatgaagaagatcccgaggtcaagcccaagcccaagtcaaaagacaaggttgaaggagaaggtggtgttgctaccgtcgccttcaagtcatcctcttcaagcaaggagcgtctcttcaacaacttgagtgatgacgacgacgactcctatcactactcttgcttcatggcacaaggccgcaaggtgatgactcaaaagccctctgaaacttctcttgatgttgattctagtgatgaggaaagtgataatgaattagatgatgtgcttaagagctttagcaaacccgctatgcaacatttggctaagttaatgagagctttggatagtaaagaacagtcactcgaaaggcaagaagaattgcttattcttgagaagaaaagaaaccttgccttagaggagagcttagctaaagaatgtgctaaaaatgaacaacttgctaatgagcttaatttggctaatggttctttagctagccttagggatgtcaatgaaactcttcaagaaaaatttgctaatttagacaaaagtcataaagatcttgaagttcaatttgacactctttggaatagcacctctcaaccaaatgtggtttctaattcttctaacccttctactagcaatggttgtgctaggtggtacaatattgatttgaactcttatgctactaatattgatgatatgcaagctcttaagaaagagaatgaaaggttgggcacattggtgaaatatggatgcatgaaggcataccattcattagatgccctttacaagaccatcaccgctcatcctaacaaggatggatacaggctcgggttttcgggtggaagtcctgtgtctaagtgtgtaatggtaaatgggaaagaatgcttgatgtttgtgagagaaggtaaagcaccacaagcaagtgaggtgactagtcttgtgagctgccagggacccggaacatccggacaaaccgggagaaacatccgggtgggagtctctgtctctcaaaaattcccaccaggaagttccggccagtttgccaggaagttccgggccaatgaccatgcacaagacatgaccggaagttccgggcacaatgcctggaggttccggaaagagggtctttactatgattcatatgcatactcctccgatggttcaagttgggttgtggacagtggttgcaccaatcatatgactggagagaggagtatgtttacaagtcttgatgagtagaacggaactcgtgagaatattgtgtttggagatgatggtaaaggaaaggtaattggtctagcctacataagtattggaggtaacaagtatggttttgtcattgttgatgatttttcccgcttcacttgggtgtattttctccatgacaagagtgaggctcaagatgtcttcaagcgtttcgccaagcaagcccaaaacctctatgatctcactatcaagagggtacgaagtgacaatggaggagaattcaagaacacgcaagtggaggaattccttgatgaagagggaatcaagcatgagttctccaccccctatgatcctcctcaaaatagcattgttgagaggaagaaccgaactcttattgaagccgcaagagcaatgcttgatgagtacaagacttcggatatcttttgggtggaggccgtgagcactgcatgccatgccatcaatcggctctacctccataagattctaaagtttcatattttcgtgtctttgggagcaaatgctttattttgagtaagaggccttgctcatctaagttttcacctaaggtggatgagggattcttacttggctataagtcaaatgcacatgcctaccgtgtcttcaacaaaacctccggtattgttgaagttacaagagatgtgacatttgacgaatctaatggctcccaagaagagcaagttgttgtacatgttgtagatgatgcggatcctagacaagcaattggttctaaggctattggagacatacgaccagtcgagacgcaggatgaccaagaagatagggatcaaccttcgtcatcgacatccaatagccctacaacaagtcaagagtcagttgacccggaagttccgggaccagatgatcggaacctccggacctccctaggctaggaagttccgggtccatctcccaggaagttcggggcagaggacagtcaaggcgtgcctacggcacaagtggatgggattgatgccgagggcactgtagagcatcctgatcaggctcaggtcccctcggtgcaccatccaagaatacatcacactgtccaaagagatcatcccgtcgacaacatacttggtgacataagaaagggggtaactactcgttctcgtgtcgctaacttttgtcaacactattcgtttgtttcttctttggaaccaaccagggttgaagatgcacttggtgatccggattgggtgatggctatgcaagaggagttgaataacttcacttgcaacctagtatggacatcggtggagagacccgaccaaaatgtcatcggcaccaagtgaattttctgcaacaagcaagatgaacatggagtggttgtaaggaacaaagcccggttagttgcgcaagggttcacgcaagtcgagggtctcgattttggtgaaacattcgcacccgttgctcgtcttgagtcaatccaaatgcttttagactatgccgcttaccatgatttcaggttatatcaaatggatgtcaagagcgcctttctcaatggacccatcttggagttggtctatgtggagcaaccaccggggttcgaggatccaaagttgccaaaccatgtgtacaagctccacaaagcgcaaaacgggctcaaacaagccctagagcttggtatgaatgtctccgagattttcttttgaaaaatagttttgaaattgggaaggcggacactactctcttcactaaaaagtttgaaaatgatttattcatttgccaaacttatgtcgatgacataatatttggttctactaatgcctctttttgtgaagaatttagtagtatcatgactaaaaggttcgagatgtctatgatgggtgagctaaccttcttcctcgcgctacaagtcaagcaagcacaagaaggtactttcatctctcaaaccaagtacatgaaggacattctcaagaagtttgggatggaagatgccaaaaccatcaagactcccatgcctaccaatggtcaccgtgatcttgatgaaaatggtaaatgtgtggaccaaaagggttgtgactttgagcttttgggctattccgattcggattacgccgggtgtaaggttgatagaaaaagcacaaccgggacttgccaatttcttaggcagtcccttgtttcttggtcctccaagaagcaaaattccattgcattatccaccgccgaagccgaatatgtcgccgccgattcttgttgtgcccaactcctttggatgaaacaaactctaaaagactttggctacaacttcaccaagatcccactcctatgtgacaatgagagtgccaccaaaatagccaataatcccgttcaacactctcgaaccaaacacatagatattcgtcaccactttttgagagatcatgaaaccaaaggagacatatgccttacccataaaagacagaaagcctctcaggatgtgtccggtgatgagagtcctcctattcggttccctcgtggtcgtttgggtaaagagaaagttgttgagggcggcagtggcagtggcactcgtacttctcccaggtttacaaggcaatcaagcaaccgtcctgttcagattagggatgttgacagtggtcaaggaagtgatgcacctaatacaagaggacgggggagaggtggttgtcgcagttctagggctggaagggcatctcatgatttccctgtaggatctcgtgagaatcccgttcggctctacaaaactcttggttttgacaccactcctttgcaccacattggaagacccaagtccaactaccttcatcaacttgccaagtgtagaagagatctgattatggctagagaaaatccagtggttgagatgaagtggattgattgggcttacatgaggaagaagaacaatgaagtgttcaaccaagtgatgcaagtgtgccacaacaagaatcttggagatattcttgccttggagtatgattggaatgaggaggtcattgcacagttctatgcgacagcattctttggtactacaaggaagggaaccccttatgtg

SEQ ID NO: 8087 - DNA, 5246 bp, Oryza sativa
  Clone ID: PAT_MRT4530_14623C.1
atgtcggacttagggggaaagaacggggaaaatggaaatgaagatggagcgagcagcaaggaaactccatcacccaagggagctactataccttttgattacagcaaacttaccattccccctcacaactttgtctccgtgccttctgggcgtgctcctcaatttgatgggacacattacgccgcttggaagcacaagatgaagttgcatctaatctctttgcatccaagtatttggaaagttgttttgtataggtgttgatgtacctaatgatgacatggagctcacttcggagcaagagcaactcatccaccgcaatgctcaagcttccaatgcaattctctccgccttgagtctggaggagttcaacaaggttgatgggcttgaggaggccaaggagatatgggatactttgcaattggctcaagagggatcacctaccgttcgtgaggccaagattgaattattggaaggaaggcttggaagatttgtgatggatgacaaggagacaccacaagagatgtatgataggatgatgattcttgtcaacaagatcaaaggacttgggagtggggacatgacaaatcactttgttgtcaagagacttctccgtgcttttggtccaagaaatcccactcttgtatcaatgatacgggaaagaaaagacttcaataggctcaccccaagcgatattcttggaagaattgtgtctcatgagatgcaagaagaggaagctcgtgaagtgaggcaaatggtgaagaatgctgccatgatcaaaaatcaagaagttgctttgaaggcaaaacaagaagaaatggcttttattgtcaagagattcaagcactttcttcgcaagagtggctatggcaaacggaggaaggatgatgacaagggaaagcggcaatcaaagagagcttgcttcaattgtggtgaatatggccacttcattgccgattgttctaagtcaaatgaagctaaggctaagggaggcaagaagaagccggagcgtgctcatgtggcagaggcacacatggcggaggtgtggtactccggagatgaggaagatcccgaggtcaagcccaagcccaagctaaaagacaaggttgaaggagaaggtggtgttgctaccgttgccttcaagtcatcttcttcaagcaaggagcgtctcttcaacaatttgagtgatgacgacgacgactcctaccactactcttgtttcatggcccaaggccgcaaggtgatgactcaaaagccctctcacacctctcttgatgttgattctagtgatgaggaaagtgataatgaattagatgatgtgcttaagagctttagcaaacccgctatgcaacatttggctaagttaatgagagctttggatagtaaagtacaatctctcgaaaggcaagaagaattacttattcttgagaagaaaagaaaccttgccttagaggagagcctagctaaagaatgtgctaaaaatgaacaactagctaatgagcttaatttggctaatggttctctagctagccttagggatgtcaatgaaactcttcaagagaagtttgctagtttagacaaaagtcataaagatcttgaagttcaatttgacactctttggaatagcacttctcaaccaaatgtggtttctaattcttccaacccatctactagcaatggttgtgctaggtgttacaatattgatttgaactctcatgctactaatgttgatgctatgcaagctcttaagaaagagaatgaaaggttgggcacattggtgaaatatggatgcatgaagacataccattcaaaagatgccctttacaagaccatcaccgctcatcctaacaaggatggacacgggctcgggttttctagtggaagtcctgtgtctaagcgtgtgatggtaaatgggaaagaatgcttgatgtttgtaagagaaggaaatgctccacaagcaagtgagatgacttgtcccctcactggtcagacacccggaacttccgggcaaaatgaccggaagttcctgtcctgtaagacaggaagttccggacattttgtcaggaagttctgggcttctgataggccaaaggggctggccggaagttccggttataatgccagaaagttccggccagagggtctttactatgattcatatgcatactcctctggtggctcaagttgggttgtggacagtggctgcaccaatcatatgacgggagagatgagtatgtttataagtcttgatgaggagggtggaagtcgtgaaaatattgtctttggagatgatggtaaaggaaaggtaatgggtctcgcctatataagcattggaggtaacaagtatggtttcgtcattgttgatgatttttcacgcttcacttgggtgtactttctccatgacaaaagcgaagctcaagatgttttcaagcgcttcgcaaagcaagcccaaaacctctatgatctcactatcaagagggtgcgaagcgacaatggaggagaattcaagaacactcaagtggaggaatttcttgatgaagaaggaatcaagcacgagttctccgccccctatgatcctccccaaaacggcattgttgagaggaagaaccgaaccctcattgaagccgcaagggcaatgcttgatgagtacaagacttcggatgtattttgggcggaggccgtgagtaccgcatgtcatgccatcaatcgcttgtacctacacaagatcctaaagaaaacctcatatgagctcttgagtggtaagaagcctaatgtttcatattttcgtgtctttgggagcaaatgttttattttaagtaagaggcctcgctcatctaagttctcacctgaggtggatgagggattcttacttggctatgaatcaaatgcacatgcctatcgtgtctttaacaaaacctccggtattgttgaagtcactagggatgtgacatttgatgaatctaatggctcccaaggagagcaagttgttgtacatgttgtaggggatgtggatccaagtcaagctataggtactaaggctattggagacatacgaccagtcgagacgcaggatgaccaagaagatagggatcaacctccgtcatcgacatccaatagccctacaagtgctgtgtctgctgagccggaagttccgggtcctattgatcggaacctccggacatctccaggcccggaagttccgggttctacagtccggaacctccagaccagtggtagtgaagacgtgtcaacagcacaagtggatgggatcgatgttgagggcactttagagcattctgatcaggctcaggtcccccccagtgcaccatctaaggatacatcacactgtccaaagagatcatcccgtcgacaacatacttggtgacataagaaaaggggtaactactcgctctcgtgtcgcaagtttttgtcaacacttctcgtttgtctcttctttggaaccaaccagggtggaagatgcgcttggtgatccggattgggtgatggctatacaagaggaattgaataacttcgctcgcaatcaagtgtggactttggtggagagacccaagcaaaatgccatcggcaccaagtggatctttcgcaacaagcaagatgaacatggggtggttgtaaggaacaaagcctggttagttgcgcaagggttcatccaagtcgagggtctcgattttggtgaaaccttcgcacctatcactcgccttgagtcaattagaattcttttagcctatgccgctcaccatgatttcaggttattccaaatggatgtcaagagtgcctttctcaatggacctatctcggagttagtctatgtggagcaaccaccggggttaaaggatccaaagttgccaaaccatgtgtacaagctccacaaggcgctctacgggctcaaacaagcccctaaagcttggtatgaatgtctccgagattttcttttgaaaaatagttttgaaattggaaaggcggatactactctcttcactaaaaaatttaagagtgatttattcatttgccaaatttatgtcgatgtcataatatttggttctactaatgtctctttttgtgaagaattagtagtatcatgactaaaaggttcgagatgtctatgatgggcgagttgaccttcttcctcgggctacaagtgaagcaagcacaagagggcaccttcatctctcaaaccaagtacgtgaaagacatactcaagaagtttgggatggagggtgccaaacctatcaagacgcccatgcctactaatggccacctagacctcgacgataatggtaaatgtgtggaccaaaagggttgtgactttaagcttttgggctattccgattcggattatgccgggtgtaaggttgatagaaaaagcacaaccgggacttgccaatttcttgggcggtcccttgtttcttggtcctccaagaagcaaaattccattgcattatccaccgctgaagccgaatatgtcgccgccggttcttgttgtgcccaactcctttggatgaaacaaactctaaaagactttggctacaacttcaccaagatcccactcctatgtgacaatgagagtgccatcaaaatagccattaatcccgttcaacactctcgaaccaaacacatagacattcgccaccacttcttgagggatcatgagactaaaggagacatatgccttacccataagagacagaagctttctcaagatgttcctggtgactcgagccccccggttcgtggtcctagggggagattgggcaaagaaaaagttggagatttttacaatgggagtcagattctgatccattccaggagggctggtagcattgtcattcgtgatgcaccccgctctccctctccagctgcatctgagtcagatgatggtggcaatgaggatgagcctggttctgaaagcaatcctttgaggctgtacaagacaagggctgttgatcctgatcctaaacgcccaagagtgaactatctgaaaaatctactcaagtgtggaaaggacatgatcatgggaagatctcatccagtggtagagatgaagtggctagattggcagtacatgtcctcaaagaacaacatagtcttcaatgaggtacgcaaggtgtgtgagcgcaagcacgtggcagatttgttggccttgcagtattcctagaatgaggaagtgattggatagttctactccactgctttctttggcaccaccaagaaaaggcttgatttctgat

SEQ ID NO: 8088 - DNA, 407 bp, Oryza sativa
  Clone ID: PAT_MRT4530_14625C.1
ctccctttctgcctgtcctccggccccgccgccagagcccttgcagaagcttccggagcccgcgccgacgatctgatcgccgtcgcgtgccatggccgacgaggcgaaggcgaagggtaatgcggccttctcggccggccgctacgaggaggcggtgcggcacttcactgacgccattgcgctcgccccggggaaccacgtcctctacttcaaccgttccgccgcgctcggcttggtccaccgttactccgaagggctcgccgacgcctagaagaccggcgagctgaagcccgactgggctaaggggtactcccgccttggagccgtccacctcgcttcggggggcagccagagcgccgtatttcgcctacgagaaggggtttcgtcctcaacccccacccaccgag

SEQ ID NO: 8089 - DNA, 353 bp, Oryza sativa
  Clone ID: PAT_MRT4530_14626C.1
ccccgcgtacggatgcaaaccaacatatcattctacttgatcatgtcgatagcacaccaagaagcggatgcgcgatcgttcttgcggcgccggctccggcgggtgctagatcataaacacggcgcgcatcaacgcgtgcaaggggagacaggacactgacagactacaccgggaccaagggcgcgatagtcgcgttgacgagggcgctggcgctctagatcgcggaggaagcgatccggataaactgcatcccaccttggcccatctggacgcccttgatctccgcatgcatcgctgacgacaacgtgaggaagttaggctcccatgtgcctatggccccatccggccaatcg

SEQ ID NO: 8090 - DNA, 199 bp, Oryza sativa
  Clone ID: PAT_MRT4530_14627C.1
agaggccgcggcatcgtcagcgcgacggggaagggacgcgtggcggcagcagagaagcggcgtctcggcgtctcgccgccggcgggaggtccgccgcccttccaggctgcagcggccgccgcgaccacaggtttgaccagccccctcctacactcctcgccgctcctcgccgccgccgcgtctccctgcaactacgatc

SEQ ID NO: 8091 - DNA, 516 bp, Oryza sativa
  Clone ID: PAT_MRT4530_14628C.1
atggctacgtccaatcgatattttctcctgcggtcctgcctaaatgggcatagagcagttaccgccgtcgacgtgaagttgccagccatggaaggggcgtgcctccgcctcgtcgtgaacccgcagcaaccgacgacgctcctcgccgtcttcctcctcctcctcgtggccgccgccgtcgcgccgccgcacgtcctcgccgccgaccacgtcgtggggggctccatctggtccatccctcccaggcccggcctgtacagagcctgggccgacaaccggacgttcgtcgccggcgacaacctcgtgttcaggttcgagacggggatgtacaacgtggtgcaggtggggaggcgggagttcgacgactgcaccgccgacgacccctaccgggactggaccgacggccccgccgtcgtcacgctcggctccgccgccgtccgctacttcatatgcaccgtcggcaactactgctccctcggcgtcaaggtgtacgtcgcctcccagaatgcgccctag

SEQ ID NO: 8092 - DNA, 459 bp, Oryza sativa
  Clone ID: PAT_MRT4530_14629C.1
aacgagaaaagaagagtttaaaatttacaaaacacaatacactctctctgatggacagaggatgaaaccagtacaaaatagcgtagcagctttgatcaaacatgataaaaaaaaaagcagagatatgcatgccaccattctgaacatctgacgaggtgacaaacgcttacattttgcagggaaattaacacagtaaaagttcatcaaaaatttcctaccaaacaaaaacctccatttccaaatttaacgagcccttagtgccatcgtcgtcgtagtgcacgcgccgtagacgaacagttcggatatcttaaagcggagagatcgacgtcgacgcacgcatggcgatggcgacggtcgccgtcgcgtcgacgcgtcgacggccgcaaccaaattattggggagttaggtgtccatcaaaccgcactagctccatgtccattggagtccgatgatgacctc

SEQ ID NO: 8093 - DNA, 325 bp, Oryza sativa
  Clone ID: PAT_MRT4530_1462C.1
atacagctcaacccgaaagcaagaactcgtcgaaataaaacaaaagcaaaagggtggtgatgcgccgaaattgtattgaacgtgactctatccatgtgcggcaatcatcttgaaacatatcaactcaacccgatgttgtacatcaagtcgtattgtcggaatcggctgcatcggcttacctagtccgattcggacccaaccgatcctaattgtagccgatctagactccagccgattcttgctctgttcttcaatcgatctccgcctttgactccacttcaatctaatcttcttttccgatgctgatattaccaaatttggtcgt

SEQ ID NO: 8094 - DNA, 453 bp, Oryza sativa
  Clone ID: PAT_MRT4530_14630C.1
atgacggacctcagtggcggcagcggcaactccggcttgtttttgccccttctcttcctctctgcggcggcgcctagatccatccaccaccaatgccaaccaggggaggacgcggtggcaggggaggacgcggcgggaggggaggccagccgggtgagctcggccaaccgggagagccgggccagggcggcgggaggggaggacgcggcgggaggggaggccagccgggcgagctcggccaaccgggcgagccgggccagggcggcggcaggggaggacacggtgggacgggaggacagccgggcgagcccggccaaccgggccagggcggcggccccggcggccgcggcggatccgcgttcggccctcacggcggcgacggcggcactggcggcaccggcggctttctcggcattggaggccgcggcggtcgcggcggcgacggcggcctag

SEQ ID NO: 8095 - DNA, 1258 bp, Oryza sativa
  Clone ID: PAT_MRT4530_14631C.1
acacaatgatggccacgagaggggttggcagcgccgtcctcctctttcgccgctcagcgcgccgccctccatcgccgctcagcgtgccggcctccgtctcagccgccgccgggctcatcctcctccgtcgccactcagtgcaccggccaccgtctcagcccgcaggagaagtgtaggaaatctgccgctcgaatcagatttttttaagtttgcatcaactgacatcggccctcaactagccgttagctttgaagtgcataaatagcccccgttagccttgtgcaccattttcccctgttctttctatttgctcatcaactgtggaagaagcttgctgatcctttgctcttctcttcactatctgcataatttttccagaagctttactcatcgtctagccaccatagctggacgttacttgctcgtgtaacaacaagcatcagtttggtaacatctgcacaccatgaatccaagctaccgacgtatatcagaaagtgatgatgagttcattcattttgttctgcctactttaggagattcatcacaatcatcttgtattaggagaccaatgcacacgtcaaaacttacagggggttgccgtgtacatgagattttaacaggacatgaaagattatgcaaaagaaacttccgtatggaggtcgacatttttcatgcactagtcaataagttacgtgagaaagagtacctaactggtactatatgtttcagtagaagagcatattgctatattcttatatacagtggcaaaaaatgcaaccaatgaaacacttcaagattggtttcagcatagtccagacacaatacatagatatttcaaagcagtgcaggaagcaatcacaaatctcacatctgtctacattcgtgcaccatccctacacccacatccaatcttgaggaaaccacaattttaccccttttttcagaattgtattggtgctatagatggtactcatatccctatgaaacttccattggatgagcaagagtcatatagaaataggaagcaaacaatctctcagaattgtatggttgcttgtgattttgatttgaagtttgtgcatatacatcctggatgggagggatcagcttcagatgcaagagttttacatgatgcacttaatcatggttttcaagttcctggtggtaaattttatctcgtagatgctggttatgcaaatactccgcaatccctagccccacgccgcagccctaggccagccaccacctgccacctctg

SEQ ID NO: 8096 - DNA, 142 bp, Oryza sativa
  Clone ID: PAT_MRT4530_14632C.1
ggcttccatctcttaatatctcttcatacagaaaatgtatgttgttgaaagctttgtgacaaagaagtaactctttgactactgatgggagatgtactgaatctttgggagatatactctttgcaattctggaatggaacaa

SEQ ID NO: 8097 - DNA, 2317 bp, Oryza sativa
  Clone ID: PAT_MRT4530_14633C.1
ggggtaggcagcgccgtcctcctctttcgccgctcagcgcgccgccctccatcgccgctcagcgtgccggcctccgtctcagccgccgccgggctcatcctcctccgtcgccactcagtgcaccggccaccgtctcagccgccgccgggctcctcctcctcctccgtcgccgctcagcgcgccggcctctccttccccgtagccgctcggcgcgccggcctccttctccgccgtcgccgggctcgggagcgacagatctgccgccgccgatgctcccgggcctagggcgcccaggtcgcgtggcagcggtccctgagacggctcggcgacggcgtgcggcaccgtcgacagcttgcagcgccggcttcctaccccctcaccgcgtccccagactggccaggtcggcctgcacggccgaaccggctccagtccaccggccacacgtgagcgacgcctccacggcgtccgagtcgacgagagcgcgtacgatagcaatgacagaagatggccggaagcaagcacagatctcacatctgtctacattggtgcaccatgcctacacccacatacaatcttgaggaaaccacaattttaccccttttttcagaattgtattggtgctatagatggtactcatatccctatgaaactccattggatgagcaagagtcatatagaaataggaagcaaacaatctctcagaattgtatggttgcttgtgattttgatttgaagtttgtgcatatacatcctggatgggagggatcagcttcagatgcaagagttttacataatgcacttaatcatggttttcaagttcctggtggtaaattttatctcgtagatgctggttatgcaaatactacttgttgctgctcatcgccgccgcccgccggcaacaacttctctgaaccaaacaagattgccattgggcaggcgctatgaacccttgtgtgttacagctgcgaccccattcgcggcgacccaaatgctaaggtatatgcaaggaagcagcagggggcatcagatctacgcataacaacgcaagaggaggcaccaaacctgcaatcaacgcgtccttgccgatctctgccgtggctcttctcgttgttgccgttgcgtcctgtcacctgggcggcgaaggtgcatccggtgccggcgatcgatgtgggagaggaggtccagtacccaatcatggagccaggagaggaagtggatgcaggattcagtacaggtgaatgcccctgtttgatttcatgggctaatgtttacccctcaccttttagcctcaaattagctctcaagaatacaaacagtgttactgcaggagcaacactgcaaattaaagtagaggcactgagccggcgaggggccgcagcgtgcaatggctgggatgtcctgtggtggctggcaatcgccgacgcgaatcagcatgatgagtttccaacctccgaatgctctgatgatgctgattccaccatctgcaggtgcaaatgtatcaagaaagaaaaaacgagcaacctcacaacaaggccccatcaaagcctgaaaatttacacggattcatcagggccagagtttcccgagcagccctgtcatcctgaggtcaaactcaacttcacagtgtgcaaacgcgccaacctttgcaaagctaatcaaggccgggtgaaacaccgaaaaatacagattcaccgctcgacgattaaccatcgtatgatcgtgttctatgcttgacgccattggcagggcatcagctccccgtcgtttcgtcgatgctgtgcagcgaaggccgccattgccggtgccgcgcgctggagctccggttgctgtcctgacgcgccaactgatcaagactcgcatccaacgccgcctcgtcgtcgaagttgtcgctgtcgttgtcgttctcctccgcggcctcatccacctccgccgccgccgaagcggcggcgcgtgccttgctctgcagcttctgcctcgactcctccagctgctgctgcgccttcctcaccttctcctccttcctcgcctgcaccgccttggtcacctcgtgggtggtgatgaggcggtaggcgtggccgaggaggagggtctccttgggcttgaggagcttgacgcgggtgaggcgcacggtgcggcgcgcgccgccgtcgccgtcctggcgctcctcggcgacgcggagcgtgacgagcgcgatgtagtgccccgggttggcgcgcatcacctccgcggcgctggtcgaccagcacagccgctccacgcgcccgcccgggtgctggatcaccaccgccgccgcctccgccgcctggcaattccccat

SEQ ID NO: 8098 - DNA, 2032 bp, Oryza sativa
  Clone ID: PAT_MRT4530_14634C.1
gcacgaggcctcgtgccgaattcggcatggaggtgacatccaccccagcgatgctgctctacgccgccctgttcgcggcggcgctgctgtacctcgccgtcgcggtccggcgcggccgcggcgccggcctgccgccgggtccgacggggctgccgctcgtcggcagcttgctgtccctcgacccggagctgcacacctacttcgccggcctcgccgccaggtacggccccatcttctctatccgcctcggctccaagctcggcgtcgtcgtcacctcgccggcgctggcgcgggaggtgctgcgcgaccacgacctcgtcttctccaaccgcgacacgcccgacgccgcgtgctccatctcctacggcggcgggcagaacatcgtgtggaacccggtcggccccacgtggcgcctcctccgccgcatctgcgtccacgagatgatcggccccgccggcctcgacagcctccacggcctccgccgccgggagttcatggccacgctccaccacctgcgcgcgcggtccggcgagcccgtcaacgtcggcgcgcagatgttcctcaccgtgatgaacgtggtgaccggcgcgctgtggggcggcaacgtcggcagcgagagcgagcggacgacggtggggaaggagttccgggagctcgtcgccgacatcaccgagttgctcggcgcgcccaacgtgtccgacttcttcccggcgctggcgccgctcgacatccagggcatccgcaacaagtccgacctgctcaaggaccgcttcgacgacatcttcgccaggatcatccagaagaggaccgagtccgaccatgccgccgccgccggcgagacggcgtcggacttcctcgagtacatgctcaagctggagaaggaaggcggcgacgggaagaccgccttcaccatgaccaacgtcaaggccctgctcatggacatggtgatcggggggacggagacgacgtcgaacaccgtggaatggggcatggcggagatgctccagaacagggggacgctgcgcaaggtgcgggaggagctcgacgcggtggtggggcgcgacggcgtggtggaggagagccacctcccgaagctgcactacctgaatctggtggtcaaggagacgctccggctgcacccggcgctgccgctgatggtgccgcactgccccggcgaggacgccacggtgggcggccaccgcgtcccggcgggcgcccgggtgttcgtcaacgtgtgggcgatccagagggacccggcggtgtggaaggacccggaacacttcatcccggagaggttcttgccggcggacggcggcggagggcggaggctggacttcaccgggagcgagcaggagtacatgccgttcgggtccgggaggaggatctgcgccggcgtcgccatggcggagcggatggtggcctactcgctggcgatgctggtgcaggcgttcgactgggagctgccggccggcgagcggctggacctcgccgagcggttcggcatcgtgatgaagaaggccacgccgctggtcgccgtgcccacgccgaggctctccaaccctcagctctactccgcctagataccaaaggttttaaatctccggctataattgtagctagctattcgaaaatgatctagctatttactctcatatgcattttagctgttatttaccgtttgagataatctaccacaaaatatcttagtctgctatttaaaacactgctagatgctgatgtcactccatcaatcaaatacactcaagtcaaatgttagtgagagttcagttatgttcggctctgttcatcggcacgaaacaatttttccgagctggtgtgttagctggagaatgtccatctatgctttcatctaggaatgtatacttaatatattttcagctaaatatgtatgaaaagataatgatatatactacaaatattgtgtgtattgccgataaataaaggatggagatagaaatttacaccaaaaaaaaaaaaaaaaaaaaaaaacctgcagcccggggatccacta

SEQ ID NO: 8099 - DNA, 747 bp, Oryza sativa
  Clone ID: PAT_MRT4530_14635C.1
tacaatttattatccgtttctcaattgtgtaagttgggttacaattgcttgtttaccgatgaggatgtgaccgtctttagaagggatgactccgttgtattcaaaggcaagttgaagggtgatctctatcttgtcgatttcgatgtggatagagtgaatccggaagcttgtttgattgttaaatcctccatgggttggctatggcatcgtagactaacccatgttggaatacggaatttggcaactcttctaaagggggaacacatcctcgggctcactaatgtcacatttgataaagatcgtgtgtgtagtgcttgccaagccaggaaacaagttgggaatccacatcctatcaagaacatcatgactacaacacgccctcttgagcttctacatatggatttattcgggtccatggcctacataagtattggaggtaacaagtatgggtttgtcattgttgatgatttttcccgcttcacttgggtgtattttctccatgacaagagtgaggctcaaaatgtcttcaagcgcttcaccaagcaagcccaaaacctctatgatctcaccatcaagaaggtgcgaagtgacaatggagaattcaagaacactcaagtggaggaattccttgatgaagagggaatcaagcacgagttctccaccccctatgatcctcctaaaaatggcattgttgagaggaagaaccgaactcttattgaagccgcaagagcaatgcttgatgggtac

SEQ ID NO: 8100 - DNA, 458 bp, Oryza sativa
  unsure (1)..(458): unsure at all n locations
  Clone ID: PAT_MRT4530_14636C.1
aggacatagagcttcctgaggtacacagcataagaccaagcattttgcatccgttgcatacaactcgtagccaggatttcctcggattggactacacccaatcagctggtttactgcatgatacaaactatggagacagcgtcatcattggaattatcgattcaggtatctggccggagtctccaagcttcaaagatgatggtctaggtcctttgccttccaagtggaagggcaaatgtctagccggccaagcatttggttctaaccaatgcaaccgaaagataattggggctcgatggtatgacaaacatttgaatccagacaatcttaaaggtcagtacaagtcagctagggatgctgatggacatgggacacacgtcgcgtccacagcggctggtgttcttggtgccaacgttagcttccatgggctagctgttgggtatnccagaggtgctgca

SEQ ID NO: 8101 - DNA, 5549 bp, Oryza sativa
  Clone ID: PAT_MRT4530_14637C.1
atgacaagggagacgcttctagcaccaaggataaagggagctactattcactttgattacagcaaacttaatgttcctcctcataactttgtctccgtgccttccgagcgtgctcctcaatttgatgggacacattacgccgcttggaagcacaagatgaagttgcatctaatctctttgcatccaagtatttggaaagttgtttgtacaggtattgatgtacccaatgatgacatggagctcacctcggagcaagagcaactcatccaccgcaatgctcaagcttccaatgcaattctctccaccttgagtccggaggagttcaacaagatgtatgataggataatgatccttgtcaacaagatcaaaggacttgggaatgaggacatgacaaatcactttgtggtcaagagacttctccgtgcttttggtccaagaaatcccactcttgtatcaatgatacgggaaaggaaagacttcaagaggctcaccccaagtgacattcttggaataattgtgtctcatgcgatgcaagaagaggaagctcgtgaagtgaggcaaatggtgaagaatgccgccatgatcaaaaatcaagaagtagctttgaaggcaaaacaagaagaagtgtcaagttgtgaagaaattgaagatgaagagatggcttttattgtcaagagattcaagcactttcttcgcaagagtggctatggaaaagggaggaaggatgatgacaagggaaagaggcaatcaaagagagcttgcttcaattgtggcgaatatggccacttcattgccgattgtcccaagtcaaatgaagctaaggctaagggaggcaagaagaagctagagcgtgctcatgtggcagaggtgtggtactccggagatgaagaagatcccgaggtcaagcccaagcccaagccaaaagacaaggttgaaggagaaggtggtgttgctaccgtcgccttcatgtcatcctcttcaagcaaggagcgtctcttcaacaacttgagtgatgacgacgacgactcctaccactactcttgtttcatggcccaaggccgcaaggtgatgactcaaaagccctctcacatctctcttgatgttgattctagtgatgaggaaagtgataatgaattagatgatgtgcttgagagctttagcaaacccgctatgcaacatttggctaagttaatgagagctttggatagtaaagaacaatcactcgaaaggcaagaagaattgcttattcttgagaagaaaagaaaccttgccttagaggagagcctagctacaaaatgtgctaaaaatgaacaactagctaatgagcttaatttggctaatggttctctagctatccttagggatgtcaatgaaactcttcaagacaaatttgctaatttagacaaaagtcataaagatcttgaagttcaatttgacactctttggaatagcacctctcaaccaaatgtggtttttaatccttccaacccatctactagcaatgattgtgctaggtgttacaatattgatttgaactcttgtgctactaatgttgatgctatgcaagctcttaagaaagagaatgaaaggttgggcacattggtaaaatatggatacatgaagacataccattcaaaagatgccctttataagaccatcaccgctcatcctaacaaggatggacacgggctcgggttttctagtggaagtcctgtgtctaagcgtgtgatggtaaatgggaaagaatgcttgatgtttttgagagaaggtaaagctccacaagcaagtgaggtgacttgtcccttcactggtcagacactcggaagttccgggcaaaatgacgggaagttcctgccctgtaagacaggaagttccgaacattttgtcaggaagttccggacttctgatgagtcgaaggggctgaccggaagttcctggtataatgccaggaagttccggccagaaggtctttactatgatttatatgtaatttccaaaaattcagagggcaaagtggttgcttattttaatgggaattacaatgatgagtaccgcacttgtgtgtgggtgccaaaggctttggtaactaacatcaagggacccaaacttatgacgggagagaggtgtatgtttacaagtcttgatgagcagggtggaagtcgtgaaaatattttctttggagatgatggtaaaggaaaggattgtgtgtgtagcgcttgccaagccgggaagcaagttgggagtccgcatcctatcaaaaacatcatgactacaacaagaccactcgagcttcttcatatggacttatttgggcccgtggcctacataagcattggaggtaacaagtatggttttgtcattgttgatgatttttcacgcttcacttgggtgtactttctccatgacaaaagcaaagctcaagatgtcttcaagcgtttcgcaaagcaagcccaaaacctctatgacctcactatcaagagggtgcgaagtgacaatggaggagaattcaagaacactcaagtggagaaatttcttgatgaagaaggaatcaagcacgagttctccgccccctatgatcctccccaaaatggcattgttgaaaggaagaaccgaaccctcattgaagccgcaagggcaatgcttgatgagtacaagacttcggatgtcttttgggcggaggccatgagtgatgtggatccaagtcaagctataggtactaaggctattggagacatacgactagtcgagacgcaggatgaccaagaagatagggatcaacctccgtcatcaacatccaatagccctacaagtgctgtgtctgctgagccggaagttccggatcctattgaccagaacctccggacatctccaggcccgatccccccagtgcaccatccaaggatacataacactgtccaaagagatcatcccgtcgacaacatacttggtgacataagaaaaggggtaactactcgctctcgtgtcgcatgtttttgtcaacactactcgtttgtctcttctttggaaccaaccagggtggaagatgcgcttggtgatccggattgggtgatggctatgcaagaggagttgaataacttcactcgcaaccaagtatggactttggcggagagacccaagcaaaatgttgtcggcaccaagtggatctttcgcaacaagcaagacgaacatggggtggttgtaaggaacaaagcccagatagttgcgcaaggattcacccaagtcgagggtctcgattttggtgaaaccttcgcacctgtcgctcaccttgagtcaattagaattcttttagcctatgccgctcaccatgatttcaggttattccaaatggatgtcaagagagcctttcttaatggacctatctcagagttggtctatgtggagcaaccaccggggttcgaggatccaaagttgccaaaccatgtgtacaagctccacaaggcgctctacgggctccaacaagcccctagagcttggtatgaatgtctccaagattttcttttgaaaaatggttttgaaattggaaaggcggatactactctcttcactaaaaaatttaagagtgatttattcatatgccaaatttatgtcgatgacataatatttggttctactaatgcctctttttgtgaagaatttagtagtatcacgactaaaagtttcgagatgtctatgatgggcgagttgaccttcttcctcgggatacaagtgaagcaagcacaagaggggaccttcatctctcaaactaagtacgtgaaagacatactcaagaagtttgggatggaggataccaaacctatcaagacgcccatgcctactaatggccacctagacctcgacaataatggtaaatgtgtggaccaaaaggtatatcgctccatgataggatctttgctttacttatgtgcatctcgtcccgacatcatgcttagtgtttgcatgtgtgcccgttttcaagcggaacctaaagagtgccatttgattgccgtcaagagaattctaagatatttagttcatactcctaatcttggcttatggtatcctaaggattgtgactttgagcttttgggctattccgattcggattatgccgggtgtaaggttgatagaaaaagcacaaccgggacttgtcaattccttgggcggtcccttgtttcttggtcatacaagaagcaaaattccattgcattatccaccaccgaagccgaatatgtcgccgccggttcttgttgtgcccaactcctttggatgaaacaaaccctacaagattttggctataacttcaccaagatcacactcctatgtgacaatgagagtgccatcaaaatagccaataatcccgttcaacattcaagaaccaagtacatagatatttgccatcactttttgagagatcatgagactaaaagagacatatgccttacccatgtgagaaccgagacccaattagctgacattttcactaagcctttagatgagaaaagattgtgcgagcttaggagtgaactcaatatcttagactctcgtaacattaggccggaagttccagtgttcttggtccggaacttccggtctctatccagccagccagcaaaccttgattcctccaatttttattttaaccattgcacttcaaccttgttgattcttgttgcagtggtcagtatgcctcatgagaagagacagaagctttcacaggatgttcctgctgactcgagtcccccggttcatggtcctaggaggagattgggcaaagaaaaagttggaaatttttacagtgggagtcaaattcctattcattctaggagggctggtagcattgtcattggtgatgctccccgctctccctctccagttgcatctaagtcagatgatggtggcaatgaggatgagcctagttctgagagcaatcctttgaggctttacaagacaagggttgttgatcctgatcctagacgtccaagtgtgaactatttgaagaatctgctcaagtgtggaatggacagaatggtgagtcctgacacaatgcctgctgactctcaggatgacagattcaggaccgtggtgcaagttgattggtataattctgtgatcatgggaagatctcatccagtggtagagatgaagtggctagactggcagtacatgtccttaaagaacaacttagttttcagtgaggtacgcaaggtgtgtgagcgcaagcacgtggcagatctgttggccttgcagtattcctggaatgaggaagtcattggtcagttatactccaccgctttctttggcaccaccaagaagggcattgaatttgtgaagtggaccattcaggggcagcagtatagggtctctatggcacagtttgctgcagctctggagttagatgatgatgacctgagtcgtcctcatatctttgtagaaaatgctttgtcaccgaccagcactactttcctgtatgagaaggatgctcccaaggattgtttggggactactcgtgggttgcgtccatactatagagtgctttattctatcttcag

SEQ ID NO: 8102 - DNA, 1281 bp, Oryza sativa
  Clone ID: PAT_MRT4530_14638C.1
atgcctcgtgagaagagacagaagctttcacaagatgttcctgctgactcgagccccccagttcatggtcctagggggagattgggcaaagaaaacgttggagatttttacagtgggagtcagattccgatccatttcaggagggatggtagcattgtcattcgtgatgctccccgctctccctctccagctgcatcagagtcagataatggtggcaatgaggatgagcctggttctgaaagcaatcccttgagactttacaagacaagggatgacagattcaggaccttggtgcaggttgattggtataattctgtgatcatgggaagatctcatccagtggtagagatgaagtggctagactggcagtacatgtcctcaaagaacaacttagttttcaatgaggtgcgcaaggtgtgtgagcgcaagcacgtggcagatttgttagccttgcagtattcctggaatgaggaagtgactggtcagttctactccactgctttctttggcaccaccaagaaggggcttgattttgtgaagtggaccattcaggggcagcagtatagtgtctctatggcacagtttgctgcagctttggggttagatgatgatgacctgagtcgcccacatatcattgtagaggatgctctgtcaccgaccaacactacctttatgtatgagaaggatgctcccaaggattgtttggggactactcgagggttgcgtccatactatagagtgttgtactcgatcttcaggtggtctttgctccccaaagtgggagatgctacagctctttcaggtaggcatgcgctcctcctcagtcgcatgcgctacaacaagccagatttcagcatcatgaagcttatctggagtgagatctacgagacagtgtgtgagccaaagaggggttgcatctatgctccatatatcatgaagatgattgaggccaagactgggatttgttatttcaaggacaatcaacacaagcctttttgtcctcatgctcccactacttcaactacttctactgccagagtcactcgtgcttccacctcagctgctccttcttcctctgctgcaccacagcgttctgagtcttcttctcccataaagaaggctctcagggctatcttttgtatgtgtgccaagatagctaagaaggtaaacaagatagagaggcgtcagaaggaagattggattgcagcaggcaaggatgactctgacatttctgatgatgaggagtttgttgatccttttgctgcttatgagactgcttga

SEQ ID NO: 8103 - DNA, 379 bp, Oryza sativa
  Clone ID: PAT_MRT4530_14639C.1
attactaggatgggattcagggctatcaccacctgtcgtctacctttgacaaatccgtaggatacacaacaaacaaaaagaagtttttccgaacccggagcagagtgtaccaacagctccggtactcctccagaattcattctagaaagctacacccactgaggtagaagtctgagatagcgccaaacttcagggcactcctccagagcttcccctcactttctacctattttctaatgtacacaaaagatacaatagtgtctcttgtaattcagctcaaagagttgtgtgtcttaaaagtgaagtgagctcctccttttatagcctccatatgacggttatggcggttggaaatgtcctaaacgcccctccaccgtca

SEQ ID NO: 8104 - DNA, 324 bp, Oryza sativa
  Clone ID: PAT_MRT4530_1463C.1
atgcagctcaacctgaaagcaagaactcgttgaaataaaactaaagcaaaagggtggcgatgcgccgaaattgtattgaatgtgactctatccatgtgcggcaatcatcttgaagcatatcaactcaacccgatgtcgtacaccaagtcgtattgtcggaatcggctgtatcggcttacccaatctaactcgacccagccgatcctgatcgtagccgatctggactccagccgattcttgttctattctcgaatcaatctccgccttcgactccactttgatctaatcctcttttccgatgctgatattaccaaatttggtcgt

SEQ ID NO: 8105 - DNA, 602 bp, Oryza sativa
  Clone ID: PAT_MRT4530_14640C.1
taagcactatgactcgtgagaaaagacagaaagcctctcaagatgtgtccggtgatgagagtcctcctattcggttccctcgtggtcgtttgggtaaagagaaagttgttgagggcggcagtggcagtggcactcgtacttctcccaggtttacaaggcaatcaagcaacctaactgttcagattagggatgttgacagtagtcaaggaagtgatgcacctaatacaagaggacgggggagaggtggtggtcgcagttctggggctggaagggcatctcatgatttccctgtaggatctcgtgagaatcccgttcggctctacaagactcttggttttgacaccactcctttgcaccacattagaagacccaagtccaactaccttcatcaacttgccaagtgtagaagagattgtttgattgatccagagacacagcctgaggagtcacagaatcctcgcttcaggactttcactcaattggattggtataactcggtgattatggctagagaaaatccagtggttgagatgaagtggattgatgtcgcgtcccaaaacgactctaaaatctatcctcgaaatagtgcaaagaataattaa

SEQ ID NO: 8106 - DNA, 404 bp, Oryza sativa
  unsure (1)..(404): unsure at all n locations
  Clone ID: PAT_MRT4530_14641C.1
gctggctccgcctgcattgttccggtcctgtattcccttttcgtcccacgcgttcggtagaggaagtagagttgcggcgacgagtagttggggttgggggaagagtaggaggctgccgcncgccttcatcttatgcttttctgctgcggttgggctctgtcccctttttctccctcgctatccttcgcccgttggcttcgtctttctttcccctctctcctgtcttctcctgcggcttcttctgctcccgtttcttcctcccccgcctcttctacattccacttgccccttactgcttcagcatccatgcttccaccctgatgtctgattaggtccggctctcattgattgtccagttctttgattccattttttttgctgccctcctatggttctcttcttgc

SEQ ID NO: 8107 - DNA, 163 bp, Oryza sativa
  Clone ID: PAT_MRT4530_14642C.1
ggccatcacctgtggagctcaccgctggggaacaccatccggcgtcgacactgctagcgcttgccctccacttcgggtgaccagatctggcagcaaggaggtcgtggctgccggattgggcacccacggcctccccttcgagcgggcgtcagcgtcggcgtag

SEQ ID NO: 8108 - DNA, 516 bp, Oryza sativa
  Clone ID: PAT_MRT4530_14643C.1
atgggcaccataattcttttcgccctcgtgctccaccttccttttctccagtggtccctcgatctgttccttctacttcagctggtccttctactagtgccccaccaagttcctcgagttcttctcccatcaagaaggcacttcaggcaatttttctgtatgtgtgctaagactgccaagaaagtgaaaaagatagaaaggcgtcagaaggaagatagaagagaggctgggaaagaagtgttagatgattctgaggatgaggtctatgttgatccatttgaagcttatgaggcagccagcaacgttgccgttgaaggtccatccaccttcttcaatgaagaatcttcccattctgttgatgatgatgatgatgatgatgatggtgatgagggtgacaccgaggcagctgctgaggatgctcccactgatgttgatgagggtgacaccgctgctcagtccgatgagtctcatctctccggcgatacagagattgttccctctgatggagatgagtga

SEQ ID NO: 8109 - DNA, 856 bp, Oryza sativa
  unsure (1)..(856): unsure at all n locations
  Clone ID: PAT_MRT4530_14644C.1
aattttcttttgaaaaatggttttgaaattgggaaggcggatacaactatcttcacaaaaaaatttaagagtgattcattcatttgccaaatttatgtcgatgacataatatttggttctacgaatgcctctttttgtgaagaatttagtagtatcatgactaaaaggttcgagatgtctatgatgggtgagttgaccttctttcttgggctacaagtgaagcaagcacaagagggcaccttcatctctcaaaccaagtacgtgaaagacatactcaagaagtttgggatggaggatgtcaaacctatcaagacgcccatgcctactaatggccacctagacctcgacgataatggtaaatgtgtggaccaaaaggtatatcgctccatgagaggatccttgctttacttatgtgcatctcgtcccgatatcatgcttagtgtttgcatgtgtgcctgttttcaagcggagcctaaagagtgtcatttgattgccgtcaagagaattctaagatatttagttcatactcctaatctttgcttgtggtatcctaagggttgtggctttgagcttttgggctattctgattcggattatgccaagtgtaaggttgatagaaaaagcacaactgggacttgccaatttcttgggcggtcccttgttttttggtcctccaagaagcaaaattcctttggataacaaactctaaaagacttttgctacaacttcaccaagatcccacttctatgtgacaatgagagtgccatcaacataggcaataatcccgttcaacactcaagaaccaagcacatagatattcgccaccacttcttgagagatcatgagactaaaggan

SEQ ID NO: 8110 - DNA, 334 bp, Oryza sativa
  Clone ID: PAT_MRT4530_14645C.1
attagcccaagttggaatgcggaatttggcaactcttctaaagggggaacacatcctcgggctcactaatgtcacatttgagaaagatcgtagtgaggctcaagatgtcttcaagcgcttcgccaagcaagcccaaaacctctatgatctcaccatcaagaggaacacacaagtggaggtattccttgatgaagtgggaatcaagcacgagttcttcgccccctatgatcctcctcaaaatggcattgttgagaggaagaaccgaactcttattgaagccacaagagcaatgcttgatgagtacaagacttcggatatcttttgggcggaggcc

SEQ ID NO: 8111 - DNA, 128 bp, Oryza sativa
  Clone ID: PAT_MRT4530_14646C.1
tccgaccgatctttcaaaaattgacataaagtagtatccttgtacctgcttatcttactgtgggccagggcgtctatgacgttacggagaggatcaatcttagcccagaaaaggccatatgtgttttt

SEQ ID NO: 8112 - DNA, 578 bp, Oryza sativa
  Clone ID: PAT_MRT4530_14647C.1
cgggaaacgccaagcccaccaccacaccgcgactccgcgagcgagagaggagacaaacccctctccacctccccccaaaaccctaacccctcctcctcccacctcccgccacgccaccatggcctcgcccccgccgccgccgccctccgccgccgcccccggatcgccgccgtcggcgcaagtggtggggaacgcgttcgtgcaccagtactacaacatcctgcaccagtcgccggatctcgtccaccgcttctaccaggacgggagccgcatcggccgccccgcctcccccgccgccgccgagatggacaccgtcaccaccatggaggcgattaacgcgaagatcgtgtccatggacatcgtgcgggcggagatcaaggcggtggacgcgcaggagtcgctgggcgggggcgtcacggtgctcgtcacgggccacctcaccgggagcgacgacgtgcgcagggagttctcgcagtccttcttcctcgcgccgcaggagaagggatacttcgtgctcaacgacatcctgcgctacgtcgggggggagggggatcaggaggtggagccggagccggagc

SEQ ID NO: 8113 - DNA, 556 bp, Oryza sativa
  unsure (1)..(556): unsure at all n locations
  Clone ID: PAT_MRT4530_14648C.1
gagctcgtgccgaattcggcacgagtttatctgatctcaactatgcttacatgttctggtgcccttgtgacgtcatgttcggtgaatgagtgcaagtgctatctatcccagtttcgagccaacatcaaagaagtcagagaggcattggaccaataaacatgtaagcacagttgaggtcacataaaaacatgacttttaaaatactccttgagcctcgcattggcatctggttattctcctttcttcnctagtctctgataagatcagaaacagcttcgagcctccctcaagaaactaaacaaataggagtgcttcncagcactaattgttagataagatagaaaatattatgagcnactaatgttagtcnggncacagataaattagtagctgtttacccgaaagttgatccgganatgtgttgcngangcntcggagttataggatatcatcctgtatccaatctattatattattaaaacagccttgaaaggaggnaccacgttcgttgtgggggntagaaattctcncattaatcnaaaaaaaaaaaaaaaaa

SEQ ID NO: 8114 - DNA, 553 bp, Oryza sativa
  Clone ID: PAT_MRT4530_14649C.1
cggccgggttgccaggaagtttcgggccaatggccgtgcagaagacatgaccggaagttccgggcataatgccaggaggttccagccagatggtctttactatgattcatatgtaatttccaaaaattcagagggcaaagtggttgcttattttaatgtgaatacaatgatgagtaccgcacttgtgtgtgggtgccaaaggctttggcatactcctccggtggttcaagttgggttgtggacagtggttgcaccaatcatatgactggagagaggagtatgtttacaagtcttgataaggagaacggaactcgtgagaatattgtgtttggagatgatggtaaaggaaaggtaattggtctaggttacaattgcttgtttaccgatgaggatgtgaccgtctttaaaagggatgactcctccgtaccattcaaaggcaagttaaagggtgatctctatcttgtcgattccaatgtgaatagagtgaatccggaaacttgtttgatggctaaatcctccatgggtggcctatggcatcgaaaactaccccatg

SEQ ID NO: 8115 - DNA, 325 bp, Oryza sativa
  Clone ID: PAT_MRT4530_1464C.1
atgcagctcaacccgaaagcaagaactcgtcgaaacaaaactaaagcaaaaaggtggcgatgcgccgaaattgtattgaacatgactctatccatgtgcggcaatcatcttgaagcacctcaattcaacccgatgtcatacaccaaattacactgtcggaatcggctgcatcggcttacctagtccgactcggacctagccaatcctaaccgtagtcgatctggacttcagccgattcttgctctattctcggatcaagctccgccttcgactccacctcgatctaatctccttttccgatgctgatattaccaaatttggtcgt

SEQ ID NO: 8116 - DNA, 1344 bp, Oryza sativa
  Clone ID: PAT_MRT4530_14650C.1
cggcacgagataggaggtggagccggagccggagctggagctgtcgtttccgccgtcgcagcagccggattcggtgcctgctccttcggcgaatggcactagcgtgccgcgggaacaggaggccttctcgcagccggagcagcatgtggctgatcctgcacccaatgctcaggaggctgatctcaacggcgaggaggtttataacccaccgaacaacacagaggggcctgttgtggaggaaacgccgattcctgaagttatagatgaagtgccaaataacgtagctgtggctatgccgactccgcctgcccctgcccctgcccctgtaccacaagaggaggcccccaagaagtcgtatgcttcaattgtcaaagtcatgaaagaaattccaccacaaatatctgcaattccttccaggccggcaccaccaaaacaagagaagcaagttgctcctgcacctgttgctccggttgctgatgctccaactttcagtcctaatcctgaaagcagcaacattcaagaggctgaagttgatgcacatgcgatatatgtacggaatctgcctttaagtgccacgcctgaacaattagaagaagcattcaagaaatttggcgctatcaagccggacggaatccaagttagaagtcacaagattcaagggttctgctatgggtttgtagagtttgaagatcccagttcagttcaaagtgcagttgcgggttctcctgtgacgattagtgaccggcaatgttatgtggaggaaaagagaactgctggttcacgtggtggtggcagaggaaggtttgctcctggtagaggtggtaacttccgaggtgaaggcatgagaggccgcgggaattacaccggagggaggggcaatggaaggggtgagttcaattatcgatccgactatggaggcagaggcgctggtagaggtggttcatcacgtggtggtgatgttggctaccagcgggttgaccactctgctggtcgtgctgctcgggcgccatcgggcactagtgccgttgcaaagtgagcgagttagttgctatgcctcggttgctatgcgtcggtgaaaaagtttgatattttcgtgggttggaattatcaacattcgggaagagggtatgtgttgagttgggtttatgtgagagattatcagcaaaaatcgggtcataaattgaagcttcccttgttttgtggcaagggagagcagtggtgatattggtttactaattgtagcatatacgtctattcagaatttcagatgtagtcctggtaagcttggccctttttggagtacctgatgtttgtttttccccctaaaaaaaaaaaaaaaaaaaa

SEQ ID NO: 8117 - DNA, 201 bp, Oryza sativa
  Clone ID: PAT_MRT4530_14651C.1
atgagcttccccggcgcctccgtatcaagcctgttctctcgccgcggcgccatcgcatcgaccctggcgcggctgccgccacaacgaggctgccgcggccgccggcgcatcgaggccgctccaggcgccgccgcatccagcccaccgccctctcatcgaggccgctgtgcctgccgccgtcccgagccggctattggctag

SEQ ID NO: 8118 - DNA, 1015 bp, Oryza sativa
  Clone ID: PAT_MRT4530_14652C.1
cccggccggtccttctcccctcccgccgccgccgcctcgcttcgccgcaggagtttgcaaagatggtggtgccgttgctgacgaagaagatcgtgaagaagcgggtgaagcagttcaagaggccgcacagcgaccgctacattggcctcaagacaagctggcgcaggccaaagggtattgactctcgtgtcaggagaaagttcaaaggatgcaccttgatgcccaacattggatatggttctgacaagaagacaaggcactaccttcccaacaagttcaagaagtttgtggtgcacaatgtctctgagctggagctgcttatgatgcacaacaggacatactgcgctgagattgctcacaacgtctccacccgcaagcgcaaggagatcgtcgagcgcgctgcgcagctggacatcgtggtcaccaacaagcttgccaggctccgcagccaggaggacgagtgaaattttctgcagtttttcgtgcttatggctgcattgttcgtagggcagtgccttggtaccttaaaattatccattttgtgttgctgttagatttgcccgtatggacatcattttgctgtgagtgacctgtctagttttagcaacaatgagataaaaagactttcagcttttcatcatcataaaaaaaaaaaaattctctggagcgctccaagttttctagatcctggaaacacttgttagttattattgtcctctatgagaatacaattaaatcaatccattattataaaaaaaactcttgtcaccccaacaatgagataaaaagactttcagcttttcatcatcataaacttatgtggtttctcttgagcgctcaaggaacattaccctgcttcgagaagttcacctaatcgttgtgtaattttctcatgtaaacgtccttaggatttcagtaatgagctgtgctcctataattatttactgtactcgacttaccttttcccatgtacactgatatcggcagtcagatgagaaaattgcatgctttgggc

SEQ ID NO: 8119 - DNA, 2466 bp, Oryza sativa
  Clone ID: PAT_MRT4530_14653C.1
atggggaggaggagcaagcagaaggtggaggatatggccgaggagctctgcttcgtctgcaaggacggcggcgacatccgcgtttgcgacttcaagaactgcctcaagggttatcatccacactgtgtggggaaggaggaaagcttccttgattctgccgaacagttcatttgtgaattgcacaaatgtgttagctgcaaaaggaattcagaatatcattgtttgtgttgtccaagttcctctgtatgcggtgaatgccttggaaaagttgaatttgcacaatttaggaagcagagccagaccaaaggattatgcaataactgtttaaagttggcattgtttgttgagaagaactctgaagctaattctgatggggaaacagttgaattcagatatacggagaactatcttgttctgtttaaagactactgggaaactattaaagacaatgaaggcttggcattgattgatttgcagcaagccaatatttgtcttagaacaagcttaagctgtaaacaaggaagggattcagagaaacccccagatgaagattacagggcagataagaattcattgagtgttaatgatggcgctgaacaaccattcccggttgatgtaaaggtccaaccaagtgaagcaaaaatgtcactgaagagaaagaagtcaaacaagaaaacatatgtcggttggggttcaaaagagctaattgaattcctgtcatgtattggcaaggatacaactaaacctcttgatgaatttatacttactggagttgttaaggagtacatccagcagaagaatctattcaaggacaggaaaagaaaatctgtcatttgtgatgataagcttcattctttgttcaggaaaagaaaagtgaagtcaaatatgattcttaacttgctggaaatacatcttgcggcaaatgctgcttcagaggatgattttctcgatgattctgaggatgatgaaggccgaattatgagaaaaaggccttgtaatactttaaaggcggcagagacttctgagagggatccaaagagaaacaagaaatgctttgcagctcttaatcacaataacttaaagttaatttatttgagaagaactctaattatgaatcttatgggccaagacacatttgaacagaaagttgttggaagtttggttagagtcaagaatgatgacaatcattatagttatcagatgcctaaaaaacactaccagcttggcctagtaacaggcattaggaaatctccacaagaatacaagataaaggacaaacgtacagatattcttttatgtgtttccaatctgtgggatgacatcaagatctccatgttgtctgaagaggacatagaggaggacgagtgtaatgatctccttctgttggctaaaaaaggactcttcaaaagacctactgttgctgatttagaagagaaagctgcaagtatacatgtggacatcgtgaatcattatgcaacccaatgtgcaacagggcatgtacctaattctgtgaaagttctaatggaggattcacgaggtgcaacagggcatatagctgattctgtgaaagtacttatggagggtttaccaggaggtgcaacagcacgagtagctgatgttttcaatgttgatatggctaaatcacaagatgcatcagggcaagtaactgattacttggaggttgttgaagaggaaactccagaagatgcatcaggacaagtagctgatatcttggacgttgttgaagaggaacctccagaagatgcatcaggacaagtagctgatatcttggagcttgttgaagaggaaacttcagaagatgcatcaggacaagtagctagtatcttggaggttgttgaagaggaaactccagaagcacctggtaaagacctttgtaatggtggcattcctgggtctggactacaaaacaaaatgcacaatgctcaagatggtggcacggctcaaggcagcgatatgtgcaatggcggaaatacctcaaggcgtctcaatgatcgcaagagtgttatcgttatcgactcagacagcgatgaagacgaggatcctcacccagagcaacatgaaccagaacgtgctgctcctcgggcagccatggacgtggtcatggctcccactcatggtgctccggtagccatgaatgggactagtgctcccactcttccttgtgctaagagaggcaagaacgggactaccgcgcctaaaggccgtgttccggctatcgctgcacttcacgcactgcaatccatgaatgcgccaggtgagcatgaatacatatggaattacgcggatcctcaggggaaagtgcaagggccattcacaatggagcatatgcggaactggcaccggaatcgtttcttccctccggacttcagggtgtggagattaggccagacacagaatgattccgtcctgctaacagaggccatgggcctgaaattttcttcttga

SEQ ID NO: 8120 - DNA, 146 bp, Oryza sativa
  Clone ID: PAT_MRT4530_14654C.1
gtcttaacccccactcgcggtccggaccgtgtggcagctcttccctctgcagggttgctatgaaacccggaagggacatggcgacccaccacccggcgcaacagcaccgagagcccagggagatctatacaccaactgtggagtaa

SEQ ID NO: 8121 - DNA, 705 bp, Oryza sativa
  Clone ID: PAT_MRT4530_14655C.1
atgctgacgtcggcaatggcggccggctcgggttggagagctcgccggagctaggacggtcggccgcggaatcggagggcatctacgcgtagaggacatcgagatgaacccgatggtactcaccacgacaacaaacggtgcacgacggcggccggcgacgagaagaggcggcgcggcggctcgggtcgacggcggcgaacgagctccggtggtcggcggcgatggagaaggggcggccgaggttcctcacctccgtgtgcacctaacggtggcgacggcaagcggcggcgacggcggagacggcggcgcgacgcgaccgaagacggccggcggcggcggcggacttggcgcacgtggcgacggcgctacgatgcacgggagaggacgagagagggggcaaacggaagaggacgacgagaggatgctatatatagcatcggattgaagagatcgaactccaaacgagaggaatcgactcgggaagaaatcaaactcggtttttagggataaaatcaaaacgaactcgattcggatcaaatcctcaacgattcgcttcgattcttgggggaaaagaaagaggagaacgagaggaacaaaacccctcaaaaacccggaggattcgggctcggattgaggaggatcggaggtggaagacggcggctcgggctcagcttggcggcggcggccggaggttgaagatggccc

SEQ ID NO: 8122 - DNA, 291 bp, Oryza sativa
  Clone ID: PAT_MRT4530_14656C.1
ctaggacaactgctcccatccgcaaggccaatgccgagccacctccgcgagcacgggtggaagaaaggcatctatgtcctgcggcagaggagctggtggcgccgaggtggcggcgcaggggagctgggggcggggcgggccgtggtcgccggcggcggggcagctcctcactcctatgtgccaaccggccgcgttggcccccgccgcagccaccgcctccacctcctcctcctccaccaccttcctagccctgctgccgcttctcgtactctccatccccgtagtcggcat

SEQ ID NO: 8123 - DNA, 225 bp, Oryza sativa
  Clone ID: PAT_MRT4530_14657C.1
atgcgaggcgcggggacgcggcggagttacggcatgggggccagcgagagggaggcggcggcgggcccgagcccggcgacgccggcgagcggcgaggccatgggtgggctttcccgaaccgccggggccggggttaccgcgccccgtggtaagcacggttaccgcacggaggttaccgcggtatttatattactgtaccccgcggtaaccgcgcggttaccggcg

SEQ ID NO: 8124 - DNA, 384 bp, Oryza sativa
  Clone ID: PAT_MRT4530_14658C.1
gtcctttttttttttttttttttttttttttttttttttatttcttcctggttaaggttccacttttctggaggaaggagctttggccccaaaacaaaagtgccaacaagttgatcaggggaaaaccccccaatgcacataaggggttggaactttatcacccaaaagggtcccccttgcatcccacagcgcaaagggagggctaacaatggtgttcgggggcacacacaccccagacagaaaaacgacaccgggaatactggacacaagagggggggcacgttaaggggggggcaagcggggaaagggggggaattgaaaacatctttgaaggggggcgggggggtccaaaatcaaaatgcctcattggggcaaggggggttg

SEQ ID NO: 8125 - DNA, 452 bp, Oryza sativa
  Clone ID: PAT_MRT4530_14659C.1
tggcacgagggctctacgtcttcagcacggccgtcgcggcggacatctcgcagtgcggcggctggcctcggggtgcctgctgctgcgccgcccggcggcgccggggctcgtcaacgtcgccgcggccggggaggaggaggagcggaggggcgccgcgcccgtcgtgctcgacggctcgcctccgcccatcgtcctcgtccacggcatcttcggcttcgggggggggaggctcggcgggctctcctacttcgccggcgcccgagaagaaggacgaccgggtgctcgtgcccggatttggggtccctcaccagcatccatgacagggcgcgcgagctgttctactacctcaaaggagggcaggtggattatggcgaggagcacagcaaggttttcgggcacaacgcggttcgggaggacgtatgaccacaggacattacccggtctgggacgag

SEQ ID NO: 8126 - DNA, 325 bp, Oryza sativa
  Clone ID: PAT_MRT4530_1465C.1
atgcagctcaacccgaaagcaagaactcgtcgaaataaaactaaagcaaaaaggtggcgatgcgccgaaatggtattgaatgtgactctatccatgtgcggcaatcatcttgaagcacctcaattcaacccaatgtcatacaccaaattatactgccagaatcggctgcattggcttacctagtccgactcagatccagctgatcctaatcgtagccgatctggacttcagccgattcttgctttgttctcggatcaatctccgccttcaactccaccttgatataatctccttttccgatgctgatattaccaaatttggtcgt

SEQ ID NO: 8127 - DNA, 567 bp, Oryza sativa
  Clone ID: PAT_MRT4530_14660C.1
atggcgacgacgtcggcagctgtagcccaggccttggctcggggaagcggaggcggtggaggctacgcgccggccgaatctggcgacgacggcgggcaagggaagctggcgacggcgacctcggtcagctaccggccaaatccgcatgggggtggaggtcatgcacccctacccccgccccaaaatccacgccggccgaatctggtgggggcggaggaggtggcggtggctgcgcgccggcgagggggcatgtggatgggaagccgttggcggcggtgccgtttcgtggacgaatctgcgatggcggcgcctcggctccaacgatggggcgaaggccggcgccacacgacgaccacggcaactgcagcggatggcagcctaaacgatggcagcggcgacagcggcggcacaccatatgttagtgttggcgcccagagccgacgacagtggtgctcagagtggatgggggaggaagagagtgtgggaggagagaggaaagggagagagcatcacgcgtggggcccacgattagcaagccaatttggactggccatatttggccattga

SEQ ID NO: 8128 - DNA, 455 bp, Oryza sativa
  Clone ID: PAT_MRT4530_14661C.1
aatagagaaacggcaacaaaaagacctggggcagactatgatggggaatgggccattcattatgcaccgcagccatgaccacgtcaaagggcatgccatttactacaaagagtattaccatcttatcttcaagagcaacataaaccaagtcctatcccattatttgacccgatagacccagaagagatggtcaagagttatgtacacccgtgtgatcaagcacggtgccccagtcattatttttacagcatacttttctggatcaacaaggactctatccatgagaggtaaaggttcttgttgctgataacaagaatcccatgcatatgcactgtgtatatgattacacacccatgaagttgctcttattctcaggccagctttttaacgaagttcgtgaagttgatcgcgaacatcagtgaggctaacactccgcttgcagaaggacatcacta

SEQ ID NO: 8129 - DNA, 415 bp, Oryza sativa
  Clone ID: PAT_MRT4530_14662C.1
gatatctgctggaaggcaagcgccaaagcttgaggatgggattgggcttcgtggtgcaagagcgctgtttttaactcgggctgagaagaggatacacttcttgtagcgcgcaagataccgccaccagtattgaggaagatacctacagtgcagagtctatacttagcgagaggcgatagatcccacctccagtaacaaagcttaatgacctcttaccttatacagaggtacaatgaggaagaagctatactcttagacatattatattggcttgtggctagtgatgcgtttgatccatcataacacaaaataccgggaggtaggcctgcacttggatatctggctgctggagtgctaagctgtccctatggactctccatcatccgtcatgtccatggaacacaagcagttgctg

SEQ ID NO: 8130 - DNA, 1448 bp, Oryza sativa
  unsure (1)..(1448): unsure at all n locations
  Clone ID: PAT_MRT4530_14663C.1
aaccaaccaaacagacgccaccggataaacaaaaacgcacgtagcagcagcagcagcagcagccgcgatgctcctgacgcgcgcctcccccaccttcctcccctccaccgccgccgccgcagccgcgatgctcctgacgcgcgcctcccccaccttcctcccctccacctccgccgcctcgccctcgccgcagcaggcgccgtcctccccgaccttcgggaggagccagtaccgccggggaggtggattggtctccgtttcttctccggtggccggtcagcgctgtgctgccaggaggaggtccgtgatggcggcggccggcgcggtccccgcggcgaagctggagaacgccgacgcgctcatcgactccgtcgagacgttcatattcgattgcgacggtgtgatttggaagggcgacaagctgatcgacggagtgccggagacgctcgacatgctcagatcaaagggcaagaggctggtgttcgtgacgaacaactcgaccaagtcgaggaagcaatacgggaagaagtttgagacgctgggactaaacgtcaatgaggaagagatcttcgcttcgtcgttcgcagctgccgcgtacctgcagtccatcgatttccccaaagacaagaaggtttatgtgattggagaggacgggattctgaaggagctggagctggctggatttcagtacctcggcgggccatctgatggagacaagaagatagagctgaagcctggattttacatggaacatgacaaagatgtaacttggattcgtacttttgcagggtgccttgtcgtggccacaaaccgggacgctgtcacccatcttactgatgcccaagagtgggcaggtggagggtcaatggttggtgcaattcttggttcaactaaacaagaaccgctcgttgtcgggaagccgtcaacattcatgatggactacctggcaaagaagtttgggatcacaacatcccagatatgcatggttggtgaccgtttggataccgacatcttgtttggccaaaacggaggttgcaaaactcttctggtcctttcaggtgtcacttctgtacagatgcttcagagccctgacaactcgatccagccagatttctacacaaaccaaatttctgattttctcaccctcaaagcagcaactgtctgaagaaatgggaagtaaatgtgttacagatgggcgaggccccttacttttgtataggcggcatccgccaatttttagcaactaaggtcacaaggatgctttttctttccacattgttttgtaaccatgagacaaatgtttatacactattatatgtaacacaagtgcatatcacaatggatactattgaccacttgtccttagctcaaaatcaacaatgagcaaccataattgtttataataaaaaaaagggcagtcaagtaccccggccgcctccacgccnaaa

SEQ ID NO: 8131 - DNA, 249 bp, Oryza sativa
  Clone ID: PAT_MRT4530_14664C.1
tgcggtcgactctagaggatcgcataaagccctgggctttggcctgggtcgcttctgccagagaccccatttgtttccagaccttgacaccagcattctggagctgggtcacccagtccagtggcggaaatgaccagaagaagataaccaccggcacccgttcggtcatgcagatggcgatgtggtcgtcgttggcggctgcggtaatgaagtcgatgccaaaggggcgatccccgggtaccgagctcg

SEQ ID NO: 8132 - DNA, 747 bp, Oryza sativa
  unsure (1)..(747): unsure at all n locations
  Clone ID: PAT_MRT4530_14665C.1
cttggtcagatggagtgattagaggtagagacttaaggccttcgccatggccgggattcaatttctgtgggacggtggaacactggatgccaccatggccacccccaactcagccaatgcctctaacgtatccatcaaaatttggccttgtgtttacaatagatggagtacacattgattggaatcttgttgttgcagtgcataagattttttggagtgtgatgatcaaatcaatgagacatgtaccaagcatcagtagtgagctggatgacatccaagggaaatccactatgatatttattgatgttacaatccctgaaggatgtaatccaaagaaatcaggctctgcgacaacagaaacaatattcaactcattctcagaactattagatgtgcacttgactactattgaaatgcttgtctccaaaagaagccaagaaattcgttgttggcagggagctctttgagttgcaagtcagtgtgctcttctggttactggcaaggaacatcaatcctcctaaatttgaagtacaagtactggagtttttattgagggtgctcattggcagcttaagtgaaaaatactctggtaatactattgatcttgaggtgtgcttttcgaaaataggtatatgtttacacagagatgtccttaagttcccaatttcacaatcaacaaatgcctgcattacaattntgtgtgatcgacatgctgctttcagttttgacacaagcatggagtggaat

SEQ ID NO: 8133 - DNA, 1512 bp, Oryza sativa
  Clone ID: PAT_MRT4530_14666C.1
atgcactggctatttttgagacctctgttcttcatttttgccggccggaagttccggtgttcttgcacccggaaccttcgggcgttgtccagccagcctgtcattcttgcttctctcaatttttgcctaactactgcactccaatttgttgattcctgttgcaagaaagttgttgagggcggcagtggcagtggcactcgtacttctcccaggtttacaaggcaatccagcaaccgtcctgttcagattagggatgctgacagtggtcaaggaagtgatgcacctaatacaagaggacgggggagaggtggtggtcgcagttctggggctgaaagggcatctcatgatttccctataggatctcgtgagaatcctattcggctctacaagactcttgtttttgacaccactcctatgcaccacattggaagacccaagtccaactaccttcatcaacttgccaagtgtagaagagatcgtttgattgatccagagtcacagcctgaggagtcacaggatcctcgctttaggacattcactcaattggattggtatatctcagtgattatggctagagagaattcagtggttgggatgaagtggattgattgggcttacatgaggaagaaaaacaatgaagtgttcaaccaagtgacgcaagtgtgccacaacaagaatcttggagatattctcgccatggagtatgactggaatgaggaagttattgcacagttcaatgtgaaaacattctttggtactacaaggaagggaaccccttatgtgaagtggttgactgagggtgttggagatgctactgctttgccatccaagcatgctcatcttctcagtcacatgcgctacaatcagcctccttttagtgtgatgaagttgatttggtatgagatcgccaacaccattcttgagcctaagcggagttgcatctatgctcctttcattatgaagatgattgagacaatcactggggtgttctacatcaaagatgggcgccataatccttttcgccctcatgctccaccttcctcttctccagtggtccctcgatctgttccttgtacttcagctggtccttctactagtgccccaccgagttcctcgagttcttctcccatcaagaaggctcttcaggcaattttctgtatgtgtgctaagactgccaagaaagtgaagaagatcgaaaggcgtcagaaggaagatagaagagaggctgggaagcaagtgtcagatgattctgaggatgaggtctatgttgatccatttgaggcttatgaggcagcccgcaacgttgccggtgaaggtccatccaccttcttcaatgaagaatcttcccattctgatgatgatgatgatgatggtgatgagggtgacgccgaggcagctgcagaggatgctcccaccgatgttgatgagggtgacaccgttgcacagtccgatgaatctcatctctccgacgataccgagattgttccctccgatggagatggagatgagtga

SEQ ID NO: 8134 - DNA, 369 bp, Oryza sativa
  Clone ID: PAT_MRT4530_14667C.1
atggttagtcctgatactctgccagctgactttcaggatgacagattcaggacctttgtgcaggttgattggtataactctgtgatcatgggaagatctcatccagtggtagagatgaagtggctagactggcagtacatgtcctcaaagaacaacatagtcttcaatgaggtacgcaaggtgtgtgagcgcaagcacatggcagatttgttggccttgcagtattcctggaatgagtggtctttgctccctaaagtgggagatgctacagctcttccaggtaggcatgcgctcctcctcagtcgcatgcgctacaacaagcccgatttcagcatcatgaagcttatctggagtgagatctatgagaca

SEQ ID NO: 8135 - DNA, 4500 bp, Oryza sativa
  Clone ID: PAT_MRT4530_14669C.1
atgtcggatttagggggaaagaacggggaaaatggaaatgaagatggagcgagcagcaagggaacttcattatccaagggagctactataccttttgattacagcaaacttaccattccccctcacaactttgtctccgtgccttccgggcgtgctcctcaatttgatgggacacattacgccgcttggaagcacaagatgaagttgcatctaatctctttgcatccaagtatttggaaaattgtttgtacaggtgttgatgtaccccatgatgacatggagctcacttcggagcaagagcagctcatccaccgcaatgctcaagcttccaatgcaattctctccgccttgagtccggaggagttcaacaagtttgatggtcttgaggaggccaaggagatatgggatactttgcaattggctcatgagggatcacccgccgagacaccacaagagatgtatgataggatgatgatccttgtcaacaagattaaaggacttgggagtgaggacatgacaaatcactttgtggtcaagagatttctccgtgcttttggtccaagaaatcccactcttgtatcaatgatacgggaaaggaaagatttcaagaggctcaccccaagtgacattcttggaagaattgtgtctcatgagatgcaagaagtggaagctcgtgaagtgaggcaaatggtgaagaatgccgccatgatcaaaaatcaagaagtagctttgaaggtaaaacaagaagaagagtcaagttgtgaagaaagtgaagatgaagaaatggcttttattgtcaagagattcaagcactttcttcgcaagagtggctatggcaaagggaggaagtatgatgataagggaaagaggcaatcaaagagagcttgcttcaattgtgacgaatatggccacttcgttgccgattgtcccaggtcaaatgaagctaaggctaagggaggcaagaagaagccggagcgtgctcatgtggcagaggcacacatggcggaggtgtggtactctgcagatgaagaagatctcgaggtcaagcccaagcccaagccaaaagacaaggttgaaggagaaggtggtgttgctaccgtcaccttcaagtcatcctcttcaagcaaggagcgtctcttcaacaacttgagtaatgacgacgaggactcctaccactactcttgtttcatggcccaaggctgcaaggtgatgactcaaaagccctctcacacctctcttgatgttgattctagtgatgaggaaagtgataatgaattagatgatgtgcttaagagctttagcaaacccgctatgcaacatttggctaagttaatgagagctttggatagtaaaaaacaatctctcgaaaggcaagaagaattacttattcttgagaagaaaagaaaccttgccttagaggagagcctagctaaagaatgtgctaaaaatgaacaactagctaatgagcttaatttggctaatggttctctagctagccttagggatgtcaatgaaactcttcaagagaagtttgctagtttagacaaaagtcataaagatcttgaagttcaatttgacactctttggaatagcacttctcaaccaaatgtggtttctaattcttccaacccatctactagcaatggttgtgctaggtgttacaatattgatttgaactctcatgctactaatgttgatgctatgcaagctcttaagaaagagaatgaaaggttgggcacattggtgagatatggatgcatgaagacataccattcaaaagatgccctttacaagaccatcaccgctcatcctaacaaggatagacacgggctcgggttttctggtggaagtcctgtgtctaagcgtgtgatggtaaatgggaaagaatgcttgatgtttgtaagagaaggaaaagctccacaagcaagtgaggcatactcctccggtggctcaagttgggttgtggacagtggctgcaccaatcatatgacgggagaggggagtatgtttacaagtcttgatgagaagggtggaagtcgtgaaaatattgtcattggagatgatggtaaaggaaatgtaatgggcctcggtaagattgccattttcaagaatcaatctctatctaatgtcctccttgtcaattcattaagctacaatttattatccgtgtctcaattgtgtaagttaggatttaattgcttgtttaccgatgtggatgtgaccatttttaggcgagatgactcttgcatagcattcaagggagtgttaaagggtgatctctgtctcgttgatttcgacgtaaatagagtgaatccggaggcatgcttgattgctaaatcctctatgggttggctatggcaccgtaggctagtccatgttggaatgaggaatttggcatctcttctaaaaggggaacacattcttggtctatctaatgtttcttttgagaaagatcgtgtgtttagtgcttgccaagccgggaagcaagttgggagtccacatcctataaaaaacatcatgactacaacaagaccactcgagcttcttcatatggatttatttgggcccgtggcctacataagcattggagagggtgcgaagcgacaatggaggagaatcaagaacactcaagtggaggaatttcttgatgaagaaggaatcaagcacgagttctccgccccctatgatcctccccaaaacggcattgttgagaggaagaaccgaaccctcattgaagccgcaagggcaatacttgatgagtacaagactttggatgtcttttgggcggaagccgtgagtaccgcatgtcatgccatcaaccgcttgtacccccacaagatcctaaagaaaacctcatatgagctcttgagtggtaagaagcctaatgtttcatattttcgtgtctttgggagcaaatgttttattttaagtaagaggcctcgctcatctaagttctcacctaaggtggatgagggattcttactttgctataaatcaaatgcacatgcctatcgtgtcttcaacaaaacctctggtattgttgaagtcactagggatgtgacatttgatgaatctaatgactcccaaggagagcaagttgttgtacatgttgtaggggatgtggatccaaatcaagctataggtaccaaggctattggagacatacgaccagtcgagacgcaggatgaccaagaagatagggatcaacctccgtcatcgacatccaatagccctacaagtgctgtatctgctgagccagaagttctgggtcctattgatcggaacctccggacatctccaggcccggaagttccgggttctacagtccggaacctccggatcaatggcagtgaagacgtgccaacggcacaagtggatgggatcgatgctgagggcactttagagcattctgatcaggctcaggtccccccagtgcaccatcctcaaggatacatcacactatccaaagagatcatcccggtggaagatgcgcttggtgatccggattgggtgatggctatgcaagaggagttgaataacttcactcgcaatcaagtatggactttggtggagagacccaagcaaaatgtcatcggcaccaagtggatctttcgcaacaagcaagatgaacatggggtggtcgtaaggaacaaagcccggttattccaaatggatgtcaaaagtgactttctcaatggacctatctcggagttagtctatgtggagcaaccaccggggttcgaggatccaaagttgccaaaccatgtgtacaagctccacaaggcgctctacgggctcaaacaagcccctagagcttggtatgaatgtctccgagattttcttttgaaaaatggttttgaaattggaaaggcggatactactctcttcactaaaaaatttaagagtgatttattcatatgccaaatttatgtcgatgacataatatttggttctactaatgcctctttttgtgaagaatttagtagaatcatgactaaaagtgtttgcatgtgtgcccattttcaagcggagcctaaagagtgccatttgattgctgtcaagagaattctaagatatttagttcacactcctaatcttggcttgtggtatcctaagggttgtggctttgagcttttgggctattccgattcggattatgccgggtgtaaggttgatagaaaaagtacaaccaggacttgtcaattccttgggcggtcccttgtttcttggtcctctaagaagcaaaattccattgccttatccaccaccgaagccgaatatgttgccgccggttcttgttgtgcccaacttctttggatgagacaaaccctaaaagactttggctacaacttcaccaagatcccactcctatgtgataatgagagtgccatcaaaatagccaaaaatcccgtccaacactcaagaaccaagcacatagacattcgccaccacttcttgagagatcatgagactaaggggacatatgccttacccatgtga

SEQ ID NO: 8136 - DNA, 243 bp, Oryza sativa
  Clone ID: PAT_MRT4530_1466C.1
atgggatggatgccgtttgcaaccaccgtcaacgaccgggcggcaaccgggtgggtggaggagtgtgatgatggccgcacggcgccgccaacgaccatcgtcatcgtcgccgccaccaccagagcactcaccctcgcccgccattgtcttcgctgccacaaccatcccgatcgtcggatctgccgtcaccgagccccctgccaccgctcgagcccgccgtcgtcgtcaccgcaaacgcactag

SEQ ID NO: 8137 - DNA, 5143 bp, Oryza sativa
  Clone ID: PAT_MRT4530_14670C.1
atgtcggacttagggggaaaggacggggaaattggaaatgaagatggagcgagcaacaagggaactccatcacccaagggagccactataccttttgattacaacaaacttaccattccctctcacaacttcgtctccgtgccttccgggcgtgctcctcaatttgatgggacatattacgccgcttggaagcacaagatgaagttgcatctaatctctttgcatccaagtatttggaaaattgtgtgtacaggtattgacgtacctcatgaaagacatggagctcacttcggagcaagaacaactcatccaccgcaatgctcaagcttccaatgcaattctctccgccttgagtccgaaggagttcaacaaggttgatggactagaggaggccaaggagatatgggatactttgcaattggctcatgagggatcacccgccgttcgtgaggccaagattgaatttttggaaggaaggcttggaagatttgtgatggatgacaaggagacaccacaatagatgtatgataggatgatgattcttgtcaacaagattaaaggacttggaagtgaggacatgacaaatcactttgtggtcaagagacttctccgtgcatttggtccaagaaatcctactcttgtatcaatgatacgggaaaggaaagacttcaagagactcactccaagtgacattcttggaagaattgtgtctcatgagatgcaagaagaggaagctcgtgaagtgagacaaatggtgaagaatgccgccatgatcaagaatcaagaagttgctttgaaggcaaaacaagaagaagagtcaagtggtgaagaaagtcaagatgaagaaatggcttttattgtcaagagattcaagcactttcttcgcaagagtggctatggaaaaggaaggaaggatgatgacaagggaaagaggcaatcaaagagagcgtgcttcaattgtggcgaatttggtcatttcattgccgattgtcccaagtcaaatgaagctaaggctaagggaggcaagaagaagacggagcgtgctcatgtggcggaggcacacatggcggaagtgtggtactctagagatgaagaagatcccgaagtcaagctcaagcccaagtcaaaagacaaggttgaaggagaaggtggtgttgctaccatcgcctttaagtcatcctcttcaagcaaggagcgtctcttcaacaacttgagtgatgacgacgacgactcctaccactactcttgcttcatggcccaaggccgcaaggtgatgactcaaaagccctctcacacttctcttgatgttgattctagtgatgaggaaagtgataatgaattagatgatgtgcttaagagctttagcaaacctgctatgcaacatttggctaagttaatgagagctttggatagtaaagaacaacttctcgaaaggcaagaagaattgcttattcatgagaagaaaagaaaccttgccttagaggagagcttagctaaagaatgtgctaaaaatgaacaactagctaatgagcttaatttggctaatggttctttagctagccttagagatgtcaatgagactcttcaagagaaatttgcttgtttagacaaaagtcataaagatcttgaagttcaatttgacactctttggaatagtacctctcaaccaaatgtggtttctaattcctctaatccttctactagcaatggttgtgctaagtgttacaatattgatttgaactcttatgctactaatattgatgctatgcaagctcttaagaaagagaatgaaaggttgggcacattggtgaaatatggatgcatgaagacataccattcaaaagatgccctttacaagaccatcaccgctcatcctaacaaggatggacacgggcacgggttttcgggtggaagtcctgtgtctaagcgtgtgatggtaaatgggaaagaatgcttgatgtttgtgagagaaggaaaagcaccacaagcaagtgagatcactaatcttgtgagcagccagggacccggaacatccggacaaaccggccaaaacctctgggtgggagtctccatctctcaaaaattcccaccaggaagttccggccggtttgccaggaagttccgggccaatggccgtgcacaagatatgaccggaagttccaggcataatgccaggaggttccgaccagatggtctttactatgattcatatgcatactcctccggtggttcaagttgggttgtggacagtggttgcaccaatcatatgactggagagaggagtatgtttacaagtcttaatgatgagaacggaactcgtgagaatattgtgtttggagatgatggtaaaggaaagttgggttacaattgcttgtttaccgatgaggatgtgaccgtctttagaagggatgactcctccgtagcattcaaaggcaagataaagggtgatctctatcttgtcgatttcgatgtggatagagtgaatccagaagcttgtttgattgctaaatcctccatgagttggctatggcatcgtagactagcccatgttggaatgcggaatttggcaactcttctaaagggggaacaatcctcgggctcattaatgtcacatttgagaaagatcagggtgcgaagcgacaatggaggagaattcaagaacactcaagtgaaggaattccttgacgaagtgggaatcaagcatgagttctccgccccatatgatcctcctcaaaatggcattgttgagaggaagaaccaaactcttattgaagccgcaagatcaatgcttgatgagtacaagacttcggatatcttttgggtggaggccgtgagtaccacatgtcatgccatcaaccgcttgtacctccacaagatcttaaagaaaacttcatatgagctcttgagtggtaagaaacctaatgtttcatattttcgtgtctttgggagcaaatgctttattttgagtaagaggcctcgctcatctaagttctcacctaaggtggatgagggattcttacttggctatgaatcaaatgcacatgcctatcgtgtcttcaacaaaacctccggtattgttgaagtcactagggatgtgacatttgatgaatctaatggctcccaaggagagcaagttgttgtacatgttgtaggtgatgtggattcaagtcaagctataggtactaaggctattggagacatacgaccagtcaagacgcaggatgaccaagaagacagggatcaaccttcgtcatcgacatccaatagccctacattgagtcaagtgtcagtcgacccggaagttccgggaccagatggtcggaacctccgaacctctccaagccaggaagttccgggtccatctgccaggaagttccgggcagaggacagtcaaggcgtgcctacggcacaagtggatggaattgatgctgagggcactgtagagcatcctgatcaggctcaggtcccctcggtgcaccatccaagaatacatcacactgtccaaagagatcatcccgtcgacaacatacttggtgacataagaaaggaggtaactactcgttctcgtgtcgctaacttttgtcaacactatttgtttgtctcttctttggaaccaaccagggttgaagatgcacttggtgatctggattgggtgatggctatgcaagtggagttgaataacttcactcgcaaccaagtatggacattggtggagagacccgaccaaaatgtcatcggcaccaagtggatcttccgcaacaagccagatgaacatggagtggttgtaaggaacaaagcccggttagttgcgcaagggttcacccaaatcgagggtctcgattttggtgaaaccttcacacccgttgctcaccttgagtcaatccgaatccttttagcctatgccgctcaccatgatttcaggttattccaaatggatgtcaagagtgcctttctcaatggacctatctcggagttggtctatgtggagcaaccaccggggttcgaagatccaaggttgccaaaccatgtgtacaagctccacaaggcgctctacgggctcaaacaagcccctagagcttggtatgaatgtctccgagattttcttttgaaaaatggttttgaaattgggaaggcggatactactctcttcactaaaaaatctaagagtgatttattcatttgccaaatttatgtcgatgacataatatttggttctactaatgcctctttttgtgaagaatttagtagtatcatgactaaaaggttcgagatgtctatgatgggcgagttgacctttttcctcgggctacaagtgaagcaagtacaagagggcactttcatctctcaaaccaagtacgtgaaggacattctcaagaagtttgggatggaagatgccatacccatcaagactcctatgcctaccaatggccacctagacctcgacgataatggtaaatgtgtggaccaaaaggtatatcgctccatgataggatccttgctttacttatgtacatctcgtcccgatatcatgcttagtgtttgcatgtgtgctcgctttcaagcggagcctaaagagtgctatttgattgccgtcaagagaattctaagatatttagtccatactcctaatcttggcttgtggtatcctaagggttgtgactttgagcttttgggctattccgattcggattacgccgggtgtaaggttgatagaaaaagcacaaccgggacttgccaatttcttgggcggtcccttgtttcttggtcctccaagaagcaaaattctattgctttatccaccgccgaagtcgaatatgtcgccaccggttcttgttgtgtccaactcctttggatgaaacaaaccctaaaagactttggctacaacttcaccaagatcccactcctatgtgacaatgagagtgccatcaaaatagccaataatcccgttcaacattctcgaaccaaacacatagatattcgccaccactttttgagagatcatgagaccaaaggagacatttgccttacacatgtgagaaccgagagcatattggccgacattttcaccaagcctttagatgagaaaagattttgcgagcttaggagtgagctcaatatcttagattctcgcaacattaggtga

SEQ ID NO: 8138 - DNA, 6666 bp, Oryza sativa
  Clone ID: PAT_MRT4530_14671C.1
atgtcggatttagggggaaagaacggggaaaatggaaatgaagatggaacgagcagcaaggaaactccatcacccaagggagctactataccttttgattacagcaaacttaccattccccctcacaactttgtctccgtgccttctaggcgtgctcctcaatttgatgggacacattacgccgcttggaagcacaagatgaagttgcatctaatctttttgcatccaagtatttggaaagttgtttgtataggtattgatgtaccccatgatgacatggagctcacttcggagcaagagcaactcatccaccgcaatgcttaagcttccaatccaattctctccgccttgagtccggaggagttcaacaaggttgatgggcttgaggaggccaaggagatatgggatactttgcaattggctcatgagggatcacccgccgttcgtgaggccaagattgaattattggaagaaaggcttggaagatttgtgatggatgacaaggagacaccacaagagatgtatgataggatgatgatccttgtcaacaagattaaaggacttgggagtgaggacatgacaaatcactttgtggtcaaaagacttctccatgcttttggtccaagaaatcccactcttgtatcaatgatatgggaaaggaaagctttcaagaggctcaccccaagtgacattcttggaagaattgtgtcttatgagatgcaagaagagacagctcgtgaagtgaggcaaatggtgaagaatcccaccatgatcaaaaatcaagaagtagctttgaaggcaaaacatgaagaaatgacttttattgtcaagagattcaagcactttcttcgcaagagtggctatggcaaagggaggaaggatgatgacaagggaaagaggcaatcaaagagagcttgcttcaattgtggcgaatatggccacttcattgccgattgtctcaagtcaaatgaagcgaaggctaagggaggcaagaagaagccggagcgtgctcatgtggcagaggcacacatggcggaggtgtggtactctgcagatgaagaagatctcgaggtcaagcccaagcccaagccaaaagacaaggttgaaggagaaggtggtgttgctaccgtcaccttcaagtcatcctcttcaagcaaggagcgtctcttcaacaacttgagtaatgacgacgaggactcctaccactactcttgtttcatggcccaaggctgcaaggtgatgactcaaaagccctctcacacctctcttgatgttgattctagtgatgaggaaagtgataatgaattagatgatgtgcttaagagctttagcaaacccgctatgcaacatttggctaagttaatgagagctttggatagtaaaaaacaatctctcgaaaggcaagaagaattacttattcttgagaagaaaagaaaccttgccttagaggagagcctagctaaagaatgtgctaaaaatgaacaactagctaatgagcttaatttggctaatggttctctagctagccttagggatgtcaatgaaactcttcaagagaagtttgctagtttagacaaaagtcataaagatcttgaagttcaatttgacactctttggaatagcacttctcaaccaaatgtggtttctaattcttccaacccatctactagcaatggttgtgctaggtgttacaatattgatttgaactctcatgctactaatgttgatgctatgcaagctcttaaaaaagaaatgaaaggttgggcacattggtgagatatggatgcatgaagactaccattcaaaagatgccctttacaagaccatcaccgctcatcctaacaaggatagacacgggctcgggttttctggtggaagtcctgtgtctaagcgtgtgatggtaaatgggaaagaatgcttgatgtttgtaagagaaggaaaagctccacaagcaattgaggtgacttgtcccctcactggtcagacactcggaagttccgggcaaaatgaccggaagttcctgccctgtaagacaggaagttccggacattttgtcaggaagttccgggcttctgataggccgaaggggctggccggaagttccggccagagggtctttactatgattcatatgcatactcctccggtggctcaagttgggttgtggacagtggctgcaccaatcatatgacgggagaggggagtatgtttacaagtcttgatgagaagggtggaagtcgtgaaaatattgtcattggagatgatggtaaaggaaatgtaatgggcctcgcctacataagcattggaggtaacaagtatggttttgtcattgttgatgatttttcgcgcttcacttgggtgtactttctccatgacaaaagcgaagctcaagatgtcttcaagcgcttcgcaaagcaagcccaaaacctctatgatctcactatcaagagggtgcgaagcgacaatggaggagaatcaagaacactcaagtggaggaatttcttgatgaagaaggaatcaagcacgagttctccgccccctatgatcctccccaaaacggcattgttgagaggaagaaccgaaccctcattgaagccgcaagggcaatacttgatgagtacaagactttggatgtcttttgggcggaagccgtgagtaccgcatgtcatgccatcaaccgcttgtacccccacaagatcctaaagaaaacctcatatgagctcttgagtggtaagaagcctaatgtttcatattttcgtgtctttgggagcaaatgttttattttaagtaagaggcctcgctcatctaagttctcacctaaggtggatgagggattcttactttgctataaatcaaatgcacatgcctatcgtgtcttcaacaaaacctctggtattgttgaagtcactagggatgtgacatttgatgaatctaatgactcccaaggagagcaagttgttgtacatgttgtaggggatgtggatccaaatcaagctataggtaccaaggctattggagacatacgaccagtcgagacgcaggatgaccaagaagatagggatcaacctccgtcatcgacatccaatagccctacaagtgctgtatctgctgagccagaagttctgggtcctattgatcggaacctccggacatctccaggcccggaagttccgggttctacagtccggaacctccggatcaatggcagtgaagacgtgccaacggcacaagtggatgggatcgatgctgagggcactttagagcattctgatcaggctcaggtccccccagtgcaccatcctcaaggatacatcacactatccaaagagatcatcccgttgacaacatacttggtgacataagaaaaggggtaactagtcgctctcgtatcgcaagtttttgtcaacgcttctcgtttgtctcttctttggaaccaaccagggtggaagatgcgcttggtgatccggattgggtgatggctatgcaagaggagttgaataacttcactcgcaatcaagtatggactttggtggagagacccaagcaaaatgtcatcggcaccaagtggatctttcgcaacaagcaagatgaacatggggtggtcgtaaggaacaaagcccggttagttgcgcaagggtttacccaagtcgagggtctcaattttgtgaaaccttcgcacctgtcgctcgccttgagtcaattagaattcttttagcctatgccgctcaccttgattttaggttattccaaatggatgtcaaaagtgactttctcaatggacctatctcggagttagtctatgtggagcaaccaccggggttcgaggatccaaagttgccaaaccatgtgtacaagctccacaaggcgctctacgggctcaaacaagcccctagagcttggtatgaatgtctccgagattttcttttgaaaaatggttttgaaattggaaaggcggatactactctcttcactaaaaaatttaagagtgatttattcatatgccaaatttatgtcgatgacataatatttggttctactaatgcctctttttgtgaagaatttagtagaatcatgactaaaaggttcgagatgtctatgatgggcgagttcgactttcttcctcggactacaagtgtagcaagcactagagggcaccttcatctctcaaaccaagtacgtgaaagacatactcaagaagtttgggatggaggatgccaaacctatcaagacgcccatgcctactaatggacacctagacctcgacgataatggtaaatgtgtggaccaaaagggttgtggctttgagcttttgggctattccgattcggattatgccgggtgtaaggttgatagaaaaagtacaaccaggacttgtcaattccttgggcggtcccttgtttcttggtcctctaagaagcaaaattccattgccttatccaccaccgaagccgaatatgttgccgccggttcttgttgtgcccaacttctttggatgagacaaaccctaaaagactttggctacaacttcaccaagatcccactcctatgtgataatgagagtgccatcaaaatagccaaaaatcccgtccaacactcaagaaccaagcacatagacattcgccaccacttcttgagagatcatgagactaaggggacatatgccttacccataagagatagaagctttctcaagatgttcctgctgactcgagccccccggttcgtggtcctaggggaagattgggcaaagaaaaagttggagatttttacagtgggagtcagattccgatccattccaggagggcacgtcaaatccttaggcatccacctaggattcggctctgttccaggaggtaaataatgccctctattagttttgtttgaagacgatgaagcctccacatcgccctttgcaatcctcctgtcaaaccggcgctggagcccggtcagaccagccgtagaccaccggtcagaccggccagacgcgccggtcagaccgacatccggagcacggtcagaccggccgtcttcggattttctgttcggggacacttcaactccatctccagtaggtattggcacatcatgagaccccactttgatagtaatcacttccgaagtcttttcctccaccttgacgcgctttccttccctcttttcttcattagcccgattcttaccataaaatcggctattgtttggtgaagacaaacgctcatgaattggcttccgtggtcctctccacccttggttgaattgcattggaggcatatgattgaacattggcggcgtcgccccccatggcaagaagtaaggatagggataacccgacggcagcattggataggaaccccatgacatgtcttgtggataatgatatgaaggtgaatgcgaccgtcttggtgaatgaccaaatcgctccctaggaggtgatcttggtctcttccctttgttgtgaattttcccactaccttgcttctcatatttctccaaaagcatatcaaaagtcaccttggtcttcctaggggctttagaagttgaagctccactcctattctccttccaaacgccaacctccggcttcttgggcactatcatcttggatcttggttcaccaatgaccacttcctttcccatagtagattcggcttgctccggccgaatcaacaccttcttatcattgaaattaattgtattcaccggaaaaggatcatgatcaagcttcatctcactttgccgatctttgcgaggagtcggcattaggttagagcaaacaaaaggcttatttttattagtccataaccattcggcaacataaatatcatgatcaccctcttcctcactatcactagcctcagggtaatcaaccacattaacattaggttttttgtcaaatggtctagcaagttttctattatccttaacccggctttcttgagccagagccctttgcatgagttgactaacatcaagaaattgttggccgtctagtctttctctaagaggagcaaccaaaccattaaaagcaagaccagccaaatctctatcagttatattcaaagtataacatcggtttctaacatctctaaatctcatcctcaccactaaacttggcaaattcgggaactcgccggggtaatacccggtctgactggccatctggccggtcggaccgacggctgtgtcgcggtttgaccggccattaggcccggtcggaacggccgtgaacgccgttctgtcggttttattacccgtttgatctataggaggttgattagcagtggtagaggctttatcctttaatgtgtaatcatccataagagaaccgaacttaatccttaaaaacccatcaaatttatccttaaacattacatctagctgatctttaaaagcaaccattgatgaatctattgtagatgcaatttgttgttggatagattgtgatacctcatcattgcttactacgtcgggagcgagcttgggatgtggcccgggcttgatgatcacgccttgacgagtcctagtgtttgctctcatcaacgcctcccgtgtgagctcgttgatgtactcctccatagctttacgatcttctccttcgaagtcatccaatgtgaccggtatcacattggatggctccacctccatcttggatggcggcttcgtcat

SEQ ID NO: 8139 - DNA, 4080 bp, Oryza sativa
  Clone ID: PAT_MRT4530_14672C.1
atggggacggagaggaagcgcaaggtgagccgtgagcctcttcgacgtggtcgacaagacctccgtctccgccaagctcggcggcgccgccaccaccaacggcaccgccgccgccgcggcggccaaccagcccctaatcggcgaggtacctcgagtcccaagacactcgagaagcgccgcacgctccccgtgtggcagctgaaggacgatttcctcgctgtcctccacgacaaccaggccctcatcctcgtcggagaaaccggaagcggcaagcactcagatggaatcgcaccacagtacctcgacccccaaatccatcgatccgccgccatcggttcaggggagtggcactccgggtttcaatacggagtggacaaagtgttccagccattgccatcgtcgccttccatggggcatgagctcctctgttggggttcagtactgagtggagaaagtgtgttccggccactgccgtcattgccttccacgggacaatctgcatttccatccgcaacagctcttcatctggtctgcctctattcattttgttgtcaattggttggtttcaccatcctttactctacaacagatgatttgcatggccattgtttcatgcgcaggaaattcatggacggtttacaatttctagagcacttaaagatggctattgcaggaagagtgaagaccattatattggtaaagacaactggaatggaaactttgcaccagctgattttggttcttttcagcataagaatttctatcattgttgggacaatttggttccaacaatcatcaaacatccttaatactgtagcatactcatatgtgcaactaaaggattatatcaaaaggttgatgaatgatcacaaaacggaaggttttttcgacacgaatgatgattctattaactgggtacttgtcatagtggattgttggttaatcttcacgcggaagggtaactcttggcaagatactttcgaagaggtggttgttgaagcatgtgaaaggtggactgaaaatcgtgagaaggtcgagcccaagcccaagtcaaaagacaaggttgaaggagaaggtggtgttgctaccgtcgccttcaagtcatcctcttcaagtaaggagcgtctcttcaataacttgagtgatgacgacgacgactcctaccactactcttacttcatggcccaaggccgcaaggtgatgactcaaaagccctcccacacttctcttgatgttgattctagtgatgaggaaagtgataatgaattagatgatgtgcttaagagctttagcaaacctgctatgcaacatttggctaagttaatgagagctttggatagtaaagaacaatcactcgaaaggcaagaagaattgcttattcttgagaagaaaagaaaccttgccttagaggagagcttagctaaagaatgtgacaaaaatgaacaacttgctaatgatcttaatttggctaatggttctttagctagccttagggatgtcaatgaaacccttcaagaaaaatttgctaattcagacaaaagtcataaagatcaagttcaatttgatactctttggaatagcacctctcaaccaaatgtggtttctaattcttctaacccttctactagcaatagttgtgctaggtgttacaatattgatttgaaatcttatgctactaatattgatgctatgcaagctcttaagaaagagaatgaaaggttgggcacattggtgaaatatggatgcatgaagacataccatttaaaagatgccctttacaagaccatcaccgctcatcctaacaaggatggacacgggctcgggtttttgggtggaagtcctgtgtctaagcgcgtgatggtaaatgggaaagaatgcttgatgtttgtgagagaagagagcaaagtggttgccaattttaatgggaattacaatgatgagtaccgcacttgtgtgtgggtgccaaaggctttggcatactcctccggtggttcaagttgggttgtggatagtggttgcaccaatcatatgacgggagagaggagtatgtttacaagtcttgataaggagaacgaaactcgtgagaatattgtgtttggagatgatggtaaaggaaagttgggttacaattgcttgtttaccgatgaggatgtgaccgtctttagaagggatgactcctccgttgcattcaaaggcaagttgaagggtgatatctatcttgtcgattttgatgtggatagagtgaatcctgaagcttgtttgattgctaaatccttcatgggtttgctatggcatcgtaaactagcccatgttggaatgcggaatttggcaactcttctaaagggggaacacatcatcgggctcactaatgtcacatttgagaaagatcgtgtgtgtagtgcttgccaagccaggaaacaagttgggaatctgcatcctatcaagaacatcatgactacaacacgccctctcgagcttctacatatggatttatttaggcccgtggcctacataagtattggaggtaacaagtatggttttgtcattgttgatgatttttcccgcttcacttgggtgtattttctccatgacaaaagtgaggctcaagatgtcttcaagcgcttcgccaagcaagcccaaaacctctatgatctcaccatcaagagggtacgaagtaacaatggaggagaattaaagaacactcaagtggaggaattccttgatggagagggaatcaagcacgagttctccgcctcctatgatcctcctcaaaatggcatcgttgagaggaagaaccgaactcttattgaagccgcaagagcaatgcttgatgaccctacaaaaagtcaagagtcagttgacccggaagttccgggatcagatgatcggaacctccggacctccccaggccaggaagttctgggtccatctgctaggaagttccgggcagaggacagtcaaggcgtgcctacggcacaagtggatgggattgatgccgagggcactatagagcatcctgatcaggctcaggtcccctcggtgcaccatccaagaatacatcacactgtccaaagagatcaccccgtcgacaacttacttgatgacataagaaaggggagacccgaccaaaatgtcatcggcaccaagtggatcttccgcaacaagcaagatgaacatggagtggttgtaaggaacaaagcccggttatatcaaatggatgtcaagagcgcctttctcaatggacccatctcggagttggtctatgtggagcaaccaccggggttcgaggatccaaagttgccaaaccatgtgtacaagctccacaaggcgctctacgggctcaaacaagcccctagagcttgtagtatcatgactaaaaggttcgagatgtctatgatgggtgagctaaccttcttcctcgggctacaagtcaagcaagcacaagatggtactttcatctctcaaaccaagtacgtgaaggacattctcaagaagtttgggatggaagataccaaacccatcaagactcctatacctaccaatggtcaccttgatcttgatgaaaatggtaaatgtgtggaccaaaagggttgtgactttgagcttttgggctattccgattcagattatgccgggtgtaaggttgatagaaaaagcacaaccgggacttgccaatttcttgggcagtcccttgtttcttggtcctccaagaagcaaaatttcattgcattatccaccgccgaagccgaatatgtcgccgccggttcttgttgtgcccaactcatttggatgaaacaaactctaaaagactttggctacaacttcaccaagatcccactcctatgtgacaatgagaatgtcatcaaaatagccaataatcacgttcaacactcacgaaccaaacacatagatattcgccaccactttttgagagatcatgagaccaaaggagacatatgccttacccatgtgagaaccgagagccaattagccgacatattcaccaagcctttagatgagaaaagattttgcgagcttaggagtgagctcaatatcttagattctcgcaacattaggtga

SEQ ID NO: 8140 - DNA, 1696 bp, Oryza sativa
  Clone ID: PAT_MRT4530_14673C.1
atgggatgcttcaattccaagccaaacgacaccggtgcgatcagaagaagacccgggagcataggcgaggtggctgtgttcgtgcctggattgagagtacccgagagctcggatgagctgccccttcagccgctaggtgatggcctcccaaggaggctcaccgaacgcctggccgcgttgaggaatcggataattgtcatggctgctcatgaggcactgtacatgaccaagcccacctggaggatcaccatcactcagcatggggggtctaagtcagctgatcttctgcaagctttggaggattacttgcccactcttcttggcctagtaaaagatgggagcgagttggaagataaggtacagtttgcatggatgaaccaagaggatgacgcagaggatacgtcaatgcccagtgcttggtatgaggtgctatcagttctacacttgatggctctgctgcgtttgtcccaagcaaattcccttcttgttccaaagacatccattgagggataccatgctaaggtatctgaagaaaacaaacgagcttcagtggagatatttctcaaggcagccggatacttggagtgtgcaatccagcatgttctacctaagatatcgccggagaaaaggtggaaaggtcttcctgtggacttagctgaaggaatcctgaaagctatctgcatgcaagccctgggtcaagcaattgatgttcagcttggattggcaattgacagtccaaaggctaccttggcagtgaagaggaggctggcatgtgagatggtcaagtgctggcagcaggcacatgaaagcatttcggacctacctctgcttgatggctgggcagaaaagcacaggctctttgttacatggaaacacatcgaagcaaaagctgcggcatactactaccatggactaatccttgatgaaggaaacagtgagaaatctcataggacggcggtggcagcgctgcaatcagcggaggagttgctcaaagagagcaaagctgcatgtgaagccttccatgcggcatctcctgtttcaaggcgtgcattccattcttttcagataagcccgccgctgtggggatcgatgaggtatcttcaggagaagatacacaaggagtcgtcgtgcaaagttcggatcaacaaggacctctacaacaaggacaacatcatcatccatgaccatgctgacagcgcgccgccgctgccggacttcgccgtggctctcaaacccgacgaggatggttatcagctcggcattgatgatatggaagggattgattatcatgacagggagtgagtcgccactagttgtggttctatctgaaagcatggagcttggatttgaaaggggggatatcctgtttttgcaaatgagcaaacaccctatacgaacaggagatatagttgttttcaatgatggccgtgaaattccaatcgtccatcgcgttattgaggttcacgaacgacgggataatgcacaagttgatttcctcacaaaaggtgacaacaatcctatggacgaccgaattctttacacacatgggcagctttggcttcagcaacatcacatcatgggacgggccatagggtatctacccaaagctgggtgggtgacattggtgatgactgagaaaccagttattaagacaaatcaagctgcaaatttgcaggtgatggggtgcttcaattcc

SEQ ID NO: 8141 - DNA, 3339 bp, Oryza sativa
  Clone ID: PAT_MRT4530_14674C.1
gattgttggttaatcttcacgcggaagggtaactcttggcaagatactttcgaagaggtggttgttgaagcatgtgaaaggtggactgaaaatcgtgagaaggtcgagcccaagcccaagtcaaaagacaaggttgaaggagaaggtggtgttgctaccgtcgccttcaagtcatcctcttcaagtaaggagcgtctcttcaataacttgagtgatgacgacgacgactcctaccactactcttacttcatggcccaaggccgcaaggtgatgactcaaaagccctcccacacttctcttgatgttgattctagtgatgaggaaagtgataatgaattagatgatgtgcttaagagctttagcaaacctgctatgcaacatttggctaagttaatgagagctttggatagtaaagaacaatcactcgaaaggcaagaagaattgcttattcttgagaagaaaagaaaccttgccttagaggagagcttagctaaagaatgtgacaaaaatgaacaacttgctaatgatcttaatttggctaatggttctttagctagccttagggatgtcaatgaaacccttcaagaaaaatttgctaattcagacaaaagtcataaagatcaagttcaatttgatactctttggaatagcacctctcaaccaaatgtggtttctaattcttctaacccttctactagcaatagttgtgctaggtgttacaatattgatttgaaatcttatgctactaatattgatgctatgcaagctcttaagaaagagaatgaaaggttgggcacattggtgaaatatggatgcatgaagacataccatttaaaagatgccctttacaagaccatcaccgctcatcctaacaaggatggacacgggctcgggtttttgggtggaagtcctgtgtctaagcgcgtgatggtaaatgggaaagaatgcttgatgtttgtgagagaagggacccggaacatccggacagaccgggaaaaacctccgggtgggagtatctgtctctcaaaaattcccaccaggaagttccgggccaatggccgtgcacaagacatgaccggaagttccgggcacaatgccagaaggttccggccagagggtctttactatgattcatatgtaatcttcaaaaattcagagagcaaagtggttgccaattttaatgggaattacaatgatgagtaccgcacttgtgtgtgggtgccaaaggctttggcatactcctccggtggttcaagttgggttgtggatagtggttgcaccaatcatatgacgggagagaggagtatgtttacaagtcttgataaggagaacgaaactcgtgagaatattgtgtttggagatgatggtaaaggaaagttgggttacaattgcttgtttaccgatgaggatgtgaccgtctttagaagggatgactcctccgttgcattcaaaggcaagttgaagggtgatatctatcttgtcgattttgatgtggatagagtgaatcctgaagcttgtttgattgctaaatccttcatgggtttgctatggcatcgtaaactagcccatgttggaatgcggaatttggcaactcttctaaagggggaacacatcatcgggctcactaatgtcacatttgagaaagatcgtgtgtgtagtgcttgccaagccaggaaacaagttgggaatctgcatcctatcaagaacatcatgactacaacacgccctctcgagcttctacatatggatttatttaggcccgtggcctacataagtattggaggtaacaagtatggttttgtcattgttgatgatttttcccgcttcacttgggtgtattttctccatgacaaaagtgaggctcaagatgtcttcaagcgcttcgccaagcaagcccaaaacctctatgatctcaccatcaagagggtacgaagtaacaatggaggagaattaaagaacactcaagtggaggaattccttgatggagagggaatcaagcacgagttctccgcctcctatgatcctcctcaaaatggcatcgttgagaggaagaaccgaactcttattgaagccgcaagagcaatgcttgatgaccctacaaaaagtcaagagtcagttgacccggaagttccgggatcagatgatcggaacctccggacctccccaggccaggaagttctgggtccatctgctaggaagttccgggcagaggacagtcaaggcgtgcctacggcacaagtggatgggattgatgccgagggcactatagagcatcctgatcaggctcaggtcccctcggtgcaccatccaagaatacatcacactgtccaaagagatcaccccgtcgacaacttacttgatgacataagaaaggggagacccgaccaaaatgtcatcggcaccaagtggatcttccgcaacaagcaagatgaacatggagtggttgtaaggaacaaagcccggttatatcaaatggatgtcaagagcgcctttctcaatggacccatctcggagttggtctatgtggagcaaccaccggggttcgaggatccaaagttgccaaaccatgtgtacaagctccacaaggcgctctacgggctcaaacaagcccctagagcttgtagtatcatgactaaaaggttcgagatgtctatgatgggtgagctaaccttcttcctcgggctacaagtcaagcaagcacaagatggtactttcatctctcaaaccaagtacgtgaaggacattctcaagaagtttgggatggaagataccaaacccatcaagactcctatacctaccaatggtcaccttgatcttgatgaaaatggtaaatgtgtggaccaaaagggttgtgactttgagcttttgggctattccgattcagattatgccgggtgtaaggttgatagaaaaagcacaaccgggacttgccaatttcttgggcagtcccttgtttcttggtcctccaagaagcaaaatttcattgcattatccaccgccgaagccgaatatgtcgccgccggttcttgttgtgcccaactcatttggatgaaacaaactctaaaagactttggctacaacttcaccaagatcccactcctatgtgacaatgagaatgtcatcaaaatagccaataatcacgttcaacactcacgaaccaaacacatagatattcgccaccactttttgagagatcatgagaccaaaggagacatatgccttacccatgtgagaaccgagagccaattagccgacatattcaccaagcctttagatgagaaaagattttgcgagcttaggagtgagctcaatatcttagattctcgcaacattaggtga

SEQ ID NO: 8142 - DNA, 6309 bp, Oryza sativa
  Clone ID: PAT_MRT4530_14675C.1
atgtcagacttagggggaaagaacggagaaaatggaaatgaagatggagcgagcagcaaggaaactccatcacccaagggagctactataccttttggttacaggaaacataccattccccctcacaactttgtctccgtgccttccgggcgtgctcctcaatttgatgggacacattacgccgcttggaagcacaagatgaagttgcatctaatctctttgtatctaagtatttggaaagttgtttgtaaaggtgttgatgtaccccatgatgacatggagctcacttcggagcaagagcaactcatccaccgcaatgctcaagcttccaatgcaattctctccgccttgagtccggaggagttcaacaaggttgatgggcttgaggaggccaaggagatatgggatactttgcaattggctcatgagggatcacccgccgttcgtgaggccaagattgacttattggaaggaaggcttggaagatttgtgatggatgacaaggagacaccacaagagaagtatgataggacgatgattcttgtcaacaagattaaaggacttgggagtgaggacatgacaaatcattttgtgctcaagagacttctccgtgcacttggtccaagaaatcccactcttgtatcaatgatacgggaaaggaaagacttcaagagactcaccccaagtgacattcttggaagaattgtgtctcatgagatgcaagaagaggaagctcgtgaaagattcaagcactttcttcgcaacagtggctatggcaaagggaggaaggatgatgacaagggaaagaggcaatcaaagagggcttgcttcaattgtggcgaatatggccacttcgtagccaattgtcccaagtcaaatgaagctaaggctaagggaggcaagaagaagccagagcatgctcatgtggcggaggcacacatggcggaggtgttttactccggagatgaagaagatcccgaggtcaagcccaagcccaagccgaaagacaaggttgaaggagaaggtggtgttgctaccgtcgccttcaagtcatcttcttcaagcaagaagcgtctcttcaacaacttgagtgatgacgacgacgacttctaccactactcttgtttcatggcccaaggccgcaaggtgatgactcaaaagcgctctcacacctctcttgatgttgattctagtgatgaggaaagtgataatgaattagatgatgtgcttaagagctttagaaaacccgctatgcaacatttggctaagttaatgagagctttggatagtaaagaacaatcgctcgaaaggcaagaagaattacttattcttgagaagaaaagaaaccttgccttagaggagagcctagctaaagaatgtgctaaaaatgaacaactggctaatgagcttaatttggctaatggttctctagctagccttagtgatgtcaatgaaactcttcaagagaagtttgctagtttagacaaaagtcataaagatcttgaagttcaatttgacactctttggaatagcacttctcaaccaaatgtggtttctaattcttccaacccatctacaagcaatggttgtgctaggtgttacaatattgatttgaactctcatactactaatgttgatgctatgcaagctcttaagaaagagaatgaaaggttgggcacattggtgaaatatggatgcatgaagacataccattcaaaagatgccctttacaagacaatcaatcatcttaacatggatggacacgggctcgggttttctggtggaagtcctgtgtctaagcgtgtgatggcatactcctccggtggctcaagttgggttgtggacagtggctgcaccaatcatatgacgggagagaggagtatgtttacaagtcttgatgagggggctggaagtcgtgaaaatattgtctttggagatgatggtaaaggaaaggtaatggatctcggtaagattgccatttccaagaatcaatctctatctaatgtcctccttgtcaattcattaagagtgaatccggaggcatgcttgattgctaaatcctctatgggttggctatggcaccgtaggctagcccatgttggaatgaggaatttggcatctcttctaaaaggggaacacattcttggtctatataatgtttcttttgagaaagattgtgtgtgtagtgcttgccaagccgggaagcaagttgggagtccacatcctataaaaaacatcatgactacaacaagaccactcgagcttcttcatatggatttatttgggcccgtggcctacataagcattggaggtaacaagtatggtttcgtcattgttgatgatttttcacgcttcacttgggtgtactttctccatgacaaaagcgaagatcaagatgtcttcaagcgcttcgcaaagcaagcccaaaacctctacgatctcactatcaagagggtgcaaagcgacaatggaggagaattcaagaacactcaaatggaggaatttcttgatgaagaaggaatcaagcacgagttctctgccccctatgatcctccccaaaacggcattgttgagaggaagaaccgaaccctcattgaagccacaagggcaatgcttgatgagtacaagacttcgaatgtcttttgggcggaagccgtgagtaccgcatgtcatgccatcaaccgcttgtacctccacaagatcctaaagaaaacctcatatgagctcttgagtggtaagaagcctaatgtttcatattttcgtgtctttgggagcaaatgttttattttaagtaagaggcctcgctcatctaagttttcacctaaggtggatgagggattcttacttagctatgaatctaatgcacatgcctattgtgtcttcaacaaaacctctggtattgttgaagtcactagggatgtgacatttgatgaatctaatggctcccaaggagagcaagttgttgtacatgttgtagggggtgtggatccaaatcaagctattggtactaaggctattggagacatacgaccagtcgagacgcaggatgaccaagaagatagggatcaacctccgtcaccggcatccaacagccctacaagtgttgtgtctgctgagtcggaaattccgggtcctattgaccggaacctccggacatctctaggcccggaagttccgggttctatagtccggaacctttggatcagtggcagtgaagacatgccaacggcacaagtggatgggatcgatgctgagggcactttagagcattctgatcaggctcaggtccccccagtgcaccatccaaggatacatcacactgtccaaagagaacatcctgttgacaacatacttggtgacataagaaaaggggtaactactcgctctcgtatcacaagtttttgtcaacacttctcgtttgtctcttctttggaaccaaccagggtggaagatgtgcttggtgatccggattgggtgatggctatgcaagaggagttgaataacttcactcgcaatcaagtatggactttggtggagagacccaagcaaaatgttatcgccaccaagtggatctttcgcaacaagcaagatgaacatggggtggttgtaaggaacaaagcccggttattccaaatggatgtcaagagtgcctttctcaatggacctatctcggagttagtctatgtggagcaaccaccggggttcgaggatccaaagttgccaaaccatgtgtacaagctccacaaggcgctctacgggctcaaacaagcccctagagcttgtagtatcatgactaaaaggttcgagatgtctatgatgggcgagttgaccttcttcctcgggctacaagtgaagcaagcactagagggcaccttcatctctcaaaccaagtacgtgaaagacatactcaagaagtttgggatggaggatgccaaacctatcaagacgcccatgcctactaatggacacctagacctcgaccataatggtaaatgtgtagaccaaaaggtatatcgctccatgataggatctttgctttacttatgtgcatctcgtctcgacatcatgcttagtgtttgcatgtgtgcccgttttcaagcggagcctaaagagtgccatttgattgccgtcaagagaattctaagatatttagttcacactcctaatcttggcttgtggtatcctaagggttgtggctttgagcttttgggctattccgattcggattatgccgggtgtaaggttgatagaaaaagtacaaccgggacttgtcaattccttgggtggtcccttgtttcttggtcctctaagaagcaaaattccattgccttatcaactgccgaagccgaatatgttgccgccgattcttgttgtgcccaactcctttggatgagacaaaccctaaaagactttggctacaacttcaccaagatcccactcctatgtgataatgagagtgccatcaaaatagccaacaatcccgtccaacactcaagaaccaagcacatagacattcgccaccacttcttgagagatcatgagactaaaggagacatatgccttacccatgtgacaaccgaaagtcaattagccgacattttcaccaagcctttagatgagaaaagattttgcgagctgaggagtgagctcaatatcttagactctcgtaacattaggctggaagttccggtcaccccagtccggaacttccgggggtcggggggtataaatacccagggggagcctgagcctgtagtcattatgcctcgtgagaagagacaaaagctttctcaagatattcctgctgactcgagccccccgattccgatccattccaggagggctggtagcattgtcattcgtgatgcaccccgctctccctccccaactgcatctgagtcagatgatggtggcaatgaggatgagccaggttctgaaagcaatcctttgaggctgtacaagacaagggctgttgatcctgatcctaaacgcccaagagtgaactatctgaagaatctactcaagtgtggaaaggacagaatggttagtcctgatactctgccagctgactctcaggatgacagattcaggaccttggtgcaggttgattggtataactctgtgatcatgggaagatctcatccagtggtagagatgaagtggctagactggaagtacatgtcctcaaagaacaacatagtcttcaatgaggtacgcaaggtgtgtgagcacaagcacgcggcagatttgttggccttgcagtattcctggaatgaggaagtgattggacagttctactccactgctttctttggcaccaccaagaaggggcttgattttgtgaagtggaccattcaggggcagcagtatagggtttctatggcacaatttgttgcagctttggggttagatgatgatgacctgagtcgtccacatatctttgtagaggatgctctgtcaccgaccagcactacctttatgtatgagaaggatgctcccaaggattgtttggggactactcgagggttgcatccatattatagagtgctatactctatcttcaggtggtctttgctccccaaagtgggagatgctacagctcttccaggtaggcatgcgctcctcctcagtcgcatgcgctacaacaagcccgatttcagcatcatgaagcttatctggagtgagatctatgagacagtgtgtgagccaaagaggggttgcatctatgctccttatatcatgaagatgattgaggccaagactgggatttgttatttcaaggacaatcaatacaagcctttccgtccacatgctcccactacttcagctactcctaccaccagagtgacaagtgcttccacctcagctgctccttctttctctgctgcacctcagcgttctgagtcttcttctcccataaagaaggctctcaaggctatcttttgcatgtgtgccaagacagctaagaaggtaaagaagatagagaggcgtcaaaaggaagattggattgcagtaggcaaggatgtctctgacatttctgatgatgaggagtttgttgatccttttgctgcttatgagactgctcaagacattggtagtggtgagggtccctctggcacttctcgtttcttcaatgaggagtcctgtcactccgaggagagcagtgatgatgaggagtcagatgcccctaccgagaatgttcctacagatcccgatgaggcagtggacgccgccgggcaagacatcgactctcctcactccggcgacactgagatcattccttctgatggcgatattgatgaggcttga

SEQ ID NO: 8143 - DNA, 5271 bp, Oryza sativa
  Clone ID: PAT_MRT4530_14676C.1
atgtcggacttagggggaaagaacggggaaaatggaaatgaagatggagcgagcagcaagggaactccatcacccaagggagctactataccttttgattacagcaaacttaccattcccccacacaacttcgtctctgtgccttccgggcgtgctcctcaatttgatgggacacattacgccgcttggaagcacaagatgaagttgcatctaatctctttgcatccaagtatttggaaagttgtttgtacaagtgttgatgtaccccatgatgacatggagctcacttcggagcaagaacaactcatccaccgcaatgctcaagcttctaatgcaattctctctgccttgagtccagaggagttcaacaaggttgatggacttgaggaggccaaggagatatgggatactttgcaattggctcatgagggatcacccgccgttcgtgaggccaagattgaattattggaaggaaggcttggaagatttgtgatggatgacaaggagacaccacaagagatgtatgataggatgatgatccttgtcaacaagattaaaggacttgggagtgaggacatgacaaatcactttgtggtcaagagacttctctgtgcatttggtccaagaaatcccactcttgtatcaatgatacgggaaaggaaagacttcaagagactcaccccaagtgacattcttggaagaattgtgtctcatgagatgcaagaagaggaagctcgtgaagtgaggcaaatggtgaagaatgccgccatgatcaaaaatcaagaagttgctttgaaggcaaaacaagaagaagagtcaagttgtgaagaaagtgaagatgaagagatggcttttattgtcaagagattcaagcactttcttcgcaagagtggctatggcaaagggaggaaggatgatgataagggaaagaggcaatcaaagagagcttgcttcaattgtggcgaatatggccacttcattgccaattgtcccaagtcaaatgaagctaaggctaagggaggcaagaagaagccggagcgtgctcatgtggcggaggcacacatggcggaggtgtggtactccggagatgaagaagatcctgaggtcaagcccaagcccgagccaaaagacaaggttgaaggagaaggtggtgttgctaccgtcgccttcaagtcatcctcttcaagcaaggagcgtctcttcaacaacttgagtgatgacgacgacgactcctaccactactcatgcttcatggcccaaggccgcaaggtgatgactcaaaagccctctcacacttctcttgatgttgattctagtgatgaggaaagtgataatgaattagatgatgtgcttaagagctttagcaaacccgctatgcaacatttggctaagttaatgagagctttggatagtaaagaacaatcactcgaaaggcaagaagaattgcttattcttgagaagaaaagaaaccttaccttagaggagagcctagctaaagaatgtgctaaaaatgaacaattagctaatgagcttaatttggcaaatggttctctagctagccttacggatgtcaatgaaactcttcaagataaatttgctaatttagacaaaagtcataaatatcttgaagttcaatttgacattctttggaatagcacttataaaccaaatgtggtttctaattcttccaacccatctactagcaatggttgtgctaggtgttacaatgttgatttgaactcttatgctactaatgttgatgctatgcaagctcttaagaaagagaatgagaggttgggcacattggtgaaatatggatgcatgaagacataccattcaaaagatgccctttacaagaccatcaccgctcatcctaacaaggatggacacgggctcgggctttctggtggaagtcctgtgtctaagcgtgtgatggtaaatgggaaagaatgcttgatgtttgtgagagaaggtaaagctccacaagcaagtgaggtgacttgccccttcactagtcagacacctgaaagttccaggaaaaatgaccggaagttcctgccctgtaagacaggaagttccagacattttgtcaggaagttccgggcttctgataagccgaaggggctgaccggaagttccgggtataatgccaggaagttccagccagagggtctttactatgattcatatgtaatttctaaaaattcagaaggcaaagtggttgcttattttaatgggaattacaatgatgagtaccgcacttgtgtgtgggtgccaaaggctttggcatactcctccggtggctcaagatgggttgtggacagtggttgcaccaatcatatgacgggagagaggagtatgtttacaagtcttgatgaggagggtggaagtcgtgcaaatattgtctttggagatgatggtaaaggaaaggtaatgggtctcggggaatacattcttggtctatctaatgtttcttttgagaaagatcgtgtgtgtagtgcttgccaagccgggaagcaagttgggagtccacatcctataaaaaacatcatgactacaacaagaccactcgagcttcttcatatggatttatttgggcccgtggcctacgtaagcattggaggtaataagtatggttttgttattgttgatgatttttcacgcttcacttgggtgtactttctccatgacaaaagcaaagctcaagatgtcttcaagcgcttcgtaaagaaggcccaaaacctctatgttctcactatcaagagggtgcgaaccgacaatggaggagaattcaagaacactcaagtggaggaatttcttgatgaagaaggaatcaagcacgagttctccgccccctatgatcctccccaaaacggcattgttgagaggaagaaccgaacccttattgaagccgcaagggcaatgcttgatgagtacaagatttcggatgtcttttgggtggaggccgtgagtaccgcatgtcatgccatcaaccgcttgtacctccacaaaatcctaaagaaaacttcatatgagctcttgagtggtaagaagcctaatgtttcatattttcatgtctttgggagcaaatgttttattttaagtaagaggcctcgctcatctaagttctcacctaaggtggatgagggattcttacttggctatgaatcaaatgcacatgcctatcgtgtcttcaacaaaacctccggtattgttgaagtcactagggatgtgacatttgatgaatctaatggctcccaaggagagcaagttgttgtacatgttgtaggtgatgtggatccaagtcaagctataggtactaaggctattggagacatacgaccagtcgagacgcaggatgaccaagaagatagggatcaacctccgtcattgacatccaatagccttacaagtgctgtgtctgctgagccggaagttctgggtcctattgaccagaacctccggacatctccaggcccagaagttccgggttctacaatccggaacctccggaccagtggcagtgaagacgtgccaacggcacaagtggatgggatcaatgctgcgggcactttagagcatactgatcaggctcaggtccccccaatgcaccatccaaggatacatgacagtgtccaaagagatcatcccgtcgacaacatacttggtgacataagaaaagaggtaactactcgctctcgtgtcgcaagtttttgtcaacacttctcgtttgtctcttctttggaaccaaccagggtggaagatgcgcttggtgatccggattgggtgatggccatacaagaggagttaaataacttcactcgcaaccaagtatggactttggtggagagacccaagcaaaatgtcatcggtaccaactggatctttcgcaacaagcaagataaacatggtgtggttgtaaggaacaaagcccggttagtttcgcaagggttcacccaagtcgagggtctcgattttggtgaaactttcgcacttgtcgctcgccttgagtcaattagaattcttttagcctatgccgctcaccatgatttcaggttattccaaatggatgtcaagagtgcctttctcaatggacctatcttggagttggtctatgtggagcaaccactggggttcgaggatccaaagttgccaaaccatgtgtacaagctccacaaggcgctctacgggctcaagcaagcccctagagtttggtatgaatgtctccgagattttcttttgaagaatggttttgaaattggaaaggcggatactactctcttcactaaaaaatttaagagtgatttattcatatgccaaatttatgtcgatgacataatatttggttctactaatgcctctttttgtgaagaatttagtagtatcatgactaaaaggtttgagatgtctatgatgggcgagttgaccttcttcctcgggctacaagtgaagcaagcacaagagggcaccttcatctctcaaaccaagtacgtgaaagacatactcaagaagtttgggatggaggatgccaaacctatcaagacgcccatgcctactaatggccacctagacctcgacgataatggtaaatgtgtggaccaaaaggtatatcgctccatggtaggatctttactttatttatgtgcatctcgtcccgacatcatgcttagtgtttgtatgtgtgcccgttttcaagcggagcctaaagagtgccatttgattgccgtcaagagaattctaaaatatttagttcaaactcctaatcttggcttgtggtatcctaagggttgtgagcttttgggctattctgattcggattatgccgggtgtaaggttgatagaaaaagcacagccgggacttgtcaatttcttgggcggtcccttgtttcttggtcctccaagaagcaaaattccattgctttatccaccgccgaagccaaatatgtcgccgccggttcttgttgtgcccaactcctttggatgaaacaaaccctaaaagactttggctacaacttcaccaagatcccactcctatgtgacaatgagagtgccatcaaaatagccaacaatcccatccaacactcaagaaccaagcacatagatattcgccatcactttttgagagatcatgagactaaaggagacacatgccttacccatgtgagaaccaaaacccaattagccaacattttcaccaagcctttagatgagaaaagattttgtgagctttggagtgagctcaatatcttagactctcgtaacattaggtga

SEQ ID NO: 8144 - DNA, 2578 bp, Oryza sativa
  Clone ID: PAT_MRT4530_14677C.1
atggtcgccggcggcggccataggcacggcggagcggcggccgagagaggggaggggagggggaaacgaaatgggcggtccacggctcaccccgggtcgacggcgacgacgggaacggcgaccggagcggaagaaggcggcggcgcggcacgggtcgacggggacggcggcgttctggcggtcggcgggcgaaacggaagggtggacgaggtcggcgaggacgcggcggagccgaaggaggcgacgccgaggcgggaggaggctttcacatggattttacttattctatgcataattttgaggatgtattttagagtcgttttaggacgcgacagtgagttgaccttcttcctcgggctacaagtgaagcaagcacaagagggcactttcatctctcaaaccaagtatgtaaaggacattctcaagaagtttgggatggaagatgccaaacccatcaagactcctatgcctactaatggccacctagacctcgatgataatggtaaatgtgtggaacaaaagggttgtgactttgagcttttgggctattccgattcggattacgccgggtgtaaggttgatagaaaaagcacaaccgggacttgccaatttcttgggcggtcccttgtttcttggtcctccaagaagcaaaattccattgcattatccaccgccgaagccgaatatgtcgccgccgtaagcactatgcctcgtgagaaaagacagaaagcctctcaggatgtgtctggtgatgagagtcctcctattcggtttcctcgtggtcgtttgggtaaagagaaagtggttgaaggtggcagtggcagcggcactcgtacttctcctaggtttaccaggcaatccagcaaccgtccagttcagattcgagatgttgacagtggtcaaggaagtgatgctccttcttcaagaggtcgtgggagaggtggtggtcgcacttctagggctggaagggcgtctcatgatttccctgttggatctcgtgagaatcccgttcagctctacaagactcttggatttgacaccactcctatgcaccacattggaagacccaagtccaactaccttcatcagcttgccaagtgcagaagggaccgtttgcttgatccagagacacagcctgaggagtcacaggatcctcgttttaggacgttcacccaattggattggtataactcagtgattatagctagagacaatccaatggttgagatgaagtggattgattggacttacataaggaagaagaacaatgaagtgttcaaccaagcaatgcaagtttgtcacaacaagaatcttggagatattcttgccttggagtatgattggaatgaggaggtcattgcacaattctatgcgacagcattgtttggtactactaggaagggaactccttatgtaaagtggatgactgagggtgttaggcacaaaatttccatagcacagtttgctaagatattgggcttagaggatgaggatctcaatagccctaatattcatagtgaagcacccctccccatgatcaagactaagttcatgtatactaaggatgctcctcggacttgtatgggaactactcatggtttgcattcaaactacaaggtgctgtactccatctttcgttggtctctgcttccaaaggttggagatgctactgctttgccatccaagcatgctcatcttctcagtcgcatgcgctacaatcagcctcctttcagtgtgatgaagtttatttggtatgagattgccaacaccattcttgagcctaagcgaggttgcatttatgctcctttcattatgaagatgattgagacagtcaccggagtgttctacatcaaagatgggcgccacaatccttttcatcctcgtgttccaccttcctcttatccagtgatacctagatccatcccttctacctcagctggtccttcttctagtgccccaccgcaatcctcgagctcttctcccatcaagaaggcacttcaggcgatcttctgtatgtgtgctaagactgcaaagaaagtgaagaagatcgaaagggcgtcagaaggaagatagaagagaggctgggaaagaagcttatgaggcagcccgcaatgttgccggtgaaggtccatccacctatttcaatgaagagtcttcccgatcagatgatgatgaggaggaggatgacgccgaggcagctgctgaggatgctcccactgatgttgacaccgctgcacagtccgatgagtctcatctctccggtgataccgagattgttccctccgatggagatggagatgagagtttagtcccaaagcaagttgtgatggctaagaatgtttttggaatcatttttggaaatgattttccccgagacagagaggcctacccggaggttctggccggaacctccggacaccaaagtttattttctccccgagacagagagggctacccggaggttctggccggaacttccaggcaccgaagtttagctagattttttctaagtgctacccggaagttcttcgcacttttgcccggaacctcctggcaggtttctagttcaatcttgtga

SEQ ID NO: 8145 - DNA, 297 bp, Oryza sativa
  Clone ID: PAT_MRT4530_14678C.1
atggcgcacagtggcttggtcgacgggcggagcaccggcgacggcgactcgcggggcggcagatgcggcggcggtgactcgcggggcggcgaacaggggcggaggtaccttggcggcggcgcggcgaggctaggtggcaaccggcggcgggagctagaccgtgctaccatggagggggagaccattgccgccgccgctggaggccagcacccgacactctgccaagctcaggcggtcaggctggttgggtggccggcggccacgaggggcagggatggccagcggtttagcacttag

SEQ ID NO: 8146 - DNA, 133 bp, Oryza sativa
  Clone ID: PAT_MRT4530_14679C.1
ggacggtaggggctgtggcgcctgctaccacatacggtgcaccaacaacccatacgggctgcgggcagtccatgacagtaatcatcacggacatgaactactatcccgtggacagatgcaacttccacctgag

SEQ ID NO: 8147 - DNA, 391 bp, Oryza sativa
  Clone ID: PAT_MRT4530_1467C.1
atcgtgggttttacccgggaaaacggggcgggtcccgtgggggcgccacagctccccatagggagcggggtaagagagcgggggaaaaacggggacagaggcgtcccgggggggaggggggtcccctcacaaaaccacacaaaagacaagccggaaacagaaaagaaaaaacccggggggccaaaagagagagagaaaacacacaaaaagggaggggctcaaagcccgggttccaaaggggaaaaccgcctcgcaagaggcacaaaaaaaaaaccccccccccgcggagaggggaactgggcatcgcgcgccccggaggggtttcttttcccaagggggagagggaacaccggagagggccccacagggggggcctctgagagagggggaa

SEQ ID NO: 8148 - DNA, 476 bp, Oryza sativa
  Clone ID: PAT_MRT4530_14680C.1
caatcctcatttcttggaaatattttccatattcctcagttcattgagcaaccgtttgtgagcagatatggctgaatcggctgtttctgcagcggttggtagcatcagcaaccttgctgcccaggagacctcactgttatgtggagtcatggatgaagttgggttcttgaaagctgagctcgagcgtctccatggcttccttgaagatgccaagcacaagaggaggtctggggatgcaagtgcagctgttcttgtagggcagatcagggatgcagcatatgacgccgagaatgttattgaagcatcagagtacatggtgaagcgaaacaagctcaagaagggtttcatgggtgccatttcaaggtatgctccgtttaccaactgatttgatagccctgcacaaaattggtgttgaaattccatggataagaaggaagatcagtgagataatttaccagtgccaaccggttaaaaat

SEQ ID NO: 8149 - DNA, 472 bp, Oryza sativa
  Clone ID: PAT_MRT4530_14681C.1
gcagcaaattaataaatacaacaggcaattgattaagtgcagagaattacaaacaaaacctgaccatgcgtcaccatacttacacaaacttaattacaggagtatatagaggcatagtagatagtatcaagtaaaaaaacgcatataattaatataccacttataaatttcttttaaaaaactggatactataactagctcccaaaaaaaacttttttttaactggacaccacttcacacgcccaaagtacgatcgatcgatgatatgatagatacgaggtgacgctgtaggtagctaatccatttaacggcccatgtgctgcacggcgggcgctgcggcggcggcggcgccgcgctggacgttgaggtcccatccgagcttggggtcgtagccgcgggcgacgagctcgcggtactcctggcacagcgcgcacttgttgcaccagaagtggacgcagcagtcggcgcaggc

SEQ ID NO: 8150 - DNA, 268 bp, Oryza sativa
  Clone ID: PAT_MRT4530_14682C.1
gcttgggaggagaacttcggggtgtgacaactatcaacacacgcccaccagaagccacaacatacaagcctacgtaagccaagacacgctgtcggatatcgacttcggggataggcatagctattcccctacggtgtctccggataccgttagaagatacgaaagcgctatctctgatctcgccgggcacggattcgaggaggaaggctaccctgttgtcgactacgagtcagaccttcagaccgacatgtcgacaacagttagatag

SEQ ID NO: 8151 - DNA, 572 bp, Oryza sativa
  Clone ID: PAT_MRT4530_14683C.1
atggtgatcgtcaccgttgccatgccgatttccgccgccgccgggccgtcttctccactgtcaccgctgttcaagccactccaagccgcgatcaagcttcgcttccgtcaacccgccttcgttgcgaagtttgtctccctcctcatcgctgacgcccaggacgtccccacgctcgcctaccagctcctcctcgtctcatctgctgcatgcctcctccgcttcatcggcagccacatcacgcggcaggtggaggggactgtgcttatgcacgtcaccctcgcagacaagcaggaacacgcgctggcaagggaggttgtggtcgccatcaaggctgacgcgggtgggacgttccgtagattcgcggtggttgttctactgtctgtggaggtttaatggaggggactgtgcttatgcacgtcaccttcgcagacaagcaggaacacgcgctggcaagggaggttgtggtcgtcatcaaggctgacgcgggttggacgttccgtagattcgcggtggttgttctactgtctgtggaggtttaatgacgacgccgtgggcatgctcctgggacgctg

SEQ ID NO: 8152 - DNA, 401 bp, Oryza sativa
  Clone ID: PAT_MRT4530_14684C.1
acctcgtgcgcggtccgtgtgtgttaacgaccaaatttggtaatttgagtatcggagatgaagattagatcgaagcagaatccaagacaaaaatcgttccggaaacaaagcaagaatcggctaagtccgaatcggctgcgaccttaattggcacagttcgagtcggacagggttagccgattgagccgattctgacaatacgactcacttgggcaaaagtctgccgcaaagacttatggtatcttagagtttgttagagataagagtcgtgtccgacatggacatattttgatcaaatcaactggcacgctcatagatccgaaagcaagattttttggacctgcactggagttaagcagatctcccaggcctcgtgttttcgcatcaacagtgtgcccacc

SEQ ID NO: 8153 - DNA, 1119 bp, Oryza sativa
  Clone ID: PAT_MRT4530_14685C.1
atgcgtcttcgcttcaagactacggtcgacatctcgctggcggcgtcgatggcctacgcggccttcggcgccgcggtggcctacccggccagcgctccagcggctctggcgcgcgccttcgcgctcggctatggcgcgctcctcttcctgctcccgttctccgtctacgcgctcgagttcctgcggccgccgtacccaatcgatcgcacgccgctgtcgatgatcacgtgcgccacggccacccccgtcgcgctatccgtcgccgtgctgacggtgctcaaccaaggaagagccggcggcgatgtcgccttcgccgcctgcgtcgtctggatcgccgacgtggccgccgtcctgtccctcgcgtggtgcctcacgcacggtggcaccatgggcgtggctttaaacaggagaggacagtacggggaaatctgcaaagtacaggagcggatgaaaaagtccaacaaccatgccgccgttgacgtccggtacgcgatccgggatgccaagattcgctttgcggtggccgtgtcggccgcggtcgcggtagctggcggcgttgtgatcggcggcgtttcattcaagggtctatcctacgccgccgtcttcttcgcgctccctacgaacctcttgtacttccgggacacgtacgcttatcctacggaccacatgccgaagcagctcgagtggtgctacgtctcggtgcctatggccgtcatgctgttgtcccgcctcatgttggcggcacggcaggcaaccacgctggacatcaggctcgtcgccgtcaccgccgtcatgttggcaatagactttaccgcaattggttttctcgaatggcacagcaggagggagatgccgaagcctcgtggtacacgtgcgagtgcggcggagatcgtcacgtcgtttgtgatgagagggagggggagtgagagcagcagcgctgccgatgggggtgtgtgggtggagggaaagccgctgatggggaagagggaaggggtggcgatgaaggagagcagcgcgtgcgccggcgtcggcagcggcagccgcatcagcgcgaagctgcgtgcctccattaatggcgtgaggagcagcagcagcagcaacctagccggcatgaggtga

SEQ ID NO: 8154 - DNA, 464 bp, Oryza sativa
  Clone ID: PAT_MRT4530_14686C.1
cggggataaagaacgtgaaagagcttaccccgaactggtatggcttagggaccacctgtgcggcgcggacatatgcacatacccctcttgcggaggcaaacccgacgatagagggagcctaacagtggtcctaagaaggcagaccgtcgcgcacccggtcctagcgctctaaatcaaagggactctgatcaagctgacgtacaccgctagctagataagactgaggcccgtagctgagctaagccaagataaagaggcggaggatgccagaatgcttggactctctgaggtcgcaaggtctcctacaccgcatcggatcaactatgggcacaagcaaagaaaatatagaatatgactgcctcaggtggcggaacatataaataatactggagatttctcgtgagaaattatgaagccgtgttgacaaggttgatgaaacggatagtgttgtgactggagcaact

SEQ ID NO: 8155 - DNA, 348 bp, Oryza sativa
  Clone ID: PAT_MRT4530_14687C.1
gctatgctgtcgtcatagttgaagccgatatgagccatttagaggaggccccctccgggggggagaacgggggcacgcatgtgcactacctattactcctgcaccgactgcaaatgcttgaagtgaagccactaatcaaccaaatactgcttgtgggccagtcacctaccttgatgagtccacagtatacaccacccatatacttgtggtttgaatgtgtgctgactattgatgaatcaaacacgcctgctatcgataaattaatcagcatggtctccttcagcgactatacgtctatcaactgctgtattggtgagatatgatgtacccactgctactatcagtgag

SEQ ID NO: 8156 - DNA, 525 bp, Oryza sativa
  Clone ID: PAT_MRT4530_14688C.1
atggcggcggcgaggccctcgcgctgtttggaattaattcgtcaggagatcgagcaggcggcgaacccagcaagccggcgccgggggggtcagcgcggcgacggcggcgcgcaggtgatgtggacgttgttggagtggcacgacgcgcccgcgccgtcggtggcggcgtccaccagaagccgccgcgccgagtgcctcggcacctgcgccgcgtcgtcccccatccctgtagccgccggcgagggcggcgacggcggcgccgcggcgtccgcgtcgcgggcagcgccagcggcgatgctccccgtatccaccaccaccagctccgccgactccgtgggtgatgaccccaccggagaagccgccgccgccgccgacgatgacgatgacgagggccgcccctgcatcacctcgcgagacggcatcgcgccgccggagctctggacgaggagagaggaagtgagcgcgaagaaacagagcgacgcgttggtgcaccgtaccatttgcacggtcaggggcaaggcctag

SEQ ID NO: 8157 - DNA, 894 bp, Oryza sativa
  Clone ID: PAT_MRT4530_14689C.1
atgcatctactcagcggctgcgtcgtcgccacggccgtcgtgctcgtcctcatcagcctcggcgccgcgccaccggcggccgtcgacgcggcgacggccacgttcatctacgcgggctgctcgccgtccaagtacgagcccaacaccgcattccagagcaacctcaactcgctcctctcctccatcgcctccaccgcgtcctcgggcgccgcctacaacagcttcaccgccggcggtggcgccgggccggacccggcggccggcacggccgcgtacgggctgtaccagtgccgcggcgacctgagccccggcgactgcgtggcgtgcgtgcggcagacggtggcgcggctgggcgccgtgtgcgccaacgcgtacgccgcgtcgctgcaggtggacggctgctacgtgcggtacgacgccgcggacttcatcggccgcgccgacaccaccacggcgtaccgcaagtgcagctccagcacgagccgcgacggcgcgttcctgagcagccgcgacggcgtcctcggggagctgcaggcggcggccgggtacaagctgagcacctccggcacggtgcagggggtggcgcagtgcctcggcgacgtcccggcgaacgactgcaccgcctgcctggccgaggcagtggggcagctcaagggcgcgtgcggcacggcgctcgccgccgacgtctacctggcgcagtgctacgtcagatactgggcaaatggttactacttccgccctaattcagataactctggagacgatgttgggaggactgtggcgataataatcggtatcttggctggactggcactcctcgtggtgtttatttctttcctcaggaaagcattcggtctgcagtctgcaaagaaaaagaggttgatctgcgtgtaa

SEQ ID NO: 8158 - DNA, 402 bp, Oryza sativa
  unsure (1)..(402): unsure at all n locations
  Clone ID: PAT_MRT4530_1468C.1
gctaaacaacacttcgatttatattaagccgaagaattttaaaaacaggatatgacccataaccanncccaaccaaccaccatgatacaaccaagtatagttttaggtttcgacttacataaaaccatacataatttaaaatttattctcggaataggcttcatctactctactctgagacaaaacacaactcccctttatcttcaagcctccataaggagggctcgtctagttatttctttacatgtaacatatcaattctatcacacaactgctttatccccattctttgttgtaccaggacacaaccttaactaacactactttcaaataattccaatcttgtcatcaaaaattctaacctcctataccctaaaattaatttaaacaaagtcctcctaa

SEQ ID NO: 8159 - DNA, 520 bp, Oryza sativa
  Clone ID: PAT_MRT4530_14690C.1
ccccgcgtcccgatgacttcaatgttcttctgaaaaaaaaaaaaaaaaaaaaaaatgaaaaaaaaaaaaaaaaaaaaaaaaaaaaaaaaaaaaaaaaaaaaaaaaagaaaaaaaaaaggggggggaccccataaaaggagccgccctcccgcccgcggccaggcggcggcgtgggtctcctttggggggggcgccggccatccctctgcccgccgttgtccggcggggccccgggggaaccccccctgatccccaccatagtaggcgccccgcacaccccccgctggccagctgggggggtcgcgacgagggcccctcccaccgccctccccaccagttgtggccgccgggagggcgcctggggccccccctgctgcggcgccttaagcgcggggggggcggtggtgccccgcagcatggccgctacccttgctgccgccctttcacccgctcttcctttttttttccccccctttgtcggcctgcccgccggggttccccctagggggctacttcgggg

SEQ ID NO: 8160 - DNA, 1365 bp, Oryza sativa
  Clone ID: PAT_MRT4530_14691C.1
ttttttttttttttttgcttcagaaattatatccggctgcttcgttttccttgtctgtaatgctcccattcagatcacttaccctattcactgcgttacaactcaaatgccttaggtcagaattgatacaactatatgagtacgacattttctgcagtaaaaagaagggttaactagaagctctccaactccaactacacaatgcaataggttgtacacatacgagcaaaagatgacaagagtacacaatgaatgaatataagacgacgtcgcacaaaagctcagtttggtccccaaatgctactttacaaaatggctttgaaaaatactgagctacttgaccactatacagatcgctcccgtcgagtcttctggcgaccatatcatcaccaagacagacgacaggttggaggattttgaggaacagacttcccaaggcaaggcagctgttctcaatgcagaactcttgacttggtctttaacttttttggctgtgcagtcccctcaaatttcaaaacttcagcaaagatcaaaaccatctcggcgttcgaaatttggcaaacgccaaggccatccactttatttgtattgctgtcatactgttcatcacaacattctcaacaaagcattgacaattgacaaccccaatatacaaatcatctttatctccctcatcagccatatcttcagaggctcgtcatgatgtcaacatctaataacctatgtttatatgctcatgagtcctggcatccgctacatgcacgcacctcggtcactgtagtggtctagagcagcatttggcagcatcatgtgaaactcagcacattgaacaccattagatccatgcgctccattatggtcctcaaatgatgtgcatgactcgtcttggacgtcggcatcacctccaggattatctgtgttggatcccagaggcttctggcttggtccatctctgagcccagataaactatcagctaccttctcatggaaggagtcttcagactctggggacatgggattgttcacgtaataatcatgtgctggggactcaactgcagaatcctcatcctctgttacagaaggctcatcaggaacctcatcatcatcactgtccacgtgcaatggctccgatctgttttgctgagccctcttacgaagcatgaagacattgaaatagtagctgacaagctccatgctagttttaccaggcaaagctcgtgggagaaaatgccaaaagttctttcccaaggaaggaggattagagtaaacaactctataaaagagactttcctcctcatctgtccatctctgagcaatatcttctcccatatcacaaagacctaactcacgaaatttgtcctctcc

SEQ ID NO: 8161 - DNA, 1101 bp, Oryza sativa
  Clone ID: PAT_MRT4530_14692C.1
ggcaggaacgtaaatgtcgcatattagccaaaatttttgctgtgttgctcaatcaataaatcttaagctgcaaaatatattgtaggcttcaaggagacaaaggtaaaagataagtctgtaattcagaagacagaaattcaccaccaggacggtatgtttctgctactgattacacgagtacagtttgtgtcgattttagcacagttaatactcccacaaccacacattcactaactttggtcttttacacataactgtcgatcaaagacttcctcatgtcatcaacaatcgcggcaggctgcccttctctcagcttgaagacgctctcaatgaccgatagctcagtagccgtagtgtctgagccacagaaagcagtccagtcattcactgtcatgcccgcagcaatgacctcgctgcctcggttcacggttccagcaacaagagggacttgcaggagcgtggacagctcatcaagatcttcaatggatgtatgaggatggactaggccacccctgtttgtaatcgcacagtagcttcccacaaggatgtttcctgcaattgtctgccggaacacctcaaccccaagcacatctgcaataagttcctcagtggccttgtcgaggtcagggtgtgtaagcgcgacatggtcattgcaagctacacaattgccaagcgcagatagcctttcatcaatacgctgaacaaccacttgatcaggcaagcagttcctcagatgctgaagctcttgatcggtggtagtgtgaggcaagagaagtccattcttgtttccgacacagagacgaccaattattctagtaccacctatggaggtcttgacaacaggaataacatctgcgagctcagattcaaaggcactgtagaagttctctgatcctccaattgcaacaagacaataggcatttgtcaacttggagaaaacaccaacttcacaattgttctcaaactgaatacgggtcgccatggtcgattccgcctcgtcgcagccgccgcttctcttctactaatcaacacacacctggaacgaaaaggcggcgaatcgggaggtgaaggcgcggctagggtttgagggtgcgaaaacaa

SEQ ID NO: 8162 - DNA, 1278 bp, Oryza sativa
  Clone ID: PAT_MRT4530_14693C.1
cccacggggcccaagcaatcaagcgacgataattagagcactcgcgacctctccgacgatctccagctcactgcttttaggttctcaaactctgatttcctctctactctgtagtgcaatggctgctccattcgctctcgtcagccgtgtctcgccagcggcgcgcctccccatccgcgccgcctggaggagggcgaggccgacggtcgggctcccgtcctcggggagggcccgccagctcgccgtggcctccgcggcgcaggagaacagggacaacaccgccgtcgatgtccacgtcaaccaggacggcgggaaccagcaggggaacgccgtgcagcgccgcccgcgccgctcgtcggcgttggacggcatctccccgttcggcctcgtggacccgatgtcgccgatgcggacgatgcggcagatgctggacacgatggaccggattttcgacgacgtcgcgctggggttccccgccacgccgcggaggtcgctggcgacgggggaggtgcggatgccgtgggacgtcatggaggacgacaaggaggtgaggatgcggttcgacatgccgggcctgtcgcgggaggaggtgaaggtgatggtggaggacgacgcgctcgtcatccgcggggagcacaagaaggaggagggcgagggcgcggagggctccggcgacgggtggtggaaggagcgcagcgtgagctcctacgacatgcggctcgcgctccccgacgagtgcgacaagagcaaggtccgcgccgagctcaagaacggcgtgctgctcgtcaccgtgcccaagacggaggtggagcgcaaggtcatcgacgtgcaggtccagtagacgaatcgctgctactactactgaacgatcactctggaggatgtgagcctgtgagcgtgagggtttaagcagtgtgaggtttgaaaaagtcgtgtactagaggttgtaattactcagcgaacgagcgaatgaatggaataatgctagtatgagataaaaggtttggttgcttcatcaaaaaaaaaaaaaaaccaaattgctgtagttctggcgtttctccatgaggaaaattgtagacagaaatagctgtgattgtctatgaatctttgaacagaaccagcagttaccaaggctgagacactgagcttagctagttagctgttgtggacttagatgcgccttattggacaaattgtacttacaatgtcgtcttataagtgacagataaaatatctcaagaagttagtcatggagaaaaaaaaaaaaaaaaaaaaaaa

SEQ ID NO: 8163 - DNA, 560 bp, Oryza sativa
  Clone ID: PAT_MRT4530_14694C.1
gggcgcaggccgctttctcagtttgttctgtactgacctgagcttctttcccttctattttttcttgttgcactgatgcatggtggcacctactatgttccgtttactgggttttgagttcattaaagccttaactcttctacttccttaccgtgttttgatttgatggagccaggttctagttgatcagcatatacagcagacatcataataatttctatagaagcttgctatatactctctccatccaaaagtctaagacctatttcatttttttggtttttccaaaagtctaagacctatttgtaatctctgtgttaaattaaattgttgactggaacctaagaagcaatcttagtatttattggttacatgcatgtgtatagttcattggttttgttacatggtggatgagtttcggatggagtacaacttacatttaaaataaaatcagctgaacatagatatagctggtaccatgctagagcataccttgcatcattgcatgtggttgcgccacataatgcacaatacactttgacttaaaaaatctttgcaca

SEQ ID NO: 8164 - DNA, 433 bp, Oryza sativa
  Clone ID: PAT_MRT4530_14695C.1
aaaactggcccaacattttataaaaaaaggcttagcggttcgcaccctcagttacccaaatagcagccaagagcgcctaaaatacaaaagctgccccaaaatttggggagccgcccatcacaaaaaagtttgaaagagggagagagcccccagggtaaagcttttttttagaaatggttcacttgccttggccagggttaaaaacatttaagttttttttgcccctacaggctaagggtttttttgagggaatggcctttttcctccaagctcccaagcaggttgtaaaaggcctttttgaaggagtccacaccttccagttttaggtgttggccaacctaatcccaatttatacccagtttttccagggcactgtttaccccttaagaatccaaaacgttggggtggattgtcctcaaaactgggccggggt

SEQ ID NO: 8165 - DNA, 324 bp, Oryza sativa
  Clone ID: PAT_MRT4530_14696C.1
atggcgactgggggcagggggagggggctgtgtacaaaacaggatcttgcagcactgggacgaatcgatggcgtcaacgttggagaacccgctgaagcggcggcagcggcttcgagctcgagtctcgggccccgtcggcgccacgctgtccgtgtcccgcgactgcgaactcgccgttgccagcgccaactcatgaagatcaatgcggcgacgcaacaggaggaatcggcggcgcggggggtaatatactcgtgttgtgtaaggctcttagccatacaagctgcagctactgtggctgctatatcacaaattgactacaagtag

SEQ ID NO: 8166 - DNA, 905 bp, Oryza sativa
  Clone ID: PAT_MRT4530_14697C.1
atggcgaattgtggccggaggtttgccgccgccggcgctccggcgacggcgagacggtgtaatctggagctgttcctcgaggccaccacgccggttgtcccgacgacagcctgctcctccaagaagagcatgaatggttggaagcaatctgatgaagaaaatgcgctgccattcttcagtttgggcgacctctgggatgggttcagagagagcagcgcatatggtatcgctgtgccaattgttctgaatggttgcagtgacggtgtggtgcagtattacgtgccttacatatctgcaatgagctgtgatttgtcgccaaccagttggatgtccgtcgcatggtatccaatataccgaattccgacgggaccaacactacgcgatctggacgcctgcttcctcacatatcatcccctctccacgcagctcacaggcggcatctgcccggagccaaaaggcaacaacagcggcgtccccgtgacgacggcgatgtgcctcccgacgttcgccatggcgtcgtacagactcaaggtcgcggcgtgggcaccgggcgggcgagacaggcagctggtcgcctccctctcgcacgccgccgacgcctggctcggcctcctcggagttcaccacccggatcaccgcttcttcgccgctcgccgcgtcgtgtccagaagatgatgagtcgatggagatcgcctgccaacctgagagtgcagagaagttctctgtgttctttttttttttttgtgtgtctcattcagttcgtagattgtcagggttcagaatgtactcggatagttggatcacaaagcgtgcatcctgtttttgttttccagtaatggtttcagagaaagattaaccaagaatgtatatagaattagaagacaattaaaaatgtgttttctttt

SEQ ID NO: 8167 - DNA, 6711 bp, Oryza sativa
  Clone ID: PAT_MRT4530_14698C.1
atgtcggacttaggggaaaagaatggggaaaatggaaatgaagatggagcgagcagcaagggaactccatcaaccaagggagctactataccttttgattacagcaaacttaccattccctctcacaactttgtctccgtgccttccgggcatgctcctcaatttgatgggacacattacgccgcttggaagcacaagatgaagttgaatctaatctctctgcatccaagtatttggaaagttgtttgtacaggtgttgatgtaccccatgatgatatggagctcacttcggagcaagagcaactcatccaccgcaatgctcaagcttccaatgcaattctctccgccttgagtccggaggagttcaacaaggttgatgggtctgaggaggccaaggagatatgggatactttgcaattggctcatgagggttcacccgccgtttgtgaggccaaaattgaattattggaaggaaggcttggaagatttgtgatggatgacaaggagacaccacaagagatgtatgataggatgatgattcttgtcaacaagatcaaaggacttgggagtgaggacatgacaaatcactttgttgtcaagagacttctccgtgcttttggtccaagaaatcccactcttgtatctatgatatgggaaagaaaagacttcaagaggctcaccccaagtgacattcttggaagaattgtgtctcatgagatgcaagaagaggaagctcatgaagtgaggcaaatggtgaagaatgccgccatgatcaaaaatcaagaagttgcttggaaggcaaaacaagaagaagagtcaagttgtgaagaaagtgaagatgaagagatggcttttattgtcaagagattcaagcactttcttcgcaagagtggctatggcaaagggaggaaggatgatgacaagggaaagcggcaatcaaagagagcttgcttcaattgtggtgaatatggccacttcattgccgattgtcccaagtcaaatgaagctaaggctaagggaggcaagaagaagccggagcgtgctcatgtggcggaggcacacatggcggaggtgtggtactccggagatgaggaagatcccgaggtcaagcccaagcccaagccaaaagacaaggttgaaggagaaggtggtgttgctaccgtcgccttcaagtcatcttcttcaagcaaggagcgtctcttcaacaacttgagtgatgacgacgatgactcctaccactactcttgtttcatggcccaaggccgcaaggtgatgactcaaaagccctctcacacctctcttgatgttgattctagtgatgaggaaagtgataatgaattagatgatgtgcttaagagctttagcaaacccgctatgcaacatttggctaagttaatgagagctttggatagtaaagaacaatctctcgaaagacaagaagaattacttattcttgagaagaaaagaaaccttgccttagaggagagcctagctaaaaaatgtgctaaaaatgaacaactagctaatgagcttaatttggctaatggttctctagctagccttagggatgtcagtgaaactcttcaagagaagtttgctagtttagacaaaagtcataaagatcttgaagttcaatttgacactctttggaatagcacttctcaaccaaatgtggtttctaattcttccaacccatctactagcaatggttgtgctaggtgttacaatattgatttgaactctcatgctactaatattgatgctatgcaagctcttaagaaagagaatgaaaggttaggcacattggtgaaatatggatgcataaagacataccattcaaaagatgccctttacaagaccatcaccgctcatcctaacaaggatggacacgggctcgggttttctggtggaagtcctgtgtttaagcgtgtgatggtaaatgggaaagaatgcttgatgtttgtaagagaaggaaaagctccacaagcaagtgagatgacttgtcccctcactggtcagacacccggaagttccgggcaaaatgaccggatgttcctgccctgtaagactggaagttccggacattttgtcaggaagttccgggcttctgataggccgaaggggctgaccggaagttccgggtataatgctaggaagtttcagccagagggtctttactatgattcatatgtaatttccaaaaattcagagggcaaagtggttgcttattttaatgggaattacaatgatgagtaccgcacttgtgtgtgggtgccaaaggctttggcatactcctccggtggctcaagttgggttgtggacagtggctgcaccaatcatatgacgggagagaggagtatgtttacaagtcttgatgaggagggtggaagtcgtgaaaatattgtctttggagatgatggtaaaggaaaggtaatgggtctcggtaagattgccatttccaagaatcaatctctttctaatgtcctccttgtcaattctttaagctacaatttattatccgtgtctcaattgtgtaagttaggatttaattgcttgtttaccgatgtggatgtgaccgtttttaggcgagatgactcttccatagcattcaagggtgtgttaaagggtgatctctatctcgttgatttcgacgtagatagagtgaatccggaggcatgcttgattgctaaatcctctatgggttggctatggcaccgtaggctagcccatgttggaatgaggaatttggcatctcttctaaaaggggaacacattcttggtctatctaatgtttcttttgagaaagatcgtgtgtgtagtgcttgccaagctgggaagcaagttgggagtccacatcctataaaaaacatcatgactacaacaagaccactcgagcttcttcatatggatttatttgggcccgtggcctacataagcattggaggtaacaagtatggtttcgtcattgttgatgatttttcacgtttcacttgggtgtactttctccatgacaaaagcgaagctcaagatgtcttcaagcgcttcgcaaagcaagcccaaaacctctatgatctcactatcaagagggaagaaggaatcaagcacgagttctccgccccctatgatcctccccaaaacggcattgttgagaggaagaaccaaaccctcattgaagccgcaagggcaatgcttgatgagtacaagacttcggatgtattttgggcggaggccgtgagtaccgcatgtcatgccatcaatcacttgtacctccacaagatcctaaagaaaacctcatatgagctcttgagtggtaagaagcctaatgtttcatattttcttgtctttgggagcaaatgttttattttaagtaagaggcctcgctcatctaagttctcacctaagatggatgagggattcttatttggctatgaatcaaatgcacatgcctatcgtgtcttcaacaaaacctccggtattgttgaagtcactagggatgtgacatttgatgaatctaatggctcccaaggagagcaagttgttgtacatgttgtaggggatgtggatccaagtcaagctataggtactaaggctattagagacatacgaccagtcgagacgcaggatgaccaagaagatagggatcaacctccgtcatcgacatccaatagccctacaagtgctgtgtctgttgagccggaagttctgggtcctattgaccggaacctctggacatctccaggcccggaagttccgggttctatagtccggaatctccggaccagtggcagtgaagatgcacaaatggatcgtagatggatgtactatgcgcatcgttcgtctaccgagtataaagagggggtcactgaatttgtcacatttgcggataatgacagaaaaagtaggatgagcatgcacatgttgtgtccatgtagggactgtaagaatgaccagatgatcgaagacaaggatgaagtgcatgttcatttgataatgaatggattcatgaagaaatatacctgctggaccaagcatggagagcaagaggtgcctgatgtcgcagctgaagaagtgttggatcaggatgtagagaacaccgccgcagctcgagatggcatgttcgtaccttctcctttaggtggagagaccatagatttggacactcaatgtctattacaatgttgcatgacattgaagacgcagaggacaacgacagagattttgagaagtttagaatacgctgacttggatgtctgccctatctatggggcatcaagatacaaacgagcaaagagtgaaggtgaaggaagtaagtcaaagaggggaggcccagcaaaggtggtgtggtatctcccaattgcggagcgcatgaagagaatgtttgcgaataaggaacaagctaagcttgtgcgctggcatgccgaagaacggaaagtcgatagtatgctgacgcacccagcagatttagtacagtggaggacaatcgataggatttaccaggaattctcaaatgacccaagaaacatgcgtttcgcaatgtgtacggacggcattaatccttttggtgatttgagcagtcgtcacagtacatggccagttctgcttgttaactataaccttcctccctggttgtgtttcaaaagaaagtatattatgcttgccatgctcattcaaggaccgagacaacctggcaacgatatcgatgtgttccttgaaccgataatcgatgacttcgaaaggctatggaatgagggtacacgaacatgggacgcatatgcacaagagtatttcaacctccatgcgatgctgttttgtaccatcaacgattatccggcccttggcaacctttctggccaaactgtgaaagggaaatgggcatgttcggagtgtatggaggaaacaagaagcaaatggttgaagcattcacacaagacggtctacatgggtcacagaagatttctcccaaggtatcacccatataggaatatgataaagaatttcaatggacacagagatacagccggaccaccggcagagctaacagggacagaggtgcacaacttagtgatgggaataaccaacgagtttggaaaaaagaggaaagttggaaagcgaaaagagaagagcacatcgaaggaaaaaacagaggagcatgtggaaaaacaaaagataaaagagaggagcatgtggaaaaagaagtcaatattttggagactaccatactggaaggatcttgaagttcgccactgcatagatttgatgcatgtcgagaagaatgtatgcgagagtttaatgggattactgcttaacccaggtactacaaaggatggtctcaacgcccgacgagatctggaagatatgggggttcgctcggagctacatcccataaccacggaatccggcagggtttaccttcctccagcctgctacactctctcgaaagaagagaagattgatttgctaacatgtttgagtggtataaaggttccatctggttactcatcaagaattagtaggctcgtttcactgcaagatcttaagttggtaggaatgaagtcgcatgattgccacgttcttatcacacagctgttgcccgttgcaataaggaatattttgcctcctaaggtgcgacacacgatccagcggttgtgttccttcttccatgcaatcggccagaagatcattgatcccgagggactagatgaactacagacagaacttgtgagaaccctatgtcatcttgagatgtactttcctccaactttctttgacataatggaacatcttccggtgcaccttgtgaggcaaacaaagtgctgtggtccagcatttatgacgcagatgtatccttgcgaaaggtacctggggatctttaagggttatgtacggaaccgttcacaccctgaggggagtatcatcgagagttacaccaccgaagaggtcatcgatttttgtgtggactacatgtcagaaacatcttcaattggattaccacgatctcatcacgaagggaggcttgatggtgttggtactgttggaagaaagactattaggttggatcggaaggtgtacgataaagctcatttcacggtactacagcatatgactgaggtggtgccgtacgttgacgaacaccttgcagttatccgacaagagaacccaggccgatcaaagagttgggtcaggaataagcacatgtcttctttcaacgagtggctgaagaaccgaattgccaggttgcagaacttgtctagtgaaacacttcagtggttgtcacagggtcctgaatggagtgccaccacctggcaaggatatgacataaatggatacacctttcacacggtaaagcaagacagcaaatgcacagtgcagaacagtgggttacgcatcgaagctgctagtgacggtggtcgtcgtgatcaatactacggtttcaccactgtcaacttggctaacaacgcgtacaaggatgaaccgttcattctcgccaaacaagttgttcaagtgttcaacatagttgacccgtgtaacaagaaactacatgttgttcgtgaagggaaaaggagaattgttggattggaaaatattgtagacgaggatgattacaaccagcacgtccacggcataggtcaagaaatacctctagaagaggaggaagaagaagatgaagttcaatatgcatgtgtcgaccatgaggaaggattatttttgtaa

SEQ ID NO: 8168 - DNA, 309 bp, Oryza sativa
  Clone ID: PAT_MRT4530_14699C.1
aaaacaaattttcatttattggtaatatatagcacatggggcaaattcttcattgcctttgcaggaaccaaccaacagcgggccttttattaaaaacagaaccctcttactggtacccgtgaagcaagagcttaaagatagtgaccaggaaaacaccagtgaagattaacttacttttgctgacaaaacttccaattgcaaacaaataaaaccggggtcatacctaattgaagacccttcacaagaggagagccatgaaacacagtttataaaattccctaatgccaaagttttaagcaaaaattcaaa

SEQ ID NO: 8169 - DNA, 1125 bp, Oryza sativa
  Clone ID: PAT_MRT4530_1469C.1
tggatagctaatgagagcaagcatctagagtatctggttcttgattccttggccgtctataagcttgtgtgtgcagcatcagctagcaacagaagcagcttcagctcagctgcaatggaggagcagctgaacccactggctgtgacacagctactgcagcacacgctgcgcggcctctgcacccaaggcgactcccagtgggtgtacgccgtcttctggcgaatcctcccaagaaactaccctcctccaaaatgggatcttcagggtggtgtttatgacaggagtagaggaaacaggaggaactggatcctggcatgggaggatggattctgcaactttgcagcctctgcctgtgaccaagaggacacaccagctgctgccgggtacactgactatgcagcagctgggcatgaggtgaagggcctccagcctgagctcttcttcaagatgtcccatgacatctacaactatggggaagggttggttgggaaagttgcagctgaccatggccacaagtgggtgtcccaggaggccaatgagcacgagatcaacctggttacctcatggaacaaccctgccgattctcatccaaggacatgggaagctcagttccagtccggtatcaagaccattgctctgatcgccgtcagagaaggcgttgtacagttaggctccatgaagaaggtggcggaggacctgagctacgtggtggcgctgcggcggaagttcgggtacctggagagcatcccgggcgtgctgctgccgcacccgtcgtcggccgcgttccccggcgccggcggcctgcaggacgcggcctgggcgccgtcgccgacgatggacctctacgacccctactacggcgcccatgccgcggcggcgcagatgcaccacatcgtgccgtcgatgagcagcctggaggcgctcctctcgaagctgccgtcggtcggccccacggcggcgcccggcgccattcgcggcgccattggcggcggctctgtggccaaggaggagctggacgacgccatggacgcggcgggcaacggcggcggcgagagcaccagcgccgccacgacgccgctggtgccgtactacgtagacgtggctaaacccgacgaggggttttag

SEQ ID NO: 8170 - DNA, 143 bp, Oryza sativa
  Clone ID: PAT_MRT4530_146C.1
ctggggtgtagagtggtgggccccacacatacgatcttctacagcccctgccctctatttatatgtctcgcagtgatcgtatacgtcttttttccacccaattttgacgtgaagctggagcacggctcgaggaggctctgtat

SEQ ID NO: 8171 - DNA, 4301 bp, Oryza sativa
  Clone ID: PAT_MRT4530_14700C.1
atggaggaagcggcggcggcggcggcggatttcgatggcggcttcggcggcgccggggaggacaacctgtccatgcccctcggcgacttcatggccttcctcgataacgaggactggaaggagcagcagcacgagtggcgatgggctataaatggccatcaggctgttgggattggagaaggtcaaacaggaagcagcttggtaatgaatggtcaagcattacaaacaaaaactcaaaacgacaagtattttgggacggagggcaatcaaggtttagagatgccagtggacagcacaagttctgaaaatgcatttcaaaaccatgaagaaatttttgagaataaagaaaattggtcaaactactcgcatacagatccttcacatagtcagatggatgtaatggtggaacttaacaatggtggagaatcttttgatcactcagaggatacctcttatagattgcttagcaatgattttttggaaaattcaaggaatggtaatcctgagatgcatttaccaatggatgcattaaaccatgctaaaactgttgatgaagaaattgtccctccatatgaagattatacaaatggtttatactatgattcgggatgtgatatgttcgcagagcaatctggtttaagtgaagttaaatgtgagggcacaggtcccatgcttggtaattctgagcaggagggtaaccatttcacgtcagtgcctatgtttgaccatagtgctgttatacctgatattccttacaccgagttgaacatcggtgatgtgcctggaagcatgcagaatggaaatggcagttgcctaactgtacaaggagaatatctgcagggggagtatcaggagtatcctcagccagattatggatcgtttgatatggctaatgaaatagtgctgcatgatttgccacaaaacaatcagtcatatgagctggaacaattaccacagaatatatgtgaaagcagttcaatgcaagtgggctctccagatcaatattgtgatgatacatctctgtcggattattacatggatgatgtatcttcgatagagtcgatgtccagcgagcagaaccgatcagaagatatctgtttccggagtgagtctagcactgactcttctccggtgccctcaagcagaaactccaccactgaggatgctgataaatactttggagatgcaccaaaacatttgcagaattccatgtttcctgtcagtacccaacaccaacactcattcatgaactcaagtgatccaatgcatccaacttttcataaaaagtatgacattcctagaaatggcagctcttctattctgggtaactcatcaaggaattgcttcagtttagatagcaatcgtgattctgatttatgtattcttgagggtagtagaagtcttgctagtggacatgtgttgccaccccaaggattgcagcataactttcaacaatctgtgtgtgccaatcctaatcttcctcggtttggagggagatacaggccgcatgaggaaagaatgactttgcggcttgcattacagccattacttgatgcacctcttgcatccagtttgcttgatatttctcagccaaagtctgaggctaatccacctgatggagttttagcagttcctttattgaggcaccagaaaattgccttgtcatggatggtacaaaaggagagaaatggttcgagttgctctggcggaattcttgcagatgatcagggcctgggtaaaacagtgtcgactatatcactgattttgacagaaaggtcaccagttccatcttcagctgttaagcaagaaccatgcgaagctgtaacccttgacgatgacgatgaggatgacgatgctgagcctcatttgaagaaaccggcactagcacatctagcagatacatgtaaacctgaagcgacaagtagtaccattaagacagaaaatcctattgcaaatgttaaggctagaccagctgctgggactttggttgtttgccccacgagtgttctacgtcagtgggcagatgaactgaggaataaagtcaccagtaaagctaacttgacctttttagtatatcatggtagcaaccgcacaaaggatcctaatgatcttactaaatacgatgtcgtgttaaccacatattctatagtaagcatggaagtaccaaaacaatcaagtcctgatagtgatgatgaagagaaagggaagcctgacaggtatggtgctcctgttggctcctcaggcagcaaaaaacggaagacttcctcttctaagaagaacaaaagtggaagcacaccagagagtaaattgcctgagaaacctctcgcaaaagttgcatggtttagagttatccttgatgaagcacaaagtattaaaaattatcgaacccaggttgctagggcatgctggggtctgcgagccaaaagaagatggtgcttgtcagggacacctatacagaatgctgttgaggatctctatagctatttcagatttctcagatatgatccatatgctgaatacaaaaaattttgcttcatgataaaaacaccaatcagcaggaacccaattactgggtacaagaagcttcaggttgttctgaagacagtaatgctgaggaggacaaaagcaacgatgcttgatggaaaaccaataatctcattacccccaaagaccgtctctcttaagacagtggacttcactagtgaagagcgtgctttctataacactctcgaagcagaatcacgagagcagttcaaggagtatgcagctgctggtactgtcaagcaaaactacgtcaatatcctgctgatgcttttacggctcagacaggcatgtgatcaccctcacttagttcgaggtcatgagtctacttctagttggatgtcttcattggagatggcaaagaagctgcctgtagaaaggcagcaatcgttgctggtttgcttgcaatcgtgttctgcgatatgtgctctctgcaatgatgcgccagaagatgccgttgttactatatgtggtcatgttttctgcaaccagtgcatactggagcaacttaccggtgatgacagtgtatgtccagtgtccaattgccgagtccgactaaattcaacttccttattctcccgaggcacccttgaatgtgctctgagtagatcaacctgtgagtttctgtctgatgattcctgtgaagacatggtgcaagggaagcaacctagatttgattcgtcttatgcatcttccaaagtgagagctgccctggatattcttctctcgttgcctaaactggatttaacccatatgagtgatgacaaaaataaaattgtgcatcctgacaaaattaacgggaatagtactccctctgaatatgctggcaccaaaataactgagaaggccatcgttttctctcaatggactagaatgctggatttggtagaggttcatttgaaatcttctcatctatcttatcggaggcttgatggaacaatgtccgtcgcagctcgggatagagctgtaaaagacttcaacacaaatccagaggtttctgttatgattatgtctctcaaagctgcaagtcttggtctgaatatggtggcggcctgtcatgtacttttgcttgatctttggtggaatcctactacagaagaccaagctgttgacagagcgcatcgtattggccaaactcgacctgtcacagtgtcacggttaaccataaaagataccgttgaagatcgtattttggctctccaggagaaaaaacgggagatggtggcttctgcatttggggaagacaaatctggtgcccatcaaactagattgacggtggaagacttgaactatttgtttatggtttagcatttctcctgagattggacacaattttgctcgtgggatggtgtaacttgcatctataggtgaaatatctgtcaggagatagcatttctctaggcgtctagtgtttctagtttgtacaggtgctcagattttgtagttaaaggtggcattgtggtgcgattcattttttctccgtgcaagtggcaactcatcaggtaatttttcgatgagctgcagtggtgtcttttgatcatgaagatacaaaggagaacgtcattagctaacgccatatttgtacatagttttcaccagcaatcttaactcatcttgagcttcgcatttcagccgtatggttgtacatcataaaccatgtaaaagattaagctgaacttgtcttcgacaatttttttcagttgatcaaacatgatagtttatggggaatgaaatttgctcaaaagttctaatgaaaaaaa

SEQ ID NO: 8172 - DNA, 359 bp, Oryza sativa
  Clone ID: PAT_MRT4530_14701C.1
aaaaaaggaaaaacaattttttttttttttatttcacccaaagtttcacatgtcacatatgaggatttttggccttttttttaacttccgaaccctttttctgttaaaacttttttcaagacccccccaagggtggtaatggttctgggtgccccataatccctaggggaaataccatttttagagggcccgttaaaagccaacaaattttgtgcttggcccaaattcctatcaagagggaattccccaaactttttgatttgaactttttgccttatggcctgaacaattttaatttcctgaaagggaaatttttgccccaccagctcgagcttttgccaaatttgtttttttttcaa

SEQ ID NO: 8173 - DNA, 1618 bp, Oryza sativa
  Clone ID: PAT_MRT4530_14702C.1
ttttgttttttttttttttttcagaaaagcatcatttttttgctttgcttcttggatttgtgatcagaatgtatatgtcaaagacatgataatacaaatggggcactagaatctgacattctgtctaactacctatctagaaaaaattatatgggtactcaaattctcaacttgctaatcatcactagaacacaatagttaagaagcatgaaatccttgcacaaggttttgtcaggcttgcatattcttactgttaggattcattaatttacggtagaatggccgaagaaacttgtcatcatgtttctgcctattcggtcttccatgcattaagtatcaaagtgaagccaaaacgatgcgcttgaagctccttttcattctgagagcatgaccttgacagtaatttttccatggattggcctgactgaaacaagaacacggcacatccattcgatgaaccaaatagccagtcatgaacatcccataggacctctactggaagtccatcaacatagactgtctggtttcctctgaacttccatgcaagtctcttcacctgcatgactctcttcttgccaatcctgatttctaggcttggatccttcaaccccgatgtgtcacactctatggtgatatggtggagctgaccaatgtccaaaaaccgggccttcgctgaatacaccttcttcccataaacatgttccttcctggctatcatgacagcattggaggccaatacatctgacgaaaccctgtgatccccatccttgcgcatgtcgccgagcacaagaacagcttcaagatcacagaccagggcaacatagaagccttcgacgggttctggcccggccgcaaacttcgcagaggacaggtcccagacgatatccagtgctccaccatcgacctccatggccttggaacctttcctcttggagaacagccatggctttatctctgccttgcaaaggcaacgattcgaggagtcgtcgactgcgacggacagagcctgccccatggtcatcttgctccaggtgacggtcacgctgcaagatttgccacggaggcgggctaggtaggtgcactgcaccatgttctggccacctggagaagaggaatgggcgacctggacgccgctttgacttaagcaagatgcaaagtctctcatcgtgacgatggcgacggttgcaagttgcacgcccaccttctcctttgcggctttctgacgaacacctcgtgcgcaaccgccctggaatctgaaacaacagcagcaccgcaaacaaatcaagaacccgaagaacggaacatcatttaggaactcccagagatcaaccagagaaggagcagccatacctttccccccgacgaaatcaagaacaccaccggcgaagaacggagcagcgggagcctcagcaatcagcagcggacagtgctccttcccctccctcccgccaccagcagcagcgtggcgttggggaatgtgggcagcagaaaagacgcggaggcagacaggcaggcagcaagcggccgaggcagacagggcaggctcttgggtgtcgggaggtggagggcgcggctgcactgtccagtcgcagcgagaggtcgccttcctcgcggacat

SEQ ID NO: 8174 - DNA, 889 bp, Oryza sativa
  Clone ID: PAT_MRT4530_14703C.1
ccccagttagcagcaagcgcaggaaggaggtgtttccgcatgccatggatgaggaatgcttcttgccactcaactcttgcggcgagaggacacaacaagatgtggagatgcattcagtagtgcagccttcatggcagcacgaattttctggggtgatgaaaaaggctcgcgggcctgtgactgccgccaagtcgatttatgaagatgaccaaggctacttgataatggtcagcttaccatttgttgatcagcagaaggtgaaagtttcatggaggaacagtcttactcatggtatagtaaagatcctttgtgttagtacagcccagacgccatacatcagaaggcatgacagggtattcaagcttgctgatcctatgcctgagcactgccctcatggggaatttgtccgtgaaatacctctagcaactcgcatccctgaagacgctaagctagaagcatactttgatgaggccgctgcagtgcttgagatcatggttcccaaacgtggaaatgagccagaagaacatgaagtaagagtctctatgcgcccccctcaccttgcagctaacgatctactcctgacataaccagtggaaggtctatcaaccatatagtcttgtttctgaccaccagatcaatgcccaaacatggctgagaaggtatgagcatgactgtgttgggagttttgctttctgagtatttgtcgtactgcactaggcctcttcagcgaagtctgctgaaggctactcagtttgttctagtatgttatgatgggtgtctttttagccctcatgctcttctcctttgtagaatatggctagattgctttttctagaatttgtactgtgttgaattaaccagaaataaattgtctgaattactattccct

SEQ ID NO: 8175 - DNA, 272 bp, Oryza sativa
  Clone ID: PAT_MRT4530_14704C.1
actacccattgttgcccagtactgtaaaccagacttgtgaacactcagcttgcacagtttaaccatcaaatcctgaccaggggacacattgtgttcaaggttctataggttccatggacctctgccactcagcacttgcaaacaagcaggtatatgatagtgattggctcttcacaggacgagccaccaccatgaaatgaaagaggcttgtctgacacattcggtgtccaatgattatatgagttatcgttacagacatatacactggttgc

SEQ ID NO: 8176 - DNA, 191 bp, Oryza sativa
  Clone ID: PAT_MRT4530_14705C.1
gtatgaaccgaaaacattgttttggaaccgatatcattatgatccgtctttgaaagaaagccaacacggggacagggatttctttagagattcacaaacaataattaaaagcagcatactgtggattccagttttaggtagaaaataccatggaacaacccacaggtccaaaaactattcactagctgcat

SEQ ID NO: 8177 - DNA, 570 bp, Oryza sativa
  Clone ID: PAT_MRT4530_14706C.1
atgggagattctgaggcccatctgttatggggctatctaccgactgactgggccatcctctcccagggaggctgccaccgatggcaaatgggggcgaggcgagcctggccgagctccgccgccgtcgccgcactgacgcacacgcgctcgctcgctatcgcttcctctaccccctgcgtcgtcgcttcccctgtcccctttgcccccgctcccaacggcgaagaggcagtcctagggacattccttgaggaccagcagtgccgccgcctcgaccggatctgggagcaccccactaccacgacagcggaggtggctagaggaggagtggagcggtggtggcctttgtcgtcgttgtcgatggaggatagcgagagggagccgcccggggtgggccccgccgagggcaccagcgcgtccccccgacaaccggtgctaagtcgctgcctcctcctcgccatccctagtcggcgtcttgtcatcgccgccccaatctcgtcgttgcagcgggtcacacccccacgctacctcctcgccgtcatggttgcagtggtcgccgccaccaccacatag

SEQ ID NO: 8178 - DNA, 919 bp, Oryza sativa
  Clone ID: PAT_MRT4530_14707C.1
agtggatccccgggctgcaggaatcggcacgaggcaaccctcaccctcatccgccgcctcctctcctctcctctcctcgtcggcgccgccgcccccgccgccgccggaagaagagaagagaagaaggcgatcatccatggagcgagaggaggatgcttcttctacccctctccccggcggcgccgatgactacatccgcgactccatccacgactcgctcggcctccccgtctccgaccgctccctccgcctcaagctgctcgcctccgaggaccatcgccgccgcctccaggaccacgtcttcgtcctcgaggaggacctccgcgcagccgcacgccgcatcgaacagctcaaggcggagtccaccatgaacgccgcgggcctgcgccgctgcatcgaggagaaggagaccatggtctccgcctacaacgacctctcctcccactccaccaagcttgagcgggagtgcaccctctacgagcgggacctcgaacgcgccatggagtcctgcgacgacctcgctaaggagaacgacgaaatgcgcgcacgcctcaatgaccacaccaccctttctgcattgaccactcaagttgaagctctgcacaaggacaaggaaaacctaaggatcaatcttaataaagcagaggaggaggtcaagctgctattcgaggaaaacaagattcttgacgaagagaacaaaaaactgttggctctgttggagaaagagcgacagcaccggtctgagagaaagcattcctccagtgcgtccaccaccaagcacaagcgcaaatcatcaagtttgaaggatacgagcccagtgggtcggaccatcgatttcaatggtgcagattcatcatcgaggcacccgctttcaccattgccaccaaactccccagactacagggcgcacaagaaatga

SEQ ID NO: 8179 - DNA, 150 bp, Oryza sativa
  Clone ID: PAT_MRT4530_14708C.1
ggtgctaccacagatgcttgggtaaccctgaaccagcgcgtctgttttctgcaacggagatattggcgactcttcaagccatggttgcgaacatggcacctgagaaggggatactttacccacagctcttgtggggctgggacccactga

SEQ ID NO: 8180 - DNA, 141 bp, Oryza sativa
  Clone ID: PAT_MRT4530_14709C.1
atgggagtgctccgggcggcggtgcccctacagccggaggccgacctcgtcctggctaccggcggcggcgaacgggggcaggtggggctcgtcctcgtcgatggctccaacgggttctgcaccgtcggcaccgggaacctc

SEQ ID NO: 8181 - DNA, 249 bp, Oryza sativa
  Clone ID: PAT_MRT4530_1470C.1
atgacgatctacttcgcctcggtgtgtgtaggtcaagggaaggaaccacctagaggtggcagcagaaaatactacctcgagaaaacagaaagcctcctatcaaatgcctctagggaaatacaaagatatttttgggacagggcgaggagaactcgagaatttggtatttgtgatgaaatggacacatggtgcagtaacgccacgtcggtttcttggctactggcgaccttcgaggaagcttccgggtag

SEQ ID NO: 8182 - DNA, 605 bp, Oryza sativa
  Clone ID: PAT_MRT4530_14710C.1
ttttttttttttttttctaaattgtatttttatatagattgtaaactcttatttcaatattttttattttttatttttataaattaaggttataaattgtatttcaatatagactcaaacttctacttatattttctttttttaattccaaagtttagttagttctaaattgtatactgatatggagttttttctttcaatattcctttttttaatttcgaatttaagctatttaaaattgtatttctatatggactctattattatttttctctgattccgtatttcaattagttataaattgtacaccagtatgaactctagccttctcttccaatattcattattttttaattatctatgtaaattgtttttctatatggacttcgattaatatgagaatttctaggccatgagagcaaacgcggagtccaattttcttaggctgtgtttagatccaggggtgaaaatttttgccatgtcacatcggatatactgacatacatttgaagtattaaacgtagtctaataacaaaacaaattacagaatccgcctgtaaaatgccagacgaatttattaagcctaaataatccggaattagtaa

SEQ ID NO: 8183 - DNA, 1138 bp, Oryza sativa
  Clone ID: PAT_MRT4530_14711C.1
atgaagtccatccaagactatcttgctcgctccaactccaagtccaagaattcagagttggttatgaaagatgacatccctctgggtcttggagctgccaaaaactcaactgctgctcctgattccagtcatgctgttgaagaagaatatgttagtaagagaaagctgacatcgagtgtgtggaaagaattcaagaggaagaaaatcgtcagcaagtggaaagccgagtgcctatggtgccataagaggctcggaggggacactaagaatggcaccaaacatttgcacgatcatctcagcaaatgtcctcgtcgcaggagtaataaagtcagcaagccaactccctccaaatgtacaaaggatattgatcaggaacccactgttgcttctttagaaagctccacctttagccaggatgttgccaggatggagcttgcgagaatgattatcttgcatgaatatcctttgtctattatggagcattacggtttccaaaggtttgttagggctcttcaaccattgttccagctggttcccaacagtagtcttaagaaggatgttatcagcatttatgagacggagagggtcagaaccagggaaattttgtgggaggctaaaggtcggattgcaataccagcagatatatggacatcagatgatcaaaatagaggttatgtggctgtcagagctcattttatcgaccaatcctggacattccagtgccgtctactgagctttatacatgtgccatgcccgcatacagctcaagcaatttctgaaactctgtcttcttgtttgaacgaatggaatcttggaaggagggtatcaatggtgatggctgatgattgttctacagatgatacggttacggggctcttaaagcaaaggctggataccgaacaacttttgttagcaacaactgaaagagatgtagtgtttgctgatgttgctcgtggtttgaatgttaatctcgacaagaagttgactcttgattgtaataatagatggtactctaccttatccatgttaaatgttgccataagctacaagcaagtctttgatcacttaaggcaaatagaggaacagtatatttgtgctcctgatgatgatgactggaaattagcaaaagaggtctgca

SEQ ID NO: 8184 - DNA, 2212 bp, Oryza sativa
  unsure (1)..(2212): unsure at all n locations
  Clone ID: PAT_MRT4530_14712C.1
cggcagagggaagcttctccctccctcccggcctcccttgccgccgccaccgccgccgccgcgccccgcgcccatcgcccgacgccgacgctcctccggccagatccaacccncctagctacggcgctccctttctgtccgtttgatgggcggcggcagaggcatgtagctagctagggtttcaacaatgaagtccatccaagactatcttgctcgctccaactccaagtccaagaattcagagttggttatgaaagatgacatccctctgggtcttggagctgccaaaaactcaactgctgctcctgattccagtcatgctgttgaagaagaatatgttagtaagagaaagctgacatcgagtgtgtggaaagaattcaagaggaagaaaatcgacagcaagtggaaagccgagtgcctatggtgccataagaggctcggaggggacactaagaatggcaccaaacatttgcacgatcatctcagcaaatgtcctcgtcgcaggagtaataaagtcagcaagccaactccctccaaatgtacaaaggatattgatcaggaacccactgttgcttctttagaaagctccacctttagccaggatgttgccaggatggagcttgcgagaatgattatcttgcatgaatatcctttgtctattatggagcattacggtttccaaaggtttgttagggctcttcaaccattgttccagctggttcccaacagtagtcttaagaaggatgttatcagcatttatgagacggagagggtcagaaccagggaaattttgtgggaggctaaaggtcggattgcaataacagcagatatatggacatcagatgatcaaaatagaggttatgtggctgtcagagctcattttatcgaccaatcctggacattccagtgccgtctactgagctttatacatgtgccatggccgcatacagctcaagcaatttctgaaactctgtcttcttgtttgaacgaatggaatcttggaaggagggtatcaatggtgatggctgatgattgttctacagatgatacggttacggggctcttaaagcaaaggctggataccgaacaacttttgttaggtgggtctttgctgaacatgagatgctgcgcctatgtgctaagtagaattgccaatagttgcctgggtgtgatgggaggtgctgttgataggatccgcgccagtgttgatttctggacagcaacaactgaaagagatgtagtgtttgctgatgttgctcgtggtttgaatgttaatctcgacaagaagttgactcttgattgtaataatagatggtactctaccttatccatgttaaatgttgccataagctacaagcaagtctttgatcacttaaggcaaatagaggaacagtatatttgtgctcctgatgatgatgactggaaattagcaaaagaggtctgcaaactaatttcagaggctaagtatgttactgctaatatgtacttccccaagatttgtggaattcggatggccatgaggagatggcctgggtgtgaggatgaactgataggaaggatgagaaatgaaatagccgaattgtttgagaaatattgcgttgaagttcatgatctcatggctgtggcaactgtcctagaccccagatataagcttgagctactgcagttttatttcccctcaatttttggtgatgaggcatacaatgagataaatagagtccggcagctctgttatgatttgatcaaacagtatcagggtccccaatcaaaagtcggtgcaatgcagccttgtgggggggaggaagagggtccagatcagttatctagcttcgatctatatatcgctttcaagttctccagtgcagatgtcaagtcagaactagacaaatacttggacgagcctgttatccctagagcagtagactttgacataatagattggtggaagattatggggaagaggtttccaactctgcagatgttagcaagagacattttagcggttcctgtctcaagggtagtttctgaatcggcgtttagcattgctggaagggttttgagtccacagcgtagcaagcttttacctgatacactggaggccttgatgtgctcacaagattggcttcatgcagaaaacagaggtgcaggatcgtcagggctcttgagctgcctcacttgcctggaagatgctgatgtaactacaaaggagtga

SEQ ID NO: 8185 - DNA, 701 bp, Oryza sativa
  Clone ID: PAT_MRT4530_14713C.1
gtggatccccgggctgcaggaatcggcacgagggcgacttataatatgaaacggagggagaattaaattgtgactactactaatttcatatttattctgtttagatgaatggaagtcaccgttggatttgtgatgcaatgcactttagtactattggtaaaagaacaacatatggtttacatagcaaaaacaagtgtcaagtatttggaaacggaggtcaagtatttggaaacggagggagtgtttggttaggttggtcatatacagaaatacaactgattgactggtggttaagcaatgaataaataactcattcaagactgcccatggttttctttctttggaaggctattctagggctactcccataatctgtactcctttgactaggattgttttatttttgaagtcacctttgcttcaataaatctccttttgtttatcttgttagccacatttttagttttgtacttctatgttagcttctggcttttatcgttcaagctacttgaaagatgttctccattctgcttgataacaatgtcctgtgctcatccatggttagcgatgctatctctggtccatgacaaataaaccttttaggtcaatgagcaaacaggtgtaaatattgatatataagcacatatcggttagaaaatctactcatcacagtaatagaattaggatagtacttgatattg

SEQ ID NO: 8186 - DNA, 577 bp, Oryza sativa
  Clone ID: PAT_MRT4530_14714C.1
gcacgagggccaactgcatccggctcgatcgatcactcgaccgaccatctccaagcaaagcaatggcgaagtgggcggcgatcacggcggcgttgctgctgctggcggcggcggcgtgggcgccggcgccggcgacggcgcagtgcaacgccgggcagctggcgatctgcgcgggcgcgatcatcagcgggtcggcgccgtcggcgtcgtgctgctccaacctgcgcgcgcagagggggtgcttctgccagtacgcgcgcaacccggcgtacgcctcctacatcaacagcgccaacgcccgcaagaccctcacctcctgcggcatcgccatcccccgctgctaggctcgctcgatctcccgccgccgcgcgccgccgctcgccggcgccggcgccggccatggtgtgtgtacgtgcgtgcgcttgaataaaaaggacgtgagctttgaattaatagttataataataatataccagcacgcgtgtttagatacgatggataggtgtagtactattttggtattcaaagtttgagttccgaatttgatcgtcagtttaaaaaaaaaaaaaaaaaacta

SEQ ID NO: 8187 - DNA, 618 bp, Oryza sativa
  unsure (1)..(618): unsure at all n locations
  Clone ID: PAT_MRT4530_14715C.1
gnaaacatcatcaaaaaaaaaaacaagggccaaatccagcaaggctccccctcttctccccctcagtcctaaaacctctctctcctccgccccctccatctccgccgccgccgccgcggcggctaatggagggcttccacaacctcctcgcccgccccaactcggcgccattcgccttctccctggggggggcgcgcccgcgcccgcgccgcaggccgccgcctcacccctccgctgcctgccgcgccgcgagccgctgggccgaacgcctcttcgccgacttccacctcctccccaccgccgcgccctccgacccgccgtccccggccccggccccggccgccgcgccctccgcctcccccttcgtcccgctcttccccgacgccgccgaacgctccctcccgctccaagtcgatttctacaaggttctaggggcagagccacatttccttggcgatggcatcaggagggcgttcgaggcacggatagccaagccaccgcagtatggctacagcacggatgctctagttggncgnnnacaaatgctgcagattgcccatgacactctcatgaaccagaactcccgcactnagtatgatcgtgcgctttctgagaacc

SEQ ID NO: 8188 - DNA, 657 bp, Oryza sativa
  Clone ID: PAT_MRT4530_14716C.1
cacgcgtccggacaagtatactaatgttccatcagcggaagaactctcactctggaaggcaaggcaggcggtggcgaacgggcgtgctgaggcttggggaagactgatttctcaatcttccgagtctccttcagtacctatttatactactcattttacggttggccatggtggaaattatgatttgaggctgacagagtcatttcctggatcacttatttgcaaattgaagcatgttaagaggggtgctgctcttgagatttacgtatctaaagctgtccatgtaaatgggaaggtattagataagactgctaaggtcacattggttggaggcgatgaagttatttttagttcacttgggagacatgcttatatatttcagcaacttccagaggaaagatcaagcacatcaacattttcggccacatgtgcttttcagcaagggcaatatccagttaccaaaggtaccattggatgtatcatctaaaggagccaagctatcagtaatgccctttaactttggaaatggccgcccttccgttggttcctcatgatacagagatagtcagcagtttatgtaaaacaatggaggaacagagccagcttgcttctgaagaaatttacaggttgctcacatcaactttgaaagagatctga

SEQ ID NO: 8189 - DNA, 390 bp, Oryza sativa
  Clone ID: PAT_MRT4530_14717C.1
atgtcggagacggagaagccaagtagtaaagggaagagaagaagagggccacgcatgtcacgcacgctcccacggcccatggccaccaaccactccatccgatggtggaggccctctgacaaacccccttctctttacagcaagcttcctccgatggagaagagggacggaattgagcaaccttcttccagcgacgaaagcctctatttggcaagcctcctctttcttcctccagcaaccaagttagctctatctccaccatcatctccagcctcaccagcgccaaaaggtgtcaatgttccagagcggcctcctttccctcctattcgccttactttgccctcatcgatatcatcagcccacaacccgctgctgacctcgcggctctaa

SEQ ID NO: 8190 - DNA, 499 bp, Oryza sativa
  Clone ID: PAT_MRT4530_14718C.1
cccacgcgtccgcccacgcgtccgcggacgcgtgggcgcggctggacaggggaggggcgccgatctccatctggcgagcagagcagggcaggggaaggggatcctggttctcagcgtgtgtgatgtgatccagcttgggggaggaagagcttgttggcctcttggcattgcggtctcctggacccagatcttgatgcaactgccgactactttttttttttttactgatagaggtggtctggttgggttcttgacctgattttgtgggggctttgccaccacgcaagggaggcagtttggcctggatctttatcactagctgttggtcatgtcctttgagctagcaagcattcacatggcagtggccgccggtttggtacattcttgatgggttaagtgctgtgggtttgttgtggagttctcttcctggttcccatttggggtggacggtatgtgctgaagggaaaggggctgagatagaaagagcaaatagaagata

SEQ ID NO: 8191 - DNA, 308 bp, Oryza sativa
  Clone ID: PAT_MRT4530_14719C.1
cggtcgcgtgggaaaaaaaccaccacgctctgagcctactccctgcctgccccacccccgtcaaagcgagagctccgtatgaccggcactatttcccttgccttgccttccgatccaaggcctgcttctcctactcgcggcgctcgctgagcatggcggcagagggggaggccaagaaggacagcgccagcaaccctcccgggggaggcggcatcagaggtggaggggaggcggatcacaactactgttcatgcagccgacagccggtgaggcgcaactgctggggatgctgttgaagaaggccggtg

SEQ ID NO: 8192 - DNA, 1344 bp, Oryza sativa
  Clone ID: PAT_MRT4530_1471C.1
atggatgcgggtgcaactgcaaggtcgtcgtcgtcgtcggcgatgatgatgaaccagaagaagcccttgctctcggatggcgagctggtggagctcctgtggcaggacgggggcgtcgtcggccacgcgcagacgcgccaccgatcgtccgacgtcctcgcccggagcggcgtcaccggcgaggaggagacggcgtccgcgtggttcgcggatggcggtggcggcggcggcggcgacgacgacgcgctgggcctgggcatgggcagggacatctactcgcagctctggcacagcttcgccaatgtcgacgggcacgcggcgggcgcgctcgcgctcgcgacgccgacgccgacgccgcgggcggcggcgaggagcgacgacgtgtcgagccgtctcgacgaggccgacctgagcatctgcggcagcaacgcggtcgtggcgccggcgctgcccgcggacgacgacgacgacatcgacgccgccgcgccgcgcgaggaggaggaggaggaggaggaggggccgggcgccgcgcgcgccgccggcgcgtcgtcgtcgggcgggtcggggagcgggagcgggagctacccgctgttcaagcgggggagggaggagctggttgacagccttagcgaggtcgccgacgagacccggccgtcgaagcggccggcggcgaagcgccggactcgcgccgccgaggtccacaacctgtcagagcgtagaagaagggataggatcaatgagaagttgagagcattgcaagaactggtacctcattgcaacaagactgacaaagcatccatactagatgaagcaattgagtacttgaagtccctgcaaatgcaagttcagatcatgtggatgactaccgggattgtgccgatgatgttccccggtacccaccagctcatgccaccgatgggcatgggattgaacacggcatgcatgcctggggctcaagctcaaggcctgaatcagatgcaaagaacaacatattacatgaacaattctctgccaaaccagatgcctcagatcccttctccagctatgaatgcacccagtgttccagacgatatgcagaatgataatcgcatccgcgggccaagaaatccttttcttcattgcaatgatacactgacagcaacagctcaggttgattattatgttaaatttcatcattaccgatcattcagacttcaattcttgtttatcttacaatatcagttcttttcaggtgccaggcaccggcaatatgtgaagaatatagtggctgtgtggactcagcttgagccggcatcgcaaaagctgcacaagaacacaacagtgacagtttcactcttcttttag

SEQ ID NO: 8193 - DNA, 450 bp, Oryza sativa
  Clone ID: PAT_MRT4530_14720C.1
aaatcaggatttgaattctcaaaggaatcaagacaatgttgaccttcagaatttgttccctctttcagaaagaggttaattctggccatctctaagtctctaatcagattaatattagaggctatatcatcaacagcacaacccagattgacccctaaaacactagcaatatcaattaaagagacatttgattcatgtatgaaggagggaatttttattgatgaaagcattttgtgcttctttcctttccattgccatctcttgggacctcttatcttccttgtctttcagtctcttgcttctcctcatctcttcatcttgacttccaagagcttcttcagttagattaatccccaacctcttagcaaaacttcccttagactcctgagaatccatgtaatcttcactgtcccccggatctactttgtccttgtcttcttgattcaaacc

SEQ ID NO: 8194 - DNA, 928 bp, Oryza sativa
  unsure (1)..(928): unsure at all n locations
  Clone ID: PAT_MRT4530_14721C.1
tttnntttntttttttctgaaacaaatttctttattccaaggatcagacatataagttatgatccatagttcacaatcaaacagtacatatataacaaagagcaattaaaacatattgttttacaaaaacaaacaaatgtgctatagcacggtaacatcacatgcccttcgttctgatgacgattgccagcaatatacacaatagacattttcttttgacgtgaatgtacacaatagacatcaaaccacaccattatttattttccgagtagttccaccatttcttgtacttggactgctgcatgatgcattattcggcctgctggtctattgtattcgttgtagtcattacatcagcttgtgtttgtggagtactatagaatgcatgaatgtcaagctgtctagttgtctcaatgccaggattgttcttgactatgttgtgctgaatagtgccatatgccatagcaagttgtccagtcccaccgacaatggcccactcaccagtttctggagtagtccccatcacctgaagctttgatccattaaacctggcatccacaaactctatgttcatagatgtgtaccaggtgttgttaacttgatcaacctggacatgcattcctcttgcatgtgcaacaatagtacttgtgttgaagtcaggtccatcatagataggccaatcgttgataacaatcataccaaacgaagcgggatgtgatgagggcaccattgtttcttggttgtggtttggccctgtaacaacttggtgcaagtacaatctcatggtaatctcacactgatcgcggagcacaggccgtactggaataactttgaaaaatggactagccatggctaaaatgtgctttggtaggactggcaaagtggaactaggaattgtttgattcggacgcgtgggcggacgcgtggg

SEQ ID NO: 8195 - DNA, 400 bp, Oryza sativa
  Clone ID: PAT_MRT4530_14722C.1
cacacggggccgcaggtggtcgctatgagcaacaggtatgactatcatgagatagatcgatttcatggatgttgttcccagttagaagatcgtaaccatcaccctaaacactcgagcgtctacactaacgctcgatgaagtcgccactaacgatgttgtcaaggaccacgtgaaagttggtggctgcagggcacctatagcaagttgccataatccttctatgcatgcatgcttgaattgctcattgatcccaaggcaggcaaaagccgtgttcatggaagtgtacttattgcactcaaacacagtagacaagaagactgatctcacatacatccatgcctaggggaactggtaccgttccatctagggagcttctgagcaaatcctgacgctttgctac

SEQ ID NO: 8196 - DNA, 411 bp, Oryza sativa
  Clone ID: PAT_MRT4530_14723C.1
atgaagtacactggcagaggggttagagagcacattttgaagatgagtgatatcacttcaaagctcaagaagatggacttggtgctccctgataagtttctagttcaccttatttttgcctccttgccttcagattttgaggcttttgttgtcaactacaactcacagccagaaaactgggacattgagaagctcattgccatatgtgtgcaagaagaggatagacccaaggctcgtggtgattccgccaactatgtgaagcacaacaagaagaggaacaactacaaccagaatgttgcctctcctaaggcacaaggaaaggcaccacaaagtgatccacatccacgaccaagcaatgtagaagtggacaaggacacttgcaagtggtgcaagaagaaggggcactattag

SEQ ID NO: 8197 - DNA, 772 bp, Oryza sativa
  Clone ID: PAT_MRT4530_14724C.1
gaacagggtgcttgtttatgaaagttggaagtgccaaattgatcaattgcccaaaccaaaaacgatcagagcttatgttcaatcaatttcctaacaacacacaacttaggatgggattctgaaattttgtatgaaccatcaccattatttctgtctgaatacagagattagaccatttacccatctataacctgacatctttatacgctcttaatgagcatctaaaatacagatcgccacgacatggtacatcagcagaagccttatttcttcgttttacaaggccggcaggttgtgcttggagacccctcggcctctacttggggctcagtggttactctgactgatgtctcttcgttttcttcagcttgatgcgttggaccctcactaccttgttgcaatgtctgatcctcctgtcgcgtgttctcgtcaatgcggccctcctgatactgtacatccaaagagctgttctcttcaacggtctgtgcttccaaatccactggatcaatgctggcggttttgggggatggaaggagggatactcgacaaagagggcaagtggtgtttgtcgagagccagtggtcgatgcaatcgatgtggaaggtatggccacaaggaggtattctctggagccgctcatccggttgatagtctgctaagcagacagagacccgggtttccctggcacgcgtgggcggacgctagaccaaaacaggcaagacttggagcatctccttctttatgccgcactccatcctgggggtatctcccc

SEQ ID NO: 8198 - DNA, 234 bp, Oryza sativa
  Clone ID: PAT_MRT4530_14725C.1
atggcgccgaaggacgcagtggcagcgctcggcgatggcagcggcagtggaggacggtgctgcggcagtgctcggcgacggcggaagcggcggagcgaggcagaggcgttcggcgatggggatggcgggaggcggagttcaggattacaagatttatgcagacagcttaaaatcttgcagcataatgaggaagcacaatatgataaaactgtagacaggacttcgattacttga

SEQ ID NO: 8199 - DNA, 729 bp, Oryza sativa
  unsure (1)..(729): unsure at all n locations
  Clone ID: PAT_MRT4530_14726C.1
tgtccaagaagtgtacacccggtgcactcaaaggcggcgttggccgaattcactccaccctcatcttcgtcttcgccggccanngctccggcatggccttcagcaagctgaccggcggcgggancgacnanccccgccggggctgatcgcggcggcggtggcccacgccttcnccctgttcgtggcggtgtccgtcngcgccaacatctccggcgggcacntnaaacccggncgtgaacttcngcgccttcctcngcgggaacatcaacctgttccgcgggctcctctactggatcgcccaactcctgggctccaccgtggcgtgcttcctcctccgcttctccaccgggcgggctccgccaccggcaccttccgcctgaccggcntctcccttgtnggaagccctgggtgctggaaaatcgtcatgaacttcngcctcntctacacccgtgttncnccaccgccgttgaaccccaanaaaaggnagcctcnggnnccatccccccctatccgccatcnggnttcatcctccggggcgaaaatccnccttccgngggnccnttccaaagggncctcccattnaaccccggccgtcttcttcgggcccggccccccttcanctnggtccngnggaattccaannngggttttactngggtttggcccantncaancngnngggngggcntcncccgggnttcnnctatnaaagtccncctncnnccnccc

SEQ ID NO: 8200 - DNA, 291 bp, Oryza sativa
  Clone ID: PAT_MRT4530_14727C.1
atgggaggcggtagggcggaattggccgccgcggtgcacgaggccgtggcggtgcagacggcggctccctccccttcgacgacggcgacagcggtggaggaggcggaatataacaagagaagcttaactgaccttggtcaaattaaacacaatatatcagatgagatcaatggtttagattactttctactaccagtagattacgttatagtggagctcttagaagtagctacacaaattaagcagcccacatattacaaaaaatcgtccactaattcgcatcttcattag

SEQ ID NO: 8201 - DNA, 4230 bp, Oryza sativa
  Clone ID: PAT_MRT4530_14728C.1
ttaattctgccgtgaccctagtgaacgaacaccaagaaggtgtctcgccgtcaccagcttcgccgccggcaatcctttcgtcagtgcatccgctcgctgctcctcagtccggacgaactccacaacaatttgcccgccatccacacactcccgtatgaagtgataacgggtgtcaatatgcttacttctcccatgaaacaccgggttcttcatcaatgcaattgctgacctattgtcgacgaagagcttcactgctttctcctccactcccgccacttctgctagcaacaatcttaaccagagcgcttgacaggccgccgtcgtggctgccatgaactcggcttcacacgacgatagtgccacagttttctgcttttgcgagctccacgccaccagactctgattgatgtagaacgccattccaccagtgctgcgccgatcatccaagtccccggcgaggtcactgtcagtataccctgtaatcttcagtgccccagtgcctgcagcatacacgagaccataatccatcgttcccttgatgtatctgagaatttgcttcacagccttgaaatgcatcacggttggcctctccatgaacctgcttgccaccccgacagcatatgacagatccggcctcgtgtgaagcaaataccgaagactaccgatgatccgccgatactcagttgcatccaccgggtgaccttctggatccttgctcagctgcgatctcggatcgattggaattgaaactgagttgcactccatcatcccaaactgagacagtaatttcttggcatatgcagtctgtttcaatgtggtagcactctcatcctgatcaacctctatcccgagataatatgtgagcaaaccgagatcactcatctcaaactcccccatcatttgttccttgaaaaccttcaattcagagggattttctccggtgacaatgagatcatcaacgtaaacgccgacaattatgccatcacttcctctgcctcgggtgtatactgcctgctcctgcgtacaccgatcaaagccgagctccctcaagcttctgtccaggcgtatattccaggctcgcggtgcctgccggagtccatacaatgccttatgcagcttgagcacaagatgctcttttcctgatctagcaaacccttccggttgtgcaacatacacctcttcttcaagttcaccattaaggaatgccgatttgacatcaagatgatgaacctgccagcggcgatcagccgccactgcaagcacaacacgaacggtatcaagcctcgctaccggagcaaacacctcttcaaaatcgaccccttgtttctgcacatatccttttgcaaccaaccgtgccttgtgcttgattatctcccctgccgtgttcttcttgagcttatacacccatttcagcccaatcgctcggtgcccggctggcaacatggccaactcccacgttttgttcttctcgattgcctccatctccctctgcattgcttcttcccacgcaggttggccggcagcttctcgatagcttgatggctcttctgactcagctaggagcgcctctccatcacattcgtcctccaccaaatccacacgcggggcctcacgcaggacatctgccagcgatctataccgcctaggcccatcatctgtatcgatgttgtcatctgtgcccggtgacggcaccaccccggcagagtttgtcgatggagaaccgggcgtgggcgttccaggcagagtcggtgatgctgccaccgggcttgccggtgacggtacttcttctgccgccaccactgcttccttcccggcgcgcctgccaggagacggtgcctggtacggcggtaccacgccggccgctgttgccgggctcggcagctgctcaccaggctcctcctccatcgcgaaatccgttggctcctgtcctgcagctgatgtccactcccaaggtacattttcctcaaatacaacgtcacgacttacatgtatgcgcccacgacgcggatcgaacagacgatgagccttgctcccttcctccacaccgagatacacgtacggtgcactcctgtcgtccagcttcttgaggtgcggctgcgtgtttttcgcgtgtgccgtgcagccgaacaccttgagatgtcccagctgtggcttcctccccgtccatgcctcgaacggagtacgatcacccattgccttcgtcgggagccggttaaggagatgcaccgcgtgacgcaccgcctccccccaaaacctgcccggtacgcgcatccccttcagtagtgagcgtgccatggccatcaccgtgcggttgcgcctctccaccaccccgttttgctggggcgagtacggcgctgtcaggtgacgttgaatccccgcctcctcgcacacctgtgcaaactcgcctgacaggaattcaccaccccggtctgaccgcaacgtcttcacgcgccgcccagccgtgttctcggccagtggcttgaactttacgaaagcatcgagcgattgatccttcgtcttgagtacgaacacccatatccaccgggaataatcatcaactataagaaaaaaatagcgattaccagacatcgtattcggtgtaatcgggccgcacagatctatgtgcagcagctcgagcggctcctccgccctgaagtgcgccgccgccgggaacggcgccctggcctgtttcgccaccaggcaagattggcacagctgattcgggtggacgattgccggaacacccccgccatctccttgtccaccagcagtttcattgcttgaaaatttacgtgtcccagccgcgcatgccacagccaagccgggtcgtcgaggcttcatcaccagccgccatggacttttgtcgaacacttcgagtacatcctcatccatgaccacgcgatgcccggtctctgttagttggcccaaactcaccatgttacattgcagactggggatgtagtagacgtcctgtagcagccattgatcatcgttcttgcatgaaaaaagaatcgaccccttccccttgatctgcactgtggaagcgtcgccgaacttcacccgtccggtgatcgactcgtccagctcccggaatttgcttcgatcgccggtcatgtggttgctggccccgttgtccaggaaccagacatcgccagcatgtccaccagcgtctgccagcagcagcttgggccacacgcgctgctcgcgtacgaccaagccgcacgacgcgcgctctggcacatcctccgtcaccgcaagcaacagggcaggcccggcgtcctccgtctgtgcaagatgtgcttctcccttcttcttcttcggatgtgggcattggttagagtagtgcccgtactcctcgcaattgaagcacttgatgtgactcttgtcacggccaccgccgccagagcctgcacctgagtcgccccgcggcgtcccgccgcgtccgcctgcgccacggcctctgccgcgaccgcgaccgccctggccgcgcccagcaccttcacctgaaggtttgttcttctgtggtggcgaggattccccgccgttcttcttgaagtgagcttcccactccgcttgagtgaggagcacctgcccgtcggtggtgaccccgccggcggcagccttcttcttccgcatgcgctcctcgtaggccttcagtcgacccactgcctcctcaaatggcatagtatcaatgtcataaaattgctcaatacctgcgacgaggctgacgaatttttccggcaccgtgtcgaacagcttcttcaccatcgcggaatcacccagcgtcgagcccaacgccgagtgacgcacgctcatcgcggtgatgcggcccgcgtactgatccagagtttcccctggctccatcaccatggcaccaaattcacccttcaacgtctgcaagcgcgcttcgcgaacgcggtccgcgcccacgaaccttgtcttcaagcaatcccacacttccttcgccgatctcttcttcgccacctgcatcagcaagtcctccggctgggactgcaacagatgggacctcgccttcttgtcccttcttgggtcgacggccaccccggccgccggctcgatggcgtcccagacaccctggtcctccatcatcgcctgaacccgaatgcaccagctggtgtagttcgttgccgtgagttgtgggtaggagaaagcactccccgagctccccctcgccggatccgctcccgctcccgccggaaccaacgccat

SEQ ID NO: 8202 - DNA, 4302 bp, Oryza sativa
  Clone ID: PAT_MRT4530_14729C.1
ttaattctgccgtggccctagtgaacgaacaccaagaaggtgtctcgccgtcgccagcttcgccgccggcaatcctttcgtcagtgcatccgcccgctgctcctcagtccggacgaactccacaacaatttgcccgccatccacacactcccgtatgaagtgataacgggtgtcaatatgcttacttctcccatgaaacaccgggttcttcatcaatgcaattgctgacctattgtcgacgaagagcttcactgctttctcctccactcccgccacttctgctagcaacactcttaaccagagcgcttgacaggccgccgtcgtggctgccatgaactcggcttcacacgacgatagtgccacagttttctgcttttgcgagctccacgccaccagactctgattgatgtagaacgccattccaccagtgctgcgccgatcatccaagtccccggcgaggtcactgtcagtataccctgtaatcttcagtgccctagtgcctgcagcatacacgagaccataatccatcgttcccttgatgtatctgagaatttgcttcacagccttgaaatgcatcacggttggcctctccatgaacctgcttgccaccccgacaacatatgacagatccggcctcgtgtgaagcaaataccgaagactaccgatgatccgccgatactcagttgcatccaccgggtgaccttctggatccttgctcagctgcgatctcggatcgattggaattgaaactgagttgcactccatcatcccaaactgagacagtaatttcttggcatatgcagtctgtttcaatgtggtagcactctcatcttgatcaacctctatcccgagataatatgtgagcaaaccgagatcactcatctcaaactcccccatcatttgttccttgaaaaccttcaattcagagggattttctccggtgacaatgagatcatcaacgtaaacgccgacaattatgccatcacttcctctgcctcgggtgtatactgcctgctcctgcgtacaccgatcaaagccgagctccctcaagcttctgtccaggcgtatattccaggctcgcagtgcctgccggagtccatacaatgccttatgcagcttgagcacaagatgctcttttcctgatctagcaaacccttccggttgtgcaacatacacctcttcttcaagttcaccattaaggaatgccgatttgacatcaagatgatgaacctgccagcggcgatcagccgccactgcaagcacaacacgaacggtatcaagcctcgctaccggagcaaacacctcttcaaaatcgaccccttgtttctgcacatatccttttgcaaccaaccgtgccttgtgcttgattatctcccctgtcgtgttcttcttgagcttatacacccatttcagcccaatcgctcggtgcccggctggcaacatggccaactcccatgttttgttcttctcgattgcctccatctccctctgcattgcttcttcccacgcaggttggccggcagcttctcgatagcttgatggctcttctgactcagctaggagcgcctctccatcacattcgtcctccaccaaatccacacgcggggcctcacgtaggacatctgccagcgatctataccgcctaggcccatcatctgtatcgatgttgtcatctgtgcccggtgacggcaccaccccggcagagtttgtcgatggagaaccgggcgtgggcgttccaggcagagtcggtgatgctgccaccgggcttgccggtgacggtacttcttctgccgccaccactgcttccttcccggcgcgcctgccaggagacggtgcctggtacgacggtaccacgccggccgctgttgccgggctcggcagctgctcaccaggctcctcctccatcgtgaaatccgttggctcctgtcctgcaactgatgtccactcccaaggtacattttcctcaaatacaacgtcacgacttacatgtatgcgcccacgacgcggatcgaacagacgatgagccttgctcccttcctccacaccgagatacacgtacggtgcactcctgtcgtccagcttcttgaggtgcggctgcgtgtttttcgcgtgtgccgtgcagccgaacaccttgagatgtcccagctgtggcttcctccccgtccatgcctcgaacggagtacgatcacccattgccttcgtcgggagccggttaaggagatgcaccgcgtgacgcaccgcctccccccaaaacctgcccggtacgcgcatccccttcagtagtgagcgtgccatggccatcaccgtgcggttgcgcctctccaccgccccgttttgctggggcgagtacggcgctgtcaggtgacgttgaatccccgcctcctcgcacacctgtgcaaactcgcctgacaggaattcaccaccccggtctgaccgcaacgtcttcacgcgccgcccagccgtgttctcggccagtggcttgaactttacgaaagcatcgagcgattgatccttcgtcttgagtacgaacacccacatccaccgggaataatcatcaactataagaaaaaaatagcgattaccagacatcgtactcggtgtaatcgggccgcacagatctatgtgcagcagctcgagcggctcctccgccctgaagtgcgccgccgccgggaacggcgccctggcctgtttcgccaccaggcaagattggcacagctgattcgggtggacgattgccggaacaccccccgccatctccttgtccaccagcagtttcattgcttgaaaatttacgtgtcccagccgcgcatgccacagccaagccgggtcgtcgaggctggacagcagggacacgggatgcgccagcttcaactcaattcggtaaagacgatttacagtgcgcctcaccttcatcaccagccgccatggacttttgtcgaacacttcgagtacatcctcatccatgaccacgcgatgcccggtctctgttagttggcccaaactcaccatgttacattgcagactggggatgtagtagacgtcctgtagcagccattgatcaccgttcttgcatgaaaaaagaatcgaccccttccccttgatctgcactgtggaagcgtcgccgaacttcacccgtccggtgatcgactcgtccagctcccggaatttgcttcgatcgccggtcatgtggttgctggccccattgtccaggaaccagacatcgccagcatgtccaccagcgtctaccagtagcagcttgggccacacgcgctgctcgcgtacgaccaatccgcacgacgcgcgctctggcacatcctccgtcatcgcaagcaacagggcaggcccggcgtcctccgtctgtgcaagatgtgcttctcccttcttcttcttcggatgtgggcattggttagagtagtgcccgtactcctcgcaattgaagcacttgatgtgactcttgtcacggccaccgccgccagagcctgcacctgagtcgccccgcggcgtcccaccgcgtccgcctgcgccacggcctctgccgcgaccgcgaccgccctggccgcgcccagcaccttcacctgaaggtttgttcttctgtggtggcgaggattccccgccgttcttcttgaagtgagcttcccactccgcttgagtgaggagcacctgcccatcggtggtgaccccgccagcggcagccttcttcttccgcatgcgctcctcgtaggccttcggtcgacccactgcctcctcaaatggcatagtatcaatgtcataaaattgctcaatacctgcgacgaggctgacgaatttttccggcaccgtgtcgaacagcttcttcaccatcgcggaatcacccagcgtcgagcccaacgccgagtgacgcacgctcatcgcggtgatgcggcccgcgtactgatccagagtttcccctggctccatcaccatggcaccaaattcacccttcaacgtctgcaagcgcgcttcgcgaacgcggtccgcgcccacgaaccttgtcttcaagcaatcccacacttccttcgccgatctcttctttgccacctgcatcagcaagtcctccggcagggactgcaacagatgggacctcgccttcttgtcccttcttgggtcgacggccaccccggccgccggctcgatggcgtcccagacaccctggtcctccatcatcgcctgaacccgaatgcaccagctggtgtagttcgttgccgtgagttgtgggtaggagaaagcactccccgagctctccctcgccggatccgctcccgctcccgccggaaccaacgccat

SEQ ID NO: 8203 - DNA, 189 bp, Oryza sativa
  Clone ID: PAT_MRT4530_1472C.1
ggggaaaaacgaccagactggaattgcatcagtgctaacgaaaccaacaagaagacatatagtatcatatatgtaaaataaattggttcacagttccaatcaattttcacatcccttaattgagaccgacaccacagtaaactaacaaaccagctgtatatacaaccacaacgaacacagcacaaggag

SEQ ID NO: 8204 - DNA, 267 bp, Oryza sativa
  Clone ID: PAT_MRT4530_14730C.1
atggcgcacacgcatcgcgttggtgcgtgcgtgcgggtgagcgcgcgggggcgtgtgtcggcgcggcgcgaccgcggcgccgcgcgatgcgacgcagtaccagacggagctatcggtcaaccatgcgtcacgagcgagctcttctactcctaccgaaaacacagtaaaataatcaaaccgttctgtccgaatcgacgaggggatttaccagcaggaggaaacctccaaggagatcgagagatcgtccatgagacccacacgagcaac

SEQ ID NO: 8205 - DNA, 415 bp, Oryza sativa
  unsure (1)..(415): unsure at all n locations
  Clone ID: PAT_MRT4530_14731C.1
ccncggcgtccgctagttaattaggacgccgccgccgacgacgacgacatagctagtagatttcttgctctcgatcgcagtggccggcctagctagctctacatcgatcgatcaatccactaccatttcttacttgattagtttgtcgttggagccaagatcgtatcgatgatgctcgcttgatcaggttaagttgttgagttactgtagggtgttactactagtattattgtacagctagcgcattatgcatgtcatgtcgtcgtccgtcggtcaaacggagtgtgngctgctatatatgcccacattttatgcagtagtagctgtctatagctgatctcagttaatttaatttgtactacgtgtatgtcaaagctaattagtcagcagtaatacatcaaaaaaaaaaaaaaaa

SEQ ID NO: 8206 - DNA, 939 bp, Oryza sativa
  Clone ID: PAT_MRT4530_14732C.1
atggtggggcccacgtgggccccacaagtccctctcggctcttgtttctcttcctcttcgctctccctcgtcctcgcggggagcggcggcaggagcatgcccggcggatggagcggaggggcagaggggagccggcaccaggccgcggacggtggaccgttgccggaggaggaagaaggcagaggaggaggtccgccggcgagcgcgacagctacactccgtcagccgttccgcccggagatgccaaaccggacggtgccgcccctcctcgctcggtacccacactcactgcctccctcctcgcccggccgcctccgccgacgtcctcgatggtcacatccgggtcggagccgcgcgtcgcctctcttcgctgggccgtcgagcaccgcttccctcctcgctgggcccccgagcaccgcctccctcctcgccgggccaccgcgcgtcgcctccctcgccaggccgccgcgcgtcgcctctcctcgcccggcccccgcgcgccgcctccctccttgtcgggccgccgcgcgccgcctccctcctcgcccggccgccgagtgccgcctccctcctcgtcaggctgccgcgtgtcgcctccctcgcccggccgccgcgcaccgcctctcctcgccgggccgccgagcgccgcctccctcctcgccgggacgccgagcgccgcctccttcctcacccggccgccgcgcgcggcctctcctcgccgggccaccgagcgccgcctccctcctcgccgagccgccgcgcgccgcctccctcctcgctgagccgccgcgcgtcgcctccctcgcccggccgccgcgcgccgccatccctcacccggacactgcccggccgccgcgagctgccatccctcacccagacactgcccgccgcctcggggatgggagaagggggagagaggaggaagaagaggggctctag

SEQ ID NO: 8207 - DNA, 1435 bp, Oryza sativa
  Clone ID: PAT_MRT4530_14733C.1
ctctccactcctccacccgccgccatggccaacctccatctcctcccccttcttctcctcgcccttctctcccccgccggcgcgggctccggcgaggcgcacgcctccgcggtggtggcagagaagggcctggacttcgccaagggcgtgctgatcggggaggcggtgcggtcgctgaccccgctgcgcctccccggcgtggagaaggccgtgcgggtgcccttcctgggcgccatccgcgtcgccgccaccaacatcacgctctttcacctcgacgtcggcgacgacttccgcatgcaccccggggacaccgccctcgtcgtcgtcgcctccggagtcagcgccaacctcagcatgggatggagctactactacgattcctggctcttccccatcgagatctacgacagaggcaccgcttttatcctggttcaaggaatggaagttggtataaccatgcaaattaagaattataacgggagtttgtctctctctgtgttgcaatgtggatgtaatgtcaaggacctagtgatatccctggatggtggagcatcttggttttatcaggggttaataaatgctttcgagggccatattaaagctgcagttgagacgcaaatcctagaaaatattattgacggcacatccaaacttgactcgttgcttcaaagccttcataggagtgtcaatctggctaatatttctgctttgaacatgacttttgttacggatccgcagtatggaaattcctcaattgagtttgatatcaatggattattctcttctgcaactgctaagcttagcaattcgcaaaagcatccccaactttcattatcatgtggtggggcatccaaaatgcttctgctttcacttgatgaagctgttttcaattctgcattagaggtttacttcaaggtagtaagtgcctcaggtgtcgcagaggcagcaggcaataaagtatatggtaaggttgaattgggcaatttctcccttgccttgaagtggagcaaaattggtaacttccacatgtcattgattcagggagtgattcgtgttttcttgaacacggtttgcatgccctatttgaactcacggctggggcatggagttatcttacctgtggtccatggtttcacactcaaagacatctacgttcttacttctcctgagaagttgacactttgttctgatgttgccttcgctaatgcaagcagcctggcaactttaccaattttgagatcccctcgggttttatagggtatatgtgtacctcacgtttgggccaaaaagggccttgggcataatagtaagtgcacacttgtacatatacatctgtacattaagataaatgtacatagtttctccttcattgatatattcacattcatgattcatttatacaaattctcttcgtatgttcaaaaaaaaaaaaaaa

SEQ ID NO: 8208 - DNA, 280 bp, Oryza sativa
  Clone ID: PAT_MRT4530_14734C.1
cgcgctgacaagcgagacgacttgtactagtccccagatgcatatgaggagaaacaagctctcctcccacttccatggagatatcgatgattatgctggagatggtgcagaggacatctctgagagtcgcctgatggaggactccgggtagctggctgcgcaccaggagttggtggttgctgtgacctttatttgctggcacgacatggaggtgaggatggtctactaccgtctgtacctggacgtaggcatgagcatgtttaacgctatgcaccgcccc

SEQ ID NO: 8209 - DNA, 518 bp, Oryza sativa
  unsure (1)..(518): unsure at all n locations
  Clone ID: PAT_MRT4530_14735C.1
ggctcgagactgaattctaccttcactaggacagnnagtctctctccttctcccncacccgcagnagncaatacggaggccggcgccgccggcaaacgccggcctgggcgtcaccgccatgtcctacatcgccgtcgactacctccgccacctttctccggagaggcactcgcgtctgcaaccggcactgaggtccctcctcgccctcgctgccgtggtccgcgtcccctcctaccggcactggtccgcggagttccggtcggcgattccgttcatcgcctccatgttctttatgctcgccgccctcctctacgaaaagatctccgtccgctccgtcaccgctgagctcggcctcgactggcacctgaatacacctcctcttccagatacggggcaaaggttgctcttggcgttaaaagagaaacttccttctccaattgtagagatattaagagctcgaatcattggactgcaccattactagatgctgtttatgaagctggctttctctgtgctat

SEQ ID NO: 8210 - DNA, 672 bp, Oryza sativa
  Clone ID: PAT_MRT4530_14736C.1
atggcggcgacggggagtgatccacatgtcaaggccaacgcgctgctgcaagctcatttttcaaggcgcactatcttggcagccgaccagcgggagatactcctttctgctcatagattgctccaggcaatggttgatgttatctccagcaatggatggcttacgcttgctcttaatgcaatggagctgagtcaaatggtgacacaaggcatatgggatcgtgattctgttcttttacagcttccacatttcaccaaggagttggcgcggagatgccaggagaatgaagggaggcccattgagagcatcttcgatctggctgagatgagcatcgatgagatgcgggatctgttgcagctatcaaaccctcagctacaggatatcattgaattcttcaagcgtttccccaatgtcgacatggcttacgaagtgaccctggagcgtgacatgacgaacttgccttccgaggtggggccagttcatgcccccaggtacccaaagcccaaggaagaaggctggtggctgaagagggctcgagtgaagcttgagttcaccgctgcttcagaagctgggagaaaggagtacatgatctacctgatgtccgattattatctgggccgtgatcaggagtacgagttcaccgtcgatgtcatggatgctggaggggattga

SEQ ID NO: 8211 - DNA, 543 bp, Oryza sativa
  Clone ID: PAT_MRT4530_14737C.1
atggaggacgcctacgccaagtccgtggccgaggtgctcgcggcgttcggcgtggatccaaccaagggcctctccgatgagcaggttgcgtctggttcgaagctattagtcaagtcctgttgctggtggagcagcatgctaggctttacggcaaaaacgagctgccccaagaagaaaaatataacaaataccccctctgtttacatgtcagttttaattttgactgaccaagctcgcggtacccccttctggaaattagtgttgaagcagtttgatgatttactcgtgaaaatattgatagcagctgctgtgatatccttccttttggctcgaatgaatggtgaaactggattggcagcatttttggaaccatctgtcatctttctgatattagcagcaaatgcagccgtgggtgtgattactgaaacaaatgctgagaaagctcttgaggagttgcgggcttatcaagctgatgttgcaacagtgctgcgcaatggtaagaagcttttgaaaccagttgttgcatttcatttgatcccatga

SEQ ID NO: 8212 - DNA, 6849 bp, Oryza sativa
  Clone ID: PAT_MRT4530_14738C.1
gataaaatgatatagataagaatcaaaacgttagtgacttgctttgatgaaacaggaagacaaaaacacaataagaaggatgatcacaagaagcacagccataggctagctaataaagatccccaaagatgaccacaggtagcagcagaggtgagcatcagttacactaagaaaatggctaaagataaaaacgagtacaaacacatacaagtgtggataggacattaggaattgctacgagcgtacaagcaaccacccagctccatacacacctgggggctgggcaaagctttcatcctctttctggccttgggatcaatcccctccagcatccatgacatcgacggtgaactcgtactcctgatcgcagcccagataagaatcggacatcaggtagatcatgtactcctttctcccagcttctgaagcagcggtgaactcaagcttcactcgagccctcttctgaagtgcaaccctcttgattgcaagcaactgattggtagagctatcaccaattaccagccaccagccttcttccttgggctttgggtacctgggggcatgaactggccccacctcagaaggcaagttcgtcatgtcacgctccagggtcacctgtacagttacattgtcaccagccctgatatcatcaccctcgcgaacttcgtaagccatatcgacattggggaaacgcttgaagaattcaatgatatcctgcagctgagggtttgattgctgcaacagatcccgcatctcatcgatgctcatctcagccagatcaaagatgctctcaatgggcctcccttcattctcctgacatctccgtgccaactccttggtgaaatgtggaagttgtaaaagaacagaatcacgatcccacatgccttgtgtcaccatttgactcagctccattgcattaagagcaagcgtaagccatccattgctggagataacatcaaccattgcctggagcaatctatgagcagaaaggagtatctcccgctggtcggctgccaggttccctaagatagtgtgccttgaaaaatgagcttgcagcagtgcgttagccttgacatgtggatcaccatacttgggcttctcgatggaaaatctctggtggcgaacaagcttctcaatgaaatcctcctcaccagggcgactgggaagctcagcatattctgaagcagaggctagaatctccaggagccctttcatcttagtcttttgagttagcattgaactgaacctctcaatagttgtgtagctaatgtagtagtacgaagcaatcagaccaaggttgaggggcttcaggtacatatcctcctctatagccacacacttgcttgattctaggtcattcaatacagtctcaaccaactcagataaatggtccgacaaatgcctgtggctcacgccctgcagattgtagtagttagggttcttggtcagccgcctgtacatgaaggtccaagtaaggtaatccacagcatcttgcttgttttctatgacaccaaccaccacctcagcgttcatatgatcatgcaagaagtggtgaagatggctctcaacagggaaggcctcaaaaaggaacttcttgtagtattccttgcgaggcgcatgacacaatataacacatttccctgagttatcttgaagaggcctgctagcatgacccatcatttggagtagatcagtgattggataatcagtatgagcattctcccggccatcataatactgggttcccatcacaaccaccagatgggcaggcaatgatcttccccagcacacagtgctactcgcaacacacacttggatcctcccaccgagaaacagctgcgttacaacttcctgttccagatcacttaaaccttcatgcaagtagcctacaccacatttcagagtatatttaagtgtttcatcactgataccaccagtgaaagcatccatctcatcttctgaaccaagaaggaaaggtgttccaccaccctcagcactcgagtatgcacacaagtccaatgcagtcaaccttgcatgcttccgtgtaggcacaaacaccagggcaggtttaccattctttgcatgttgggtaatagcagtgtatgtcggcttcgtcattgcctgcatccttgcctcaaaatttgctatatccacaccctgaatgtgtatttctaatggcaccggccggacagctggaggaaagttgaaaaggccatgagaggtagcaccaatccattctccgagatctttagcatttgcaagtgaagctgaaagagccacaatccggatgttactgccgatatgacttgcaatacgcctcatcctagagacgatgacttccagaacatgtcccttttcagatccaatcagatgaagctcatcaacaatgaataggctgacctgttggacttgtttccgctgtttccaccggcgagagagtgcatcccacttctcaggagtactaattataatctcccctttatccagaagcttcaagtcagctgcagtttcacctgttagctcaactacccgagcaaattctccaaatttctgctcccaatccctgtacctttcttttgcaagggcttcaataggagcaatatacacaactcgcatgttgctctcaccagatacagccttctgatggtttcttagtatagcaaactctgcacagatggtctttccactgcctgttggcgcagcaaccaaaacactgtcatcagtgttgtacagaacagtgaacacttgagtctggattgggttgaaatgtttgaaggcactataaaggccttcgtatcgtgcatttctcaatgcagtaacaggcagtggctgcagatcaagcaattcagttggcggagcatatttttctggaagaattaagtgcctaaaacagacaggaagaattgtctgagaaccaagccacttatcagatacaacacgaataaagtattgagggggcagtggctcgtatattggcactgtgaagttgagtgtatgatcttcatctacgtattgtttcttaaccatgaagtactcatggtgaagaatgttctcgccatcgttgtcctcaacaataacccagaaaggctccacatatccatgtaccttatcatcccattggaaatcaggagttatagtcaactcaaaacccaaaaccgtacgagtaattggctgaacatgggctgaaagattcaactttggtaactggtggatgcacttgtgcagttgcctgcccatcttcgggaaccgaattagttcaccaatttcctgagatgataggtcgtagtacctctcccaagccaattcttttttctccagtttcattaggatttccttcggaataccagggaattggcgcaggggagtttggacattccacatctgcttatctatcatcttacaaagattcaaagccttctctgctagttgggcccatcctctcttcagaactatctcaaacaacgctcgtaagagacggccagcactctgtctgatgtagaccatatcggagctaagcgaaagaccctccaatttcagcctagaaatatatgcttgcagcagaacattgatctttgcactgggctcctccaagctttctttcacaggaataggcacacgatccaaaagcttagccagctccattttctcatcttgtctaacactgacatacttgaattcttcactgagtgaaaagagccgacatagctcaatatcacccattgtaggcttcaggtactcattgtaagttgaaatagtcccgtggctaatatagtaataactagcaatccttcctaggtcagtaacctggaagtatcctgttttcctgtcatactttatcaaattgttcctatcgagcagatttgcagcagagtgcaccaagtcagctctcctttcatctagtgttttatcagtctccatgatatctgccggtagaccatacaatgttggattccggagcatccggatgtagaggtaggtgtagccaagccatgagcatgcctcccgagcattctgaatagtcccaagaacaatctctgcatttaattgatcagccaatctggatatgaactgactctcaataggcagttgttgattcattagagacaggtaatattgcaattcactgtggccagttaggattattccctctccatgtgtatcatactgtggcctgcccgcgcgaccaagcatctgcatgacatccagagggctcagttctgtccaagcacctttttccggattgtaaacctgggtaccctttattattacagtgtgcgcaggcaaattgacaccccatgcaagggtcgctgtcgaaacgagcgcctgtatatgcttatcggcaaaaagcccctctacaagctcacggtctacccttgccaacccagcatgatgaatagcaaacccatacggcaaaagatctttaaggtcactgctttttactagttctgcctgactcccaagaatctcttggcttgcactatcatccttcaagaagcggtttaacgtgtcattagccaatgcagtatctctgatggcacgggcagttttcgctgtctccttcctcgagtgcacgaatataagcacttgatgctttccagcagatgccataaccttctcgtagcaaatctcattcatcagctgaaacctctgtagtggcttcctcacagtgatcccaatgtattgctgagcaagggggcaaggtctgtagctgttatcgaaatggaagaggccatcagagcgaacacgcaggaaaaccgcgacatcttcatagttcggaagagttgctgagagaccaactagacggatatgttctttggtcgtctcaatctgccggacagttctagaaacaatgctctccagaacaggccctctgttgtcatgaagtagatggatctcatcaatgattagaagctttaccatttgagtataggttctgtcacctgattttcttgtgacaatgtcccatttctcaggtgtggtgacaattatctgtgtttcatcaatctgctgtttggtcaggttctggtctccactgagctctcttacagtaataccatatgcactcagccgagccgacaaatttccaacaacttcggcaaccaaagctttcattggggccacatagacaattttgtacttggtattgtcaaacactccatccttcatatgcaacccaatctgctgaaggattgtgagcacagccacattggttttcccagcacctgttggagcacagaggagaatattatctggtttgaaaagggcagtctcataaaccttgctctgaaccctgttcagctgtgtcatcttagcaaaagctggttgagcccactctggcatatcagatatcttgacaatcttctctccagtttcatatggcttagcttttagcgccggcacatggacttcctcataccccttatgaggggttctgaatgatcctggaggaagctcacatttcttgttggccatcaagagaccaccttggtggaaggacaggctgtcaagatcaagcagctgcctctggcctttcaaccatccactctccatatcccggtcaactgccctacgatccctcgcaccatcaatgccagtgttttcgcttttagtaagcctcttggcctcatccctgatacttttctctagattcttctgcctctcctttgcagatgccctcgttgcatgtagctgctccaatatcggagttaaagttgggttacccatcatatcttcctcaatcttcttccgctgttcctgatcttcagcccttgctaaacgggtacaccaaacaatcttgagtcggttgcgtagtagcagtttaatgagatcaaacttttcatagtccaacagcatgacaagccgattctcgacatctctgtcatcaccctcagcaattatcttcaagatctcctcagcaagcttctgactgtgctgcggatcaatatcttcgtatgcttgcgagaccttcctctgaagccagtaagcatcaatgtcttgtacatttatggtcagcccctcgttggagttctgcatatcatcatcatctaactcgccacccatttgcatagcaccaggggcattcgactcaggcaagtcatcatcttcatcttcatccaaatcatcttgcacctgatcgaaatcgctctcctcgtcatcttcgttctcttcaaattcaacagcaacgccgatgtcatcatccagcgctgtgtccatgccatcaccagatggcgcagcagctgaatcaccagccgaggcatcatggaaatccgtgatgagcttccctatggagacgatctggtcgaacatctggttggagatagggttgaggagcttctcgatctccttcttcttgtcagggctcttgatcttgtcattcttgaggacggcgagcacctcgtcggcagcgccgccgagcacgtcgagcggctgtccgccgaactgctgctggatgacgctgagcagggcctcgtaggcggcgcgcgtctccttggtctggggcttgtagacgacgtcgtcggtgagcgagaggacgctgacctcacgctgggcggctgcggcgcggcgcctgcgcttggcgtcgcggcggtggaggtcgtcggggtcagcggcggcggccttcttcttgcgggacttggtgagcttctcctcgagctcggggggcttggcctggacggcgcggtcgccgaagctcctggggtcgatcctgccccagagcgtctcgggctcgccggtgggctcgtgggtgtcgcgggggcgcgagtcggtggtgaggacgaggctggagttggcgcggtactcgtactgcttgaagcgcgcgtgcgcctcggcgccgccgcccaggttcgccat

SEQ ID NO: 8213 - DNA, 392 bp, Oryza sativa
  Clone ID: PAT_MRT4530_14739C.1
catttgatgttcagacaactatcaagactgcttctctggttattcggtctccagaaaagaaatcagccacatgggatcagcttcctgtggcaacagatctatctaattttgttaccactttgcagtcaacggttggtctaaaggattccactgttccagtcaattttaccacatcgaagcaggacccaaacactacaattggaactatattgacagggagtaatttggctgttgattctgtccagctgacacaagcaacccgaccactcaggagattgcacattgaaaatctaccaagtttagccacagaagacatgctgattggctgcttgaatgagctcttgctgtcatctagtgcgagccatatccagaggtccatacaaccatgccta

SEQ ID NO: 8214 - DNA, 2823 bp, Oryza sativa
  Clone ID: PAT_MRT4530_1473C.1
atggaaaatactatgaatggattgcttatggctttggctctgttgtgcttaaccatcaatttcagggagatagctgcgtgcatctccacagagagggatgctttggttgccttcaacaccagtatcaaggatcctgatgggcggctacactcatggcatggcgagaactgttgcagctggagtggtgtcagctgcagcaagaagactggccatgtcatcaagctggacctcggcgagtacactctcaatggtcagatcaatccatcgttgtctggtctgacaagattggtgtacctcaacctgagtcaaagtgacttcggtggggtgcccatcccagaattcatcggctgtttcaagatgttgaggtatcttgatctctcgcatgctggttttggtgggactgtccctcctcagcttggcaacttgtcaaggctcagctttcttgatctgagctcatctggttctcatgtgatcactgcggacgatttccagtgggtttcgaagctaacttccctgaggtatctcgaccttagttggttgtaccttgctgcttctgtggattggctgcaggctgtgaatatgcttcatttgctggaagtgcttcgcttgaatgatgcaagccttccagctacggaccttaattctgtttctcagatcaacttcactgcccttaaagtaattgatctcaagaataatgaactgaattcttccttaccagattggatttggaatctatcttccctttcagatttggacctgtctagttgtgaactttcaggcaggattcctgatgagctagggaaactagcagcactacagtttattggactagggaacaacaagctgaatggagcaataccacgttcaatgagcagattatgcaacttagttcacatagatctttctagaaacattttgtcaggaaatctctcagaagcagcaaggagcatgtttccctgcatgaagaagttgcagatccttaaccttgctgataacaaattaactggacagctatctggttggtgcgagcacatggcaagtctagaagttcttgatctcagtgagaattcattatctggagtattaccaactagcattagcaggctatcgaacttgacatacttggatatttccttcaacaaacttattggtgaattatcagaactccactttaccaatttatcaagattggatgctttagttttagcatcaaattctttcaaggttgtagtcaagcatagctggtttccaccctttcagctcacaaagctaggactgcatggttgcctggttggaccacagtttccaacctggctgcaatcacaaactagaatcaagatgattgatcttggcagtgcaggcatcaggggtgcattgccagattggatctggaacttctcttcgccaatggctagcttaaatgtctcgatgaacaacataactggtgagttgcctgcaagtttggtgcgatcaaaaatgctgataactctgaacattaggcataatcaacttgagggatacattcctgatatgccaaatagtgttcgagtgctggatctatcccacaacaacttgtctggatcattaccacaaagctttggagacaaagaattgcaatacctgtcgctctctcataattctctcagtggagtaatcccggcatatctatgtgacataatatcaatggaactgattgacatatccaataacaatctttcaggggaacttccaaattgttggcgtatgaattccagtatgtatgtcatagacttctccagcaataatttttggggtgaaataccatccactatgggctctctaagttcccttacagcattgcatctcagcaagaacagcttatctggattgttgcccacctcattgcagtcatgtaaaagattgttagtccttgacgttggagagaataatttgtcaggatacataccaacatggataggcaatggcctacaaactctactacttctgattttagggtcaaatcagttttccggtgaaatacctgaagaattatcccaacttcatgcccttcaatatctggatcttagtaacaacaaactctctggctctataccacgttctctgggaaaactaacgtcctttctctcacgaaatctagaatgggactcatcgccttttttccaattcatggtttatggcgttgggggcgcttacttttctgtgtacaaagatactttacaggcaaccttcagaggttacagacttactttcgtgatatcattcctccttaccagtattgatctttcagagaaccatttaaccggggagatacccagtgaaataggaaatctttacagactagcgtccttaaatctatcaaggaatcacattgagggaagtattcctgaaacaatcggaaatctggcctggttagaatcacttgatctctcatggaatgatctatcaggcccaattcctcagagcatgaagtcactgttatttttgagcttcctgaatctatcctacaaccacctctcaggaaagataccatatggaaaccaacttatgacttttgaaggagactcttttttgggaaatgaagatctctgtggggctccacttacaagaagctgccacaaggacagcgacaaacacaaacatcatgagatttttgacacgctgacatacatgtttactctgctgggatttgcgtttggattctgcaccgtttcaaccaccttcatattcagtgcagcttccaggagagcctattttcagttcactgacaacatatgcaactggttggttgctgtacttgagaggaagctcagtttaattagataa

SEQ ID NO: 8215 - DNA, 144 bp, Oryza sativa
  unsure (1)..(144): unsure at all n locations
  Clone ID: PAT_MRT4530_14740C.1
ccctttntttctttttttaattgttcatttggaaggagatgcgaaagaccccaaagcccaacagaagggagtcatcaaggagagagttataaacatgacattgacaacgacaaaacaaatatcaatgctctgcacacgagaggg

SEQ ID NO: 8216 - DNA, 561 bp, Oryza sativa
  unsure (1)..(561): unsure at all n locations
  Clone ID: PAT_MRT4530_14741C.1
gggcaccacatgcaaggggcgttgctgcgccaggtttagctgaggagccgggatgtgctccgcaagatcggccatggactccatccaggagatggcgaggatgtacgagtacaccatggggatcctcatcttcttccccatcccgtccctgtcgtgggttccccttcntttccgagttccagactcgctgctcttcaaccaagccttcacccggggctcgcagatctccaggatcctcgccgcccagaatggtagcggctcaaagagggactgatcatgatgaatatatgggttgtgcttctctgcaggtttgactagtacaatccgatgtaacttttcctggcaccgatatgccggttctgggattaatttgtttctggttccatcgtgttcatatgagggcatgtgtgtagtagcccctattgttttatgcttgttccagttttggggaaaaaaccaatgagaatgncgaccaggattttctataccaaggaatttcattttcagagcccagttgcttccnccaataatattctgttttatctaaaaaaaaaaaaaaaa

SEQ ID NO: 8217 - DNA, 2185 bp, Oryza sativa
  Clone ID: PAT_MRT4530_14742C.1
caccacacaaacagcaacgacgaactaagccatagctccggtagctcttcgatctctctcaaggtctcaccaaccagccgatcgaagcagaagcagagctacagtataggcgtacgtactccggcgactggttcaggtgatctcgcggcgtacgtctagtagccatgggtaatctggggtggatggtggcggcggcggtggcggcggtggtggcgtcgtgggcgttcgacgcggtggtgaagctggtgtggaggccccgcgccatcaccaggcggctgcgggcgcagggcgtcggcgggccgggataccggttcttctccggcaacctcggcgagatcaggcgtctccgcgacgagggcgccggcgtcgtgctcgacgtctcctcccatgacttcgtccccatcgtgcagccgcacttccgcaaatgggttcccctctacgggaagacattcttgtattggttcggagcgcagcctaccatttgcttggcagatatgagcatggtgaggcaggtgttgtcggaccggacggggatgtaccctaaggacgtgactaacccatacttcgcacaactactcggcaaggggcttgtgctcaccgacggcgacgagtggaagcgccaccgcaaagtggtccacccggcctttaacatggacaagctcaagatgatgactgtgactatgtccgattgcacccaatctatgatttccgagtgggaatctgagttggggacaaagggcggaagcgcggagattgagctgagccagcggttccaggagctcactgctgatgtgatctcgcacacggcattcgggagcagctatagtgaggggaagcaagtgttcttggcacaaagagagctccagtttcttgccttctccatgtttctcaccatccaaatcccagggttccgctaccttccaactaaaaaaaacctaaagatatggtcactagacaagaaggtgagaagcatgctcacgaacatcatcaagatccggctcaccaacaaagatgtcacaggatacgggaacgacctgctcggattaatgctggagacatgcgcgccggagcatggcgagagccagccacaacttagtatggacgagatcatcgccgagtgcaagaccttcttctttgccgggcatgacaccacctcgcacctgctcacttggaccatgttcttgctgagcacacatccggagtggatgaggaagctcaggaaggaggtgacaactatgtgcggtgacgaagtgcccactggtgacatgctcaacaagatgaacttactcaacatgttccttctcgagactctaaggttgtacagccctgtctcactcatatcgaggaggactggcaccaatgccaaattcggtggcatcaaggtgcctgagggcaccatcctaaggatcccaatcgcaacaatccatcgtgacaaggaagtgtggggtgaggacgccgacatgttcaagccggcgaggttcgagaatggagtgtcaaaggcgggaaaacatcccaacgcgttgctctccttctccagtgggccgagggcatgcattgggcagaacttcgccatgatcgaggccaaggccgtaattgcaatgatcctacagaggttctcctttactctatcacccaagtacgtccacgtgccaaccgacgtgatcacgcttcggccaaagtatgggctgcctatgatcctcaagagtctcaaggtgtagaagttgttcattaggagggggttattttagtacttctttgttgtacacgagattagtttttgttcatgagcatttgctcctactgatgatgttactgtgtgtaatgcattgattccattttgtacgaaattggggtgtaaatatatctagtttgcttgttgattggatttaaaaaaaaaaaaaaaaaaaaaaacttcgccatgttggaggcgaaggctgtcatcaccatgatcttgcaaaggttcttctttacactatcccccaagtatgtccacgcaccaaccagtttgatcacactgtggcccaagtatggtctcccaaagatcctcaggagcctcaagatgtgtaggatggaatcacaagaactaagccaaccagaggggggtgaatggttgtctgaccgcctctcctccgtcggtctgaccgccgcctgccgccggtctgaccgccggtatatcaccggttag

SEQ ID NO: 8218 - DNA, 330 bp, Oryza sativa
  Clone ID: PAT_MRT4530_14743C.1
ataaatgggaaccagggtctccatatcagatacttgggcgtacctgccgcctgctcacgaatgtggttccccggctatgctcggggcatatccgcccacacgttcattggagcgctacccgatccgattattcaaaaccctattgacattgataccgttgtaaccttcacccaagggtattccaaggctggcaccacctgccgcctgcttctacaacccgtgaaacaccaacaaacaaaggtaaccttctacctagataccggtgccggtgacaatggcaacgacgcgctgtccggctcaagtgctagcaacaagcggtccaaatctgag

SEQ ID NO: 8219 - DNA, 645 bp, Oryza sativa
  Clone ID: PAT_MRT4530_14744C.1
atgtcatttttcacgaggattggcgtttggccatggatacagaacaaggtcgtcgatcccctaatgcaagtagttagaaggggagctgagccgaagcaactggctttctctgctgctcttggtgtcacccttgggatctttccgatatgtgggaccactgttattctttgtggagttgcaatagcaatgttgggaagtagctgcaatgctgttactgtcatggttctaaatttcgttgttactccccttgagctaagcttgattgtccctttcttgcgtttcggagaagttatcacaggcagtggacacttccctttgacttcagatgcattcaagaaggttatcactggccaggcctcaaaggatgtgatgctcagcattgtgcatgcgatgctcgggtggctgatcgctgcaccgttcgcacttgctgcgctgtacatggttttcaccccttgtttcaagcttatggtcgacagaggcatatatgatgattcagcgtattgcattcaggcgtctgcctgggttatatttccttctaaatttgagtcaaaactgaagccttctcgtcgacctggtttagtgtttcgctcttcacagccatggtacctcattgagatgagcattcatttgctaatttgcgtttaa

SEQ ID NO: 8220 - DNA, 426 bp, Oryza sativa
  Clone ID: PAT_MRT4530_14745C.1
atgcagatggagagaaggccaccgccgctgcttgctgaccattgtcgtctcccacatcggcccgcgggagccgccgatgccgtcgtcacagtcaaccatgtttcttattgtcgtcgctcgttgtcgtcgccacctgtggaagaattcaccatcgaatccgcccactatcgccgaggtggggacaccgccaagcataatgatgcggtcctctccgccctacatgatgaagaggaggaaattgtggggaaggagttgacagtggagggagaagtggaggtggagggggaaggggctggaccactgcaggcgaggcaggcggaagagtgggcgggtgacagggatagcgagagagagagagggggacatcgcgggttggcgagaagaagagagagaggggataaggatgatgaccgggtaggcgagtag

SEQ ID NO: 8221 - DNA, 1881 bp, Oryza sativa
  Clone ID: PAT_MRT4530_14746C.1
ttacaccacaacattgttgcgtggcagctcgccgcgcatctgcgccgtgtccgcattgtggtcgcatgtcagccacaccgtcgggattggtgagagaatctccaagagttgggagatggagtacgttgcgacgcctgagtatactcgcgagcaccactgactccatgagtgcccgtgcatgcacgcgaagaggacgctagacgctgaattgcgggagaggtgtgtggtggccggtgaccagtagggagaagggaggcggtcattgggcggcggcggtaggtagaagcccgacgacggcgcctggcgattggtgggaataaggttggcagccaacaagaagcttggcggtggcgagcgttggggagaagggcgcatgcatcgaggacgatgcgaccgcaatgtggagtagatggagttgacctcgaagacgatgcggtggagccgtgcgttcgcctctgcggaggagaagcgaagctcggggacacctgaacacatcggcttttgagcagctcgacaggggcgactatgagcttggggggtaggagcttggccagcgtgacgaggcggaagccccagccctcatgcgtgctggtgaaaacgacattgcagttgtagttgggacccgcgccacaccccgcacgcacgcaagtccatgacgtgagcgctcccggccgttgggagccacgtcagccggcagcctccgccgtcaagcttttccccgccaaccgacacccttctccctacctattggcgaatgcccgcggcagcagagcgctgcacgacctccgcctccgcaatccgtcccgtcccgtctcctcgcctgccgatctccatctagcagaggtggcgccggcgtcctcctgctcccgccgcattcgctcgccggtgagcatcctaatccatcccatccggcctcggcctcggcctcgaatttcgtctcctcgcccgccgcttgcgccgatccccatcctgcgagcagaggtggcgcccggcgtcctccttcaattcttccaccgcatcgtcgctcgccggttctggtttcttggtgcccgcaacagataggctattgcgttttgctggactcttctttttcttgaaaagtttgccaagaaaatgtcatttttcacgaggattggcgtttggccatggatacagaacaaggtcgtcgatcccctaatgcaagtagttagaaggggagctgagccgaagcaactggctttctctgctgctcttggtgtcacccttgggatctttccgatatgtgggaccactgttattctttgtggagttgcaatagcaatgttgggaagtagctgcaatgctgttactgtcatggttctaaatttcgttgttactccccttgagctaagcttgattgtccctttcttgcgtttcggagaagttatcacaggcagtggvacacttccctttgacttcagatgcattcaagaaggttatcactgggccaggcctcaaaggatgtgatgctcagcattgtgcatgccgatgctcgggtgggctgcatcgctgcaccgtttcgcaacttgctgcgctgtaacatggttttcaccccttgtttcaagcttatggckcgacaggtttggcggcgttccgtcgagtccaaggacgccgatcaaattagtgtagccgtgatgtggagagtgatctgtccaatacaacgcttctgaagctgtatatatcaattataatttgtcatgtcctcagattgagattggtccctgccaacattttgctgggccatcctggacgcctgtatgaacaaaatctatcttcagaggcatatatgatgattcagcgtattgcattcaggcgtctgcctgggttaaaaaaaaaaaaaaaaaaaaatcgaggggggggccg

SEQ ID NO: 8222 - DNA, 1761 bp, Oryza sativa
  Clone ID: PAT_MRT4530_14747C.1
ttttttttttttttttttggaaggtaaataatgacgatacttttctatatcagcgaagttctcacacatacaacatatatagccgcctttcgatccctacatttatctgcatttgtgtacaaaagaataccctcagtatccaaggctctgtgtcatctataacttaactgaagaaactgatgctgctactcgttgcaacatctccaatataacaagggaaccataaaacagaagctaatctctgaaccatctctgtgtttgatcttcctgagttgtgctccagccacccaggaagaagtaaccaaggtccacaaggtcctctgctctgcttccaactctcagaagagctgttgtcaaccgaagctcctccggggggtgcttacagggccttgctttagaacaggagttgtgcaaaaccaagagactataagctactaatctcgagccgccttgtttctccaagcagcgattggctttggaatgttgtcaaaaagagggaggggaagagggagagtgaaagcgtctggttttaaggtccacttgcttgtcgaccatatggaggaactggtgctgctgctgttgctctctggctcttggaactccggagtgctcgacgatttccttacagcatgcaacccatcaccgaaagaaggctccgccaatgcaatgagattctgctggctcttgttcaaatcttgtcgactgcccgacttaggcctcaacgccaggcctttcccagcccttgctaggacagcactactaccattttcttccctaggtaacaactcaccatcagctttctggcgtcgccttatcaacttttcgctgtcgccattctcctcagtctcgccattcagaagagaagaacctattgcaagacttctagttttcctatgttgaaaagggaatgggtcggaatctggcggctctccaaaccatgggtcatcatccaagaaaacagattttccttttctatatactgccatttctgtgccttcatgtgtcgtatccttctttggaggtggtgtgagaccatagtacccctgcagaaggctcatggctggtgaagccttgtgctttggtgttctcaaaactgaatccaatatatcatcatgaaggcgacgtggaggagtacattccctgtcatcaccctcatatgaaccgttctgctggtaagtcgacggaggatgcctcccggggagcggaatccgcagcgtcttgtgcgcaaacatctggaggtcagttgataggccattcagcctcttgatgtccgctacctcgacgccgtacttgatagcgatcccggcgagggtgtcgagcttgcccacccggtggagcatgtactgcccgcacgacgacatcggcggcgccgtggacgacgagggggacccggactgctcggcggctatggtgatggccacgcgggcggcggcggcgaaggcggccgcctcctcgatctcgccggggcggcgggccacgccgtcgaacaagaacccattggcgaaggcgtggtcgtctttgggcaaatgggggcggctcatgacatgcggaggcgcccccggggaaggggtgggagatctgggagcgggcggcgccgattcggggcggggccgccccggattcgccgtccccggcggcgggttccggtggccgcgtgggcggcgggagagaggcggtgacggaatcagaggaaggagagagagaggagaaggggaggagagagaaagaggaggaggggggaggggagagagagagagcctc

SEQ ID NO: 8223 - DNA, 261 bp, Oryza sativa
  Clone ID: PAT_MRT4530_14748C.1
atgagcgtggtgatcctggacctggacgagtcgacggtgcgcggcttcgtggcggacgacgacgccttcggccgcagcgtcgacgcgcgcttcgaggcgctggacgccaacgcggctggagcagattgtggaagggacgctgtagcagatgaagcagatgaggcaacttccccggaggggacctccatggcccaggtcgcactggaggcgtgcgatgtgcggactgcggaggttccagggtggaactgctgcacctactga

SEQ ID NO: 8224 - DNA, 418 bp, Oryza sativa
  Clone ID: PAT_MRT4530_14749C.1
atggttttcgcattcgggaataacatgtggctcgatttttcagataaagtattcaatgctatggaaagagaggtagctggtggtggaccaggtccaccaacaatttcacagtacaggccgtcccaacagacagcggcatttatcatcctcaacgcctgggccgcggcggtggtggtggaccggttcgccgtagcacggagccacgcggtccaccgctcttcttcccctgtaagcgagagcggcagcgggcagcggcgcgcggccggaggcaggcggagcggcggcgtcggcaggttgcgccgcgagcgcggcggccacttccccattccttcccgtttcgccgacgagacgctcaccggcgcacactcgccgcctcccgccgccgctcatcggtccggtactcctcagtcgtcggaaa

SEQ ID NO: 8225 - DNA, 1332 bp, Oryza sativa
  Clone ID: PAT_MRT4530_1474C.1
atgctcaacggccgcggcaacactgagagcgccatcagcagcaatgacggaaaccctaggggttgcagcggcggcgaacctaggggctatggcggtggaggccgtagggatggttacggcgctggctttggcgagagatcaggttgtggaggtgatgatggaggcggaaactgtaggggccgtgatgtcggaggccctaagggctacaacagcagcagccctaggggtggcggtggcggcggcttcggcgagagattgggatgcggcttcgacgatggcgacgcaaaccctaggggctgcatcggcggcgaacctaggggctgcggaggtggaggccctaggggcagcggcttcggcaagagattgggttgtggcggtgatgacagcggcaggttgcgaagtgccagacagatgtgcggtaagaaacggcgtcgaggcatgtggtactgtcgaatatctagccaattattggaagaaggtgagaattttgttttggatacacaagatgggtccgacgatgaccagattgagttcatccctgattctgatgatgaaggcatcgagtactgcttctcctcagatcaggagtttgtgcccgaaactgagttccaggattgtggggaagtggaggagaagggtggtgggattcaggattgtggggaggtgaacgagaagggtggtgggattcaggattgtggggaggtgaacgagaagggtggtgggattcaagattgtggggaagcgaaggagaatggtgaagaaggcaagaatgtgatctttgatacccaggatgggcccgatatggatgagtatgagttctggcctgatttggataatgaaggaggcgacttcgtatttgaagattggttcattgacgttgtgcccaagaaaaagatgcacgatggtgttgcaatggagaagaagcgaggcagtaaaattggcaagctgatgagctccaatgtgacttatggcatgggacgacccagttctaccattaccaaggcatccttttcgtcgaatgcttcttacccgcagggaggtgacctgtggcaggggacaatggccaaccacagtgctgaaccgagcaagcacttcgtggtggagtcctccaatatcagcgagcagagcaaggaggtgtccatccaatttatgcccaacgaggaggagatacccagcgaggagaagatgccgagcgacaaagaaaatggtgatggtcagtttgtaggcgtggacctttgggttgattcacaggaggaagaatacgagctcattgatgacacgaagttggaaatgctacgtctactgatcccagtccgaagtacgaactcataa

SEQ ID NO: 8226 - DNA, 132 bp, Oryza sativa
  Clone ID: PAT_MRT4530_14750C.1
atgccaagagaatattcccgaggaccactcaaccacttcatccagctggcaccaaaagactataatgacctccataatgatagacgggaaaaggatgttttcccgtctatccccaatcttggaaagaggtaa

SEQ ID NO: 8227 - DNA, 690 bp, Oryza sativa
  Clone ID: PAT_MRT4530_14751C.1
atgaggatccagtgcgacgcgtgcgaggccgcggcggccacggtggtgtgctgcgcggacgaggcggcgctgtgcgcgcgctgcgacgtcgagatccacgccgccaacaagctcgccagcaagcaccagcgcctcccgctcgacgccgcgctccccgccgccctcccgcgctgcgacgtctgccaggagaaggcggcgttcatcttctgcgtggaggacagggcgctcttctgccgggactgcgacgagcccatccacgtcccggggacgctctccggcaaccaccagcgctacctcaccaccggcatccgcgtcgggttcagctccgtctgtagcgccaacgccgaccacctcccgccgccagcgcccaaggggaactccaagccgccggcaagcggcatcgctgctgctgctgctcccaagccggccgtgtccgcggcggcgcaggagaagggctctcctattgggttcaaggatctggagtggctcgatgacatcgacctgttccatgtccagtcgccggccaagggaggcagcacggcggcggaggtgcctgagctcttcgcctcgccgcagccagcgagcaacatggggctctacaaggcgagcggtgcacgccaaagcaagaagccacgggtggagatacccgatgacgacgaggacttcttcatcgttcctgatcttggatga

SEQ ID NO: 8228 - DNA, 1385 bp, Oryza sativa
  unsure (1)..(1385): unsure at all n locations
  Clone ID: PAT_MRT4530_14752C.1
cccggtgccacacctcccccccgccgcgcccgcgctgcgtcggcttctggggtgccgtcgcccccgacgctgccggcctccggcgcgccccgggttcacaccgcgccgctcgccgggccgctcgtccgccgctgagctctatctatctactagttagtttagtcgtctcgagggtaaattgagctttgtgtgcggttttgaggggagtacatcggcatgaggatccagtgcgacgcgtgcgaggccgcggcggccacggtggtgtgctgcgcggacgaggcggcgctgtgcgcgcgctgcgacgtcgagatccacgccgccaacaagctcgccagcaagcaccagcgcctcccgctcgacgccgcgctccccgccgccctcccgcgctgcgacgtctgccaggagaaggcggcgttcatcttctgcgtggaggacagggcgctcttctgccgggactgcgacgagcccatccacgtcccggggacgctctccggcaaccaccagcgctacctcaccaccggcatccgcgtcgggttcagctccgtctgtagcgccaacgccgaccacctcccgccgccagcgcccaaggggaactccaagccgccggcaagcggcatcgctgctgctgctgctcccaagccggccgtgtccgcggcggcgcaggaggtgccgtcgtcaccgttcttgccgccgtcgggctgggccgtcgaggatctcctgcagctctccgactacgagtccagcgacaagaagggctctcctattgggttcaaggatctggagtggctcgatgacatcgacctgttccatgtccagtcgccggccaagggaggcagcacggcggcggaggtgcctgagctcttcgcctcgccgcagccagcgagcaacatggggctctacaaggcgagcggtgcacgccaaagcaagaagccacgggtggagatacccgatgacgacgaggacttcttcatcgttcctgatcttggatgagatgttgttatgtaacagtaatgctatgcaagtgatgtaattttgtatgtatgcaaagaacactgccatctcggttgtactaagtgtgctaagtacatcttactgtgggcgtatgtaattgtaagacaatttgggcccaatacttatcagcatggtgttgggcatgaactatgatgtactatgacatgacgaaagtttgcttgcagcgtgtgttctgttcgtagatcaactgtgaaaaatttgagccaactctgcttccgtcccatgccatcagtgatcaatctgatataagtttttctgaaaaaaaaaaaaaaaaaaaactcttatgtttaatcttccgagattaccagtacagaaagagattaccngtacaaaaaaaaaaaaaaaaanaaaaa

SEQ ID NO: 8229 - DNA, 471 bp, Oryza sativa
  Clone ID: PAT_MRT4530_14753C.1
cggaccgaaaaaggaaaactcgatcagggccccaggggggagagcaaaccccataaaccgatagacttttgggtcactccaaaaaccaagctttatttttaaaaataaaaaaacattttttcccgcccccggggggcatagggggctaaacaacggaaaaattccaggcgggcttaaccgactgggatctctgatttgaaaaaagggggggccttccaattatcggggaagacgtcggggggaaaaagctttgggtcaaactcgggggggacacggagggaaaaggggcccttgaggggctggggagggcctatcccccaaatgggaccccaggaccgggggggggggtcccactcctaaaagcctttctccttaaggtccaccttgacaagatcaccggcaccaccggaggacttgacaagccctgaaaagtagtgggggtgggagccctcctcaacggggaaggggacc

SEQ ID NO: 8230 - DNA, 300 bp, Oryza sativa
  Clone ID: PAT_MRT4530_14754C.1
atgactgtacagaacatgcgcatgctcaactcctctgcagttttcagacagcaaaattgtttttctagtgctagtcaacagcagcagtgcagcgaagtggaggcttttttggcaggcaccgccatggtgtcacgtcctcgtaaaataaaccaaaatcaaggacatgccaaatttcgatcaatcaattcaactattctagagccatggaccgcagaaaccgatcaaaaaaaatggatgcattcgatgtggatgggtaaaaagaagaggatctataacaaaaccgaccgttcggtacaaaag

SEQ ID NO: 8231 - DNA, 283 bp, Oryza sativa
  Clone ID: PAT_MRT4530_14755C.1
tttttacattcgcattcatcagctgctacgtagtcgcagcttttgaataagggacggtgttagaccatggcctacaaggttgacctggtggtggaggttaacaccttcgatcccaatctgttctctgcgctgttccattcgtctgacctttttcccaagatctttcctatgctttacatgatcacctagaccgccgagggcgactgcatgtccgcctatcccgtccgtctcctcatgtccaccttaggggtgcccatgaggacctcccttatcgttaaatttg

SEQ ID NO: 8232 - DNA, 590 bp, Oryza sativa
  Clone ID: PAT_MRT4530_14756C.1
gcgatgtgcccttgtcggagatgaaatctacttcacacttcggaacggcaatacgatcatcgagtagaactggggaaagaaccgcttatctatgtttgacccgccgacatcggacttgtactacattgccctcacggtgatggagaatggttcactggggtttgccggcattgagggatccagccttaatgtgtggtcgaggaaggtgaatccacaaggggctgcagaatgggtactatgcaggatcatcgaactggagaaaattatacctgtagtcgatctcagtgatgaagcatgtgtggttggctctgcagagggtctgggtgtcatcttcgtgagcacaggcgttggcttattcacgatcgagctcaagtcaaggcgggtgaagaagcttgaagagcctggtgtctactttagtgtcttaccctacatgagcttctacactcctggtagtgtactgaaccttgcttgtctattttcctgcattttctttacagcttctatatatttgcttagtcacaatgtaactgctattctgttatactgattgaccaagaccgttttgtgtatatgagagaatactggatata

SEQ ID NO: 8233 - DNA, 627 bp, Oryza sativa
  Clone ID: PAT_MRT4530_14757C.1
atggacatgatatctggcatgttacggccggcgttcgaccggatcacgccgtccatcgcttccgccgccgtgttcagcttcagccgcgtcgtcagcttcaccggctccttcaacagccggaccggacttctgaccgccgccgacggcgaggaggagactccgttgtcgccgcaggcgatcgagacgacggcgtcgacaggtggtgttggagcgttcgacatcgaggcgcctgcagcgatgacgacgacaccagatcaagctgtactccgcgatgatgtccgcggcgacgacgagctgatcaggcgcctgtccaagagcgtccagcccgtgtgcctcttctgcgcggcggcgtcgctcaccatgtccgtcaacctgccggcgagcggcggggccggcggcgcgctctacggcgcgacgctggcgttcgtctgcctgggcctgttcgccagcctcggcctgtccatgtacaccatcgtgtccaggcccggcgacgccgcggtggcgagggtgcagaagtgggcgatggtgctcgccctggcgttcgtgctcgtctccttcacgctccgcatgtggccggtgctcgtctcttcttcctcctcgccggcgccgccgccgcgctctacctga

SEQ ID NO: 8234 - DNA, 351 bp, Oryza sativa
  Clone ID: PAT_MRT4530_14758C.1
atggcgcgcctagggttcccggctccacgctattatccggataatgtcattttccaaataatagcattcttcggtctccgtctcgccgaccgagccatggtgtcagaggtggttgatggatgcttggtgcgctttaatggcgtcccatgctccaccatgtcctccggcttgggctccagacatccggagccgagtaatggcctcccctacggagcctgcctccgcatggcgatagcggggacttcgtccatgtctcgtccttctggctggcatccggatgcaatgccctcggaggatggagcaccccttcttagcctcctagggcctctgcaacggaggcttatgctatga

SEQ ID NO: 8235 - DNA, 480 bp, Oryza sativa
  Clone ID: PAT_MRT4530_14759C.1
ttactttttgtttttcttttttttttttttttttttttgtttttttggaaaacacaaatccttaaacggaaaggactttttgagggaattttgcaccccattttcatggttggacaaccctcctatatgatttcacattcacctttgctgggtcaattaggggtttttttaattaaacgaaaaacaaaacatgtggcccctcgcaaaagaccacttggatatgagggccttgtatttaacaataggatgcttacaaaagagggcccaaccacaacaaaaaaggcggccatgtgacattggctggcctaatttgggggcggtcctccaattaattaacaggagaggatccattttggggccttagttttttaacatgctgggcttaacgttgggcctattggaaattttaacccccaacgacttattacactgggagaggttgttgacccaaatggcgcggagctcaggggagaccttggg

SEQ ID NO: 8236 - DNA, 261 bp, Oryza sativa
  Clone ID: PAT_MRT4530_1475C.1
atggcgcggctgcagcgacgacgtctcgtgctgccgctcctgcagctcgccgtggtgctctggttggcggctaccagcggctgcttgtgccgccggccgccgaccccgatcgccggcgtcccgtcgccgccgattctgccggacggcgaccggacaccggagtcgcctccagctcccgtatccgcaaaacacccgaacttctcggtccttccgccgccgggctgctcgccggattgcaccgaccagcaacgtcagccttaa

SEQ ID NO: 8237 - DNA, 1005 bp, Oryza sativa
  Clone ID: PAT_MRT4530_14760C.1
tcagaagttccagcagtagtatggctcgtcgagaaagttgcaaatggaatttgagtttgatgatgaggcctgctggtccgtcgggccaccggcggcgatcccgccgtagatgtcgccgaactccatcaactccggcaggtcatctgacgacgaagcaccaaggtgctcatggttgagaagccgagacgacggtgaggaggtgcagcgtgatggtgagctgatgaccaccggagacgacgactcctctcgagccaggccatgttcatcctcctcctcctcacggttgccaccatcgatggcagcacggccatcgccggaccggcgactcgtgtgttgccacggctgaccggacggcggcggcggcgccgccgcagcctccgccggagggagacggcgccggtttggcgtgtgctcctgcactgtcgtcgtcgtcgtcgtcgtctccacctcctccatttccagccagtgttcaattggaggctgcttcttgaacaccctgcagatcacccactcgctgtagataatatcgagaagattatgtgtacgtgcctgagctcctctgatgaagttggtgctcggtgctctagagtactcgtgcatcacccagctcgtcttctcccctcgcggcgccctcccttcgtagaacaccagcgtcttcttcgtccccacgagcccgccgccgccgccggcagcgtacacgcccttgtccttccccgtcgacttccagtagccgccggccgtcgcgcggcggacgcgcgcgccggacgggtacttgctgctccgtctgcagaagaagtagcactcgccgccgccgccgcctccggtgctcgccgccgacgagtcgcatgggaggtgccatggatcggaggtgtagaggtcgacgtcgcggatggcggcggaggtgaaggtggcgtccatggccttcctggcgaggtagtaggtgacgagctcctcgtcggtggggaagaaccggaaccccgccggcaaccgctgctcctcttccat

SEQ ID NO: 8238 - DNA, 300 bp, Oryza sativa
  Clone ID: PAT_MRT4530_14761C.1
atgggggaagtgcgctctctgccaagggcttgtggcagcgatggtgtggagaagaaaggtggcagtgaatgcagggaacttgagggcggagtgtgggagcgcacgggacctcgggagtacctaagggcctcggccacggaccatgccccgggcgtgaatcgtgcccagaagaagattagtcccgaggatgtagcagttcgggacactaatacagttcgaaagaagggcttaggcatggtagtgagcccagcgatgggacaagaagtagtggcattaagtcatagcagagcggcgcagtga

SEQ ID NO: 8239 - DNA, 1415 bp, Oryza sativa
  Clone ID: PAT_MRT4530_14762C.1
ctagcggtgttggatcttgataagtctacctccactaccgcgtccttgaagaagctgcaggacgacggcgccctccctggtagcgggaccatggagagggaagcaggaggtattgaacctgaacccctcctgggccgcatggttgcggttgaggattatatttcttgcggttttcttcctccgccctccgaatttcttcttctcgtattgaatttttatggcctttccttgctccatctgaaccccaattccatcgcattcctcagtatcttctcttatctttgtgaggcctacattggggtagagccattccttgatttctttcgtttttactacgagttgcgctggatggaatccaataggatatctggatgcgtcggattctgacttcgggatggcctgaagtcgcgctacatccccttccagtgcccttcctctcgcagcaaatggcgggcgaggaacaaccagacaagattccagagtggaccgccaaacccgccctgactccctccctccagtctttcattgacattgtcgatgaccaccgagtacgagggttgtcggggtacgaagtcgctgccgacttcattggtttaaacagcgacaccgtggcacgccgcgttggccaggtgatgatcagcggccccgcgacagcgagcgacatcctcgtccctctttgcgaaaaagggccgactgaacgcaaagctacaatcaatgctctccctctgacggatgtcatcgggccgcttgcggaccatcaggcggcggtgtcgttgaaggagggcgttgccaaggaggcgtccgacgttgttgctgctgccatgacgagcggcagcaatgttccgaagaaggggaggaaattctcctccgtactcgggacccgtcggaaggcgcctaatccgtcgggaccgggaggtgacgccaagcggtcccgccggtggccttggggggagctccaggccgagatggagcgcatccttcaggttagtgctcgtggcataggccgcgagatcgaggaggccaggacggcggcgtcgtcagcgaatgaacgcgccgacaagctagcgcgcgacctggcggaggcccgcgaggacctcctgaagatgagggagctggtggccggcaacgaaaggaagtggcaaggactcgagcaccggatgtcggagcttgagaacaacttgtcagagatccgtggctcgctgcgggtgtcttacaccggcctacaccaactcaccggggagtgcggcgtcatgaccaccattccggccaaccctgacgagttctcgccgacgtcctcattcgcggagctggccatggcgatggaggagatcccctccaagcatgccgcccaggatgggcgaggaaacgtccaacgggatctacatcgggacgtgtcacgtcctcgcgtgcgtgag

SEQ ID NO: 8240 - DNA, 184 bp, Oryza sativa
  Clone ID: PAT_MRT4530_14763C.1
agaatcagctaaaaagaggccctaaacttcgttgattttattcagggagcttacacgtctgattagcacgcaggaaacaaatcaaaacgcggattcggtaattcttcccaaacagtgtctataaataaaatgttggtgagaactttggggagctacaatttgcctatgatagacatattttaca

SEQ ID NO: 8241 - DNA, 2295 bp, Oryza sativa
  Clone ID: PAT_MRT4530_14764C.1
atggcggtcgagcacaagaaagccgttggctcggtttggttacccgacgacgtcttcttcagtatcctctcctacctgccggccaagccggtggctcgcttccgctctgtgtcgcattcatggcgcgacatgctctcgtcggcgcctttcgtccagctccatctccggcgagccaataggccaggccagcttaaggtcttcttccacacgggcttgccggtggacaacgatctccccgacaagcacttctactacacttggcagcaggacggtggtccggccaagaagctcatgcgccatggcttctccggagggttttctcggatcaccaagcctctccatggcctcgttctgttgttcctcttccactcctatggccgcggcttcttcgtgctcaacccttgtaccaatgcactcctcactcttcctgacaccaagtatccattgaagaacaaccgtcaccttggaacaaatttgtccgggaaataccgatcaccggggtacatgtactggtcgtacggactcggctactgctcggccaccggcgagtacaaggtcgtccggctgttcagtctaccgtatgaccctgaggcggcggcgacattctgtgaggtcttcgtcctcgacgcgccggcgtactggagacctaccgcccagcagccgccggcgccggccgaccacaacgtcaaggtaatggtgacggacccgccggtgttcttgaacggattattctacttcctctgccgtgacggcttggacgtcatcaccttggacgtcggcgacgagacgttcggttcaccgccgccgctgccggtcgcgaacatggccttggatcggaacaataaatgcgttgtgctcggcgtggacctcaacggcagtggcaccagtgcaacgccgccggagattctgctcaatccggaggacgccgtcgcaacggcggcggagactcatctctcaccggagaccaccacagccacctgcaggttcaggagtgagtatccaccagagctaagcctattcgaggagagcctcgtgcccttgggccgcaccttggaggagatcgtcttctcgtcgccggcgacaagggcttggtcggaggtcctcaagttgctgccggcgaggacggtgtcggatctcagcctcgtgtgcagggagtggcgcgccatggtcaccacgaaccgcttcatccgatcgcatgccgtccactccaacctgatcgccacacacccccggatcaagctcgtcgtcgacacccctcgcgactacctcgacgcctccggattcgccgatcttgacgacctgataatctccggaaaccggccaagaatgtgtacttctacttcgttcatctgttcgccgccatgccatgggctcaacctggggaccttccgtaggacgaactacctgttcaacccctgcaccggttaccaagttgagctatgccctcctgactacgactacgacgacagagtgttcgacggcgtcatggcgctcggctacgacgcggcgaccggcgcgcacttggcggtccatctcgactgctggaacttcgagacgcgggcctacgagctgcggtgccggacacagctcgtcggtggccacgaggtatggaagcctgcagaatctccgccaagggccgcggacatggaggtgccggcggcctatgctaacgggaaaatctactgggtggtggaccgtaaattcgggccgcagccgagctccaccgccgcggcggcgtgcgagctcctggtgttcgacatggaagctcgcaagttcgaggtcatccaaggcccaccatgccgtctcccacggttcaatttcggtcctatcggaccccccggagaaagggacccaaagaaataccaaaaaagggtcgttcgaaacaaataccgaaaacgaaagattgaaccctgccatcgccatggcgagagcaggataaccctccttgagctccatggcgctctctgcgtagcctgctcggacccggccaccgacgcgatcgacatgtggatggtgaaagacgacggtgcttggtccgtggagtatcgtctagagatcggcgagctctcgccggagtactcgttggagacgacctcgccgatggccattgatccggtggatggccgcattctgctcaacacgggcacgtcgctgggctactacgaccccaagacaagggcgttggagacgatctacagtgttgatattcgacatgacaatgagggactcaggtacaggttctgtcccgttatctgccaagaaagcctcgtctgccctctccctgggaaatactaa

SEQ ID NO: 8242 - DNA, 3876 bp, Oryza sativa
  Clone ID: PAT_MRT4530_14765C.1
atggatctgctcccgccggcgaccgagccgccgggtgggcgagactgagtcggcggcggcgccgccgaccccagaagtcggcatcgaagagcctctgggttgttggtggtgcagatggaacaagcccctctagaatgagagcgtttatcgaaccgagaaggcattgacttcagtgatgctccaaaatatgcaacctgtgccaggaatgggagctggcagagaatttgcagggagttcttgagtaccaaagaaggtattcgaaggttccaggggtgtggctaacctaactctacatttccctgagaactttggaggtgacacaactaagatatgttacattgggttgccgtggtgaagctgctcagaacaaaagggatgttgtagccacaattgtgtatgaaagaatgcctttactcggctgatctcaagtctaaggttgagattggcggtggtttatcgcatctcgtgttcgaagggctcagcatggaaagcagatcggggtttgatgctcctataagctatgaggactttcagacatacttgcaagccaaaccggcgcagtgagtccagtagtagcttgatacctgagttgcagaactcgtgtacctgtcgatactgactacatcgtcaaaagttgatggcttgtgcaattttaccgtagacttgactatccgtacttcatgtccatatagcgttcagttcaattgccatatgagacttgctaaatttaagaaagctatccttgcattaggtttgcaactcgatacagaggcaaatattaagaggataaatgatcattttggccaaaaagcaccaccttcttgtagaacgcgagttataccagatcgtgcagtaatttcccatattgattctcggattacgcagcttgtgcagtcgtaatatttagaatcatctgctgttgttacctgcaagaagcctgctgatagaactaaaatggtaacggataattgggatattctggcagggtccttgcttcatattgccttgaagcaatggctttccaaaatatgtcgcaggatttatcctacgttcttctctggcctatgggttgcgcttactcttgtgcgaccattggaggcattgtttttttcaagcagataacgcgaaagggggacagtcgatgcttttgggtctaaactgcttgagggtacacggaatccgctccagggattctctgaaaatgtgataacctttgctcattcattgtagatgtcagatatcgagtctgcatatttggaacgtgatcagatgcagtcaacaacccttcgggatgaattcttgcagcattttcttcatgaagatcctgttgtcgggattgaatatgaagcacagttgcagaagactcttctaccccatatttcttctgcggaagtggtaaagtttgcagcaaacttttcaacaataagcagctgtgttatcaaggtagttgaacctcatgcccatgcttctttggaggatttgaaagcagttgtattgaaagtcaacactcttgaacaagacaacgctattcctccatgggatgaagagcaaatccctgaagaaattgtcagccaaagtccagagccagggagtattcttgataaagtggagcacccaggaattggtgctacagagatgatactttcgaatggcatgcgaatttgctacaagtgtactgactttcttgatgatcaggttgtttttactgggtttgcctatggtggtctgtctgaattgtctgaagatgaatatacctcatgttcaatgggttcaacaatagcaggagagattggcatttttggctacagaccatctgtcctgatggacatgcttgctggcaagagagctgaagtcggtacaaaagttggggcatacatgagatcattttctggggactgctcaccttcagatcttgaaactgctttgcagcttgtctaccaattatttacaacaaaggtggagccaagagaggaagaagtaaaaatagtaatgcaaatggcagaggaagctatctatgctcaagaaagagatccttacactgcatttgcaaatcgtgcacgggagataaattacgggaattcatacttctttaagccaattagaataagtgacttgaagaaggtggatccaataagagcgtgtgaatatttcaacaattgcttcaaggatccatcagcttttactgttgtaatagttggaaacatagacccatctatctcagttccactgattctgcagtacttgggtggaatacctaacgtagggaatgcagttctgccacttactcgtgatgatctaaaaggattgccattcaagtttccggagactattattagagaagttgttcgcagccctatggttgaagctcaatgctttgtgcaactaggatttcctgtggttttaaagagcacaacaatgacagaggatattcactatgttgggtttctaagtaaacttctggagacgaaaatcatgcaagtgcttcgtttcaaatatggacaggtttactcagtcaatgtaggtgtcttcttaggtggcaacaaaccttcaagaagtggagatattcgtggagatataagtgtgaatttttcatgcgatccagacatgtcatccaaacttgttgactttgtgctggaagagatatcatttctacaaaatgaaggcccttctgaagaagacgtattaactatccttgaaattgaacaaagagctcatgaaaatggattacagatccaagatgagggacgtctaaaggttagagaggctttgacaccacaatcgatgcaaatggccttgcaaagagttgtgcctttcccttgcagaaaacagttcactgtagttattcttatgccgaagtcatcctgctggaactcgtttaaggcactgcttacttggagccctggtggatttagcagagacgcaaaggtggtggctctgaacgaatctgtggcggggagcgtcaagtcggtcttcaagccctgggagcagcgcctcgacacctctgggggttttctggagagtaatgagggtgaccctgagttacttgttttcatcccctctcactacaagaaagttcatgtccagatacatttagttttgttgatacatctatttttgctctccatagcttgctgtgtagacttgtgtatgaggtttacatcagacgtcaagatcaagagcatctctgttgttggtggtgcagatggaacaagcccttctagaatgagagcgttagtctcagagctctatcttttctgttacttgactcatctatttgtccctcttaacagaatgtttatcaaccgagaaggcattgacttcaatgatgctcaaaatatgcaacctgtgcaggaatgggagctggcagagaatttgcagggagttcttgagtaccaaacaaggtattcaaggttccagggtgtggctaacctaactctacatttccctgagaactttggaggtgacacaactaagatatattacattgggttgcgtggtgaagctactcagaacaaaagggatgttgtggccacaattgtgtatgaaataatgcctaatccatctgatcacaaaactaagtctgagactggaggtggtttctcgcatgttgagtaggcatgtcagagcatggaaagcagatcggtgttggatgctgctatcagctgtgatgaccttcagctctactaataaaacaatccagctcttggagaccagtagtagcttgacttctgagtgcagaactcgtgtacctgtcgatactgactacatcgtcaaaagttgatggcttgtgcaattttaccgtagtcttaactgtctgtacttcatgtccatattgcgttcagttcaatggtaatgtgatacttgctaattttgttc

SEQ ID NO: 8243 - DNA, 147 bp, Oryza sativa
  Clone ID: PAT_MRT4530_14766C.1
atggcgaacggcagcgacgcctcgtgggagcccaaggcgacggcgggcacacgacggcggcggcggctggcgatggagaccttggcagcaatggaagatggtgtcctcgatgacgatggtggcgtcggtgcttctcacactgactag

SEQ ID NO: 8244 - DNA, 369 bp, Oryza sativa
  unsure (1)..(369): unsure at all n locations
  Clone ID: PAT_MRT4530_14767C.1
actccactactgtggaccctactcctctcttctactctctaatccctaatgtgttgtactggtgtggtgcttcttccttcctgctaatgtgtaatggtttggtgcactatgatacctgttgttggtcctattaccactaaatgatcaattctgttatgttatctaagaatgatctctgtacttgatttctgggacaagctctgagttatctagatatgcatatatatatgaatggatgaatgaatgttcancaataataatcacctaaattgcaatactgaaattgaatcacactaacatgattaagtccttatatatatatgcttgcatattgaaataactgaatttctgaaattaatagcacatcag

SEQ ID NO: 8245 - DNA, 272 bp, Oryza sativa
  Clone ID: PAT_MRT4530_14768C.1
tttttaaaaaaaaaaaaaaaaaaaaaaaaaaaaaaaaaaaaaaaaaaaggggggtcgatgggggggctctatagtgaatcccagcttcctgccacgtgcaagctattctatagtgttactatagtgcaacctaatgtcacttgattggccgcggttttacagggaaaagcctgggaaaacccagctgattcccatcttaatagatttgcattacatccgcttgtggacaggtggagaaggaccgaacaggcccccttccaaacactttccca

SEQ ID NO: 8246 - DNA, 1985 bp, Oryza sativa
  Clone ID: PAT_MRT4530_14769C.1
atgcccgcctcctccctcctcccccccaccctcctccctcaccgccaccgcctccgcctccctcccgccggctgctccacctcctcgtcgccctccgcgacccgctacgacttcgacccgctcctgagctacctctccaccacctcctcctcgccgtccccgccgccgacctccgtgctgcccgtgacggagagcaggctggcggcgtcgtacgcggccgtccccgcgcgggagtggcacgcgctgctgcgggagctcgccgccaccgacgcgtccctgccgctcgccttcgcgctgctcccgttcctccaccgccaccgcctctgcttcccgctcgacctgctgctgtcgtcgctcctccactcgctgtcggtgtcgggccgcctgctcccgcactcgctgctgctctccttcccgccgtcgctctccgacccgccgtcgccgctgctgctcaactccctcctcgccgcctccgccgccgcgtcgcgccccgccgtcgcgctgcgcctcctcggcctcctccgcgagcacagcttcctcccggacctcgcctcctactcccacctcctcgcgtcgctgctcaacacccgggacccgcccgacgccgcgctcctcgaccgcctcctcggcgacctcagggagtcccgcctcgagcccgacgcgcccctcttctccgacctcatctccgccttcgcgcgggcccggctgcctgacgccgcgctcgagctcctcgcctccgcgcaggccatcgggctaacgccacgctccaacgcggtcaccggctcatctcctccctcgggtccgcaaggcgcgtcgccgaggctgaggctctgttcctcgagttcttccttgccggggagatcaagccacggacgcgtgcctacaacgcgctgctgaaagggtatgtgaagattgggtcactcaagaatgccgagcaagtgctcgacgaaatgtcgcaatgcggagttgcgcctgatgaggccacgtacagcctactcgtggatgcctatacgagggctgggcgatgggagagcgcaaggatacttcttaaggagatggaggccgatggagtcaaaccaagctcatatgtgttcagccggatccttgcaggtttccgtgataggggggaatggcaaaaggcatttgcggtgctccgcgagatgcatgcgagtggggttcgccctgaccgccatttctacaatgttatgatagatacatttgggaagtacaactgccttgggcatgccatggatgcatttgatcggatgcgagaagaagggattgagccggatgttgtcacatggaacacacttattgatgcgcactgtaagggaggacggcatgaccgtgccatagagctgtttgatgagatgcgtgaaagcaactgcccgctaggcacaaccacatataacatcatgatcaacttgcttggtgaagagcaacgatgggagggggtagaagcaatgctagcagagatgaaggaacagggattggtgccaaacattatcacatacactacacttgtggatgtatatggtcggtctggcaggttcaaggaggcagttgattgcattgaggcaatgaaagcggatggcctgaaaccatcacctaccatgtaccatgccttagtcaatgcatacgctcaaaggggtttagcagaccacgcgttaaatgttgtcaaggccatgagagcagatggcctagaggctagcacagtagttctaaactccttgatcaatgcttttggtgaggatagaaggattgctgaagccttctctgtgttgcaattcatgaaggaaaatggtttaaggcctgatgttataacatatactacactaatgaaagctttaatccgtgttgagcagtttgaaaaggttccagttatctatgaagaaatgatcacatcaggatgtgcccctgatcgaaaagctagagcaatgctgcgatcagctttgagatacatgaaacacatgagggttgcatag

SEQ ID NO: 8247 - DNA, 789 bp, Oryza sativa
  Clone ID: PAT_MRT4530_1476C.1
atgtggtactgtcgaatatctggccaattattggaagaaggtgagaattttgttttggatacacaagatgggtccgacgacgaccagattgagttcatccctgattctgatgatgaaggcatcgaggaagttgaggagaagggtggtgggattcaggattgtggggaggtgaacgagaagggtggtgggattcaagattgtggggaagcgaaggagaatggtggtgagattcaggattgcggggaagtggagaagggtggtgggatttgtggcggcagcaacatagtgcactcaaatgatgaatgcaaacagcctgcccagatgtggtgcgggcagcgggttcgaggcaagtggtttcatcgtgaatctggccgatgtttagaagaaggcaagaacgtgatctttgatacccaggatgggcccgatatggatgagtatgagttctggcctgatttggatgatgaaggaggcgacttcgtatttgaagattggttcattgacgttgtgcccaagaaaaagattcacgatggtgttgaaatggagaagaagcgaggcggtaaaattggcaagctgatgagctccaatgtgacttatggcatgggacgacccagttctaccattaccaaggcctccttttcgtcgaatgcttcttatccgcagggaggtgacctgtggcaggggacaatggccaaccacagtgctgaaccgagcaagcacttcgtggtggagtcctccaatatcagcgagcagagcaaggtacttaatacagttcttgcttattttcagtag

SEQ ID NO: 8248 - DNA, 502 bp, Oryza sativa
  Clone ID: PAT_MRT4530_14770C.1
ggctgagtatggccaacatacatcattggaccgataaagaagaatggctctgtttgaggaagctgaaacacttcttcagactcaaatgtattctaggcaaacaaagcgaaatgcagagcttgcggccaggttgaatacacgttttccagaggcggctgttaagttcactcctggtactgttaagaacaagcttagtacatttaaacaaaggtggtcaggaggtcgtaagctggcaacatgcgaaggcacacttatcacttgcagtgcaaccgtgctcactattttattcactgagactgttactgctagtgaaagcacaaattcaggtgcagctgattcaggtgcagttgtttcgacgccagttggtccaatgagtggtaaaagctatgtgaactacgggattataggtgcctcttccatcaagaagtgtatagaccttgtggaatctattgaagacctctcagaccaagagaaggcagatgaagcaagactaatgaagtct

SEQ ID NO: 8249 - DNA, 1170 bp, Oryza sativa
  unsure (1)..(1170): unsure at all n locations
  Clone ID: PAT_MRT4530_14771C.1
ctaggagtaggtaggacgggcagccggctgctcctcgtctttgtagtagttgcaggtgatgaagacgccgccgttgaagcactcggcgagggcgcagccgatcctggtgaagttgagcctaactatgaagacgaagtggccgcacttgtggaagtcgacgccggcggtgcagttgccggtgtcccggccgtagcggcgcgggccgaggcgacggcggcggcctgacggcgtcgggtggatggggaggcagcgtggcggacggcgacagcatcgggtgacgccggtggcgaacaagccgccgagcaaggccatgggcgacgccgccgtgacgaaggcggacacaggcggcacgtcgcggagtgtgcgccagtcggcactgttgcacttgaagcctgagccgaagccgatctgccagacacggtggccgcgatggacgcgccccttggcctcggcgtaggcaagctcataccagagcgagccgcgcccgaggcagcagctccacttccgccgacaggcgtcgtgcgggccggcttggccgcgcgcggggtcggcgctcgcagcgtggtggtggccccgagcaagacgaagatggcggcggtccgggtggcgattcgtccgggcggagatggaggtcggaggtgctgacaatcgtggtggcgaagcagcagtggcgcgcgggtggtgctcgcgcgggagatgtggccgcgcgtggcggcagcggccaagcgtggcgacggcttggcgcggcggcggagaggtgaaagaggtagttggcggcggtggggagtggccctgaatgaaggaggactgggcggcggtcacaactccagagtccacaccaagcagccccccggcgcgctgctggtcgcacacgacaagggtgcgcgcgcgtgtatcaccggcgtttgttgttggttgcgatgttgtggggaggggggcgccagcggagcggccgtctccccatggcagcgccgcatgaaggggtccggcacggcgccgccacggtggccagcgtgccggcggcgtcgcgtcggcgttgccggagcggcncaaggtggtggcgctggtggcggccgtgatgttgctctgcaacgccggccgggtcgtcatgtcagtcgccgtcgtcccgttcgccgcgcagtacggctggtccagctccttcttgggcat

SEQ ID NO: 8250 - DNA, 1932 bp, Oryza sativa
  Clone ID: PAT_MRT4530_14772C.1
atggcctgctactacctcgccgccgcagccgccggcctcgccttgctgctgctccacgcgcccctcaccgatgcgcagacgctggtgcctttgtgtggtgacagcggcaactacacggagcacggcacgtatcacgcaaacatacagtacttagccacctccctgccatcgtacgcctcctcctccccctccctcttcgcctccggctcctcgggcacagttcccgatgccatctacgccctcgcgctctgtcgtggcgataccaactcttcctcctgcgctacctgcgttgccgcggccattcagagcgcccaggaactctgcccgctcgtcaagaccgtaatcgtctacgacgacacctgcatcctccgcttcgccaacgacgccttcccgatcagccctacctccaatagccaagggatggtcgttgcttggaaagcccaaaatgtcagcgcggcagtggctccggcttttgaggccgccgtcgtccgactcatcaacaccaccgccgactacgcagcaacggactccgtcaggcggttcggcacgggggaggaggcgttcgacgagacaacttttcccaagatctactcgctggcgcagtgcacgccagacatggcggcgactgcttgccggagctgcctcgaggatatagttgggaggatggtatctgggaatttgattgggaggatgggagggcgagttttgggcgtgcgatgcaacttatggtttgaggtataccctttcttctctggccgctctctgttgcaactcccggggccgtcgccttcaccggcgccaccggtgaccgcagccggagaaagatcgaaaaacaagagaagtgcaatactagccatttcaatgcctacaattgctctagtattagctactattgcagcatggttctgttcgacgagttggaggaggcggagactagcaagaaaaacattacgaccaaagtctagcgaagatgagatgcagagttttgcttcactcgttcttgatctacaaacactacgaactgctacagataacttttctgaacacaaaaggcttggtgaaggtggcttcggtgtagtttacaagggagatctaccagaaggtcaggaaatagcggtgaaaaggctcgcacagacttccagacaaggaattgaagagctgaaaactgaactacttttggttgctaagctgaaccacaacaatcttgtcaggcttattggcgtttgcttagaagaaaatgagaaaatacttgcatatgaatatatgcccaatagaagcctcgataccattctttttgatgcagagagaatcaaagagcttgattggggccagaggttcaagatcataaatggcatagctagaggattgcaatatcttcacgaagattctcaactgaagatagttcatcgtgacctcaaagcaagcaatgttctcttggattctgcttataatcctaagatttctgactttggtctagctaagatattcgaaagggatcaatcacaagttatcactcaccgtatcgctgggacttatggatacatgtctccagagtatgcgatgcgcggacaatattcaatgaagttagacgtgtatagtttcggtgtcctggttttagagatcatcacaggaagaagaaactttggctcctacggttctgaccatgtggttgatctcatatatgttacatgggagcactggactagcgataaagccatcgagttgatcgatccatcattgggaaaccactatccagttgataaggtgctgaagtgcatccacattgggctactctgtgttcaaccgaaacctgctgataggccattgatgtcagctgttaatgccatgcttagtagtactggtacagtccgtctcccatgcttgtccaggccttcattttgggtccaggagattggtgctactgctagctaa

SEQ ID NO: 8251 - DNA, 601 bp, Oryza sativa
  Clone ID: PAT_MRT4530_14773C.1
atgggcgacgccgccgtgacgaaggcggacacaggcggcacgtcgcggagtgtgcgccagtcggcactgttgcacttgaagcctgagccgaagccgatctgccagacacggtggccgcgatggacgcgccccttggcctcggcatcaaacacttttgtgcgtgcggttacctcgatggcgggagcaagagcaatggcaggcggcggcggcggcgcgagccagatgcagccgccgtcttcgctccaccactcggctaccgcccgaggcagcagctccacttccgccgacaggcgtcgtgcgggccggcttggccgcgcgcggggtcggcgctcgcagcgtggtggtggccccgagcaagacgaagatggcggcggtccgggtggcgattcgtccgggcggagatggaggtcggaggtgctgacaatcgtggtggcgaagcagcagtggcgcgcgggtggtgctcgcgcgggagatgtggccgcgcgtggcggcagcggccaagcgtggcgacggcttggcgcggcggcggagaggtgaaagaggtagttggcggcggtggggagtggcctgacgagaggacttttttttttctgacgtggca

SEQ ID NO: 8252 - DNA, 315 bp, Oryza sativa
  unsure (1)..(315): unsure at all n locations
  Clone ID: PAT_MRT4530_14774C.1
agctccgacaccgtagcggtgtaactggcagaggcgtgctgctgccgctagcatgatagacgtggctccttggacgtttccgccgtcggacgtcttctacaagacggacgagatgacngatcttctcagctccagggtggcatgacctgaatgtgttgacagcgtggtcatatgcgcaaatccttctataagactggcagcatgatatagaacgatgtgctcttatatcataagcgcatcccacatctcgtacgacattcacaggggtcttaccattagggctgattcaagtgatggatctgttctcattaatca

SEQ ID NO: 8253 - DNA, 155 bp, Oryza sativa
  unsure (1)..(155): unsure at all n locations
  Clone ID: PAT_MRT4530_14775C.1
tggtctttggatgatgcccatgcacatctcgatctccctgaanatggttacattttggtgagctgcaaggctgtaggctgcgaaagccgctgaatccaggatgtgccgcgancttcggcaggatgtgtactgtggtttcctgtgcacgtctgtgg

SEQ ID NO: 8254 - DNA, 609 bp, Oryza sativa
  Clone ID: PAT_MRT4530_14776C.1
atgggcgacgccgccgtgatgaaggtggacacgggcggcacgtcgcggagtgcgcgccagacggcgctgttgcacttgaagcctgagccgaagccgatctgccagacacggtggccgcggcggacgcgccccttggcctcggcatcaatcacttttgtgcgtgtggttacctcgatgccgggagcaagagcaatggcaggcggcggcggcggcggtgcgagccagatgcagccgtcgtcttcgctccaccactcggctaccgcccgaggcagcagctccacttccgccggcaggcgtcgtgcgggccggcttggccgcgcgtgggggcggcgctcgcagcgtggtggtggccccgagcaagacgaagacggcggcggtcgcggtggcgattcgtccgggcggagatggaggttggaggtgctaacagtcatggtggcgaagcggcagtggcgcgcgggtggtgctcgcgcgggagatgtggccgcgcgcggcggcagcggccgagcgtggcaacggctttggcgcggcggcagagaggtgaaagaggtagctggcggcggtggggagtggcctgacgggaggcccttttttttttctgacgtggcatag

SEQ ID NO: 8255 - DNA, 345 bp, Oryza sativa
  Clone ID: PAT_MRT4530_14777C.1
ctatgcctgaaagctgtacagattaatcagaccgaccatggccttactttgcccatctaaaagctgcatctgattctccaatgatttgccacctacagggctctcacaggaatcacgtactacacccccaccgacgaggacctccacacctgcaactccccccattggcaagcttctctgctctgcgtgctggtgagcttccccgcgccgatgagaccgagcgagatcccccatgtctgctgctctcccaccgatcttgaggacggagcgacggcgaggagacaggggacggcgacctggcagtgggtcctgagggcggcgtcaaatcgcaggcgggagcggtaa

SEQ ID NO: 8256 - DNA, 690 bp, Oryza sativa
  Clone ID: PAT_MRT4530_14778C.1
ttagctcagggacaccgtgaaagtgaagttttgggggaagacatcccataatcgtggatatttactgatggacaccgcgccgtctgccgtgctgacgtggcggacgggaggcccttttttgatgcgatcggacgtaaatacccgcgcgtgcgcgcctgagcggtatgcggcaggcgtgcgatggcgcggcaagcgaccggccgcagcggcgcgggctgaggcaatggcggcggcctgaaggcggcccgacggcgtcgggtggatggggaggcagcgtggcggacggcgacagcgtcgggcgacgccggcggcgaacgagctgccgagcaaggccatgggcgacgccgccgtgatgaaggtggacacgggcggcacgtcgcggagtgcgcgccagacggcgctgttgcacttgaagcctgagccgaagccgatctgccagacacggtggccgcggcggacgcgccccttggcctcggcgtaagcaagctcgtaccagagcgagccgttacactcggctaccgcccgaggcagcagctccacttccgccggcaggcgtcgtgcgggccggcttggccgcgcgtgggggcggcgctcgcagcgtggtggtggccccgagcaagacgaagacggcggcggtcgcggtggcgattcgtccgggcggagatggaggttggaggtgctaacagtcat

SEQ ID NO: 8257 - DNA, 481 bp, Oryza sativa
  Clone ID: PAT_MRT4530_14779C.1
acttgtgtgaatggctgtgcccaggcctgccaggtgaattggtttgtggtgggggaaatttgtgaccgggatacacaaatgtgtgcaccaccagggaaacaagctaatggaccaatggattgaccgccaagctctgaatgacgactgcaactgatgaggggaaagctgggtaacacgcctggcaggtaccaggtccaggaatgtgccacgggtcagacccacgcgtcccggatgcaatgtgtgtcccacacatggaaatgaaggtgggtttccccccaaatttccggtaagctaaatggtttggtagtggagacccaagtggtcgatggtgaaactgaaaatgcttgtggtatggtaagctgttctttcagggttcaagatttcccaccgttttttgggggaatattcttgaccaatataaaaaaagccgaatattagggatgccttgatgatctaagcctcccgtaaaaaaaaaaaaaaa

SEQ ID NO: 8258 - DNA, 3222 bp, Oryza sativa
  unsure (1)..(3222): unsure at all n locations
  Clone ID: PAT_MRT4530_1477C.1
atgactcccctgctcctcctcctcctcgccctcgccgccggcgccggcgccgcctccttccccgccgacttcgccaacctcttcgccgccaaggccgcgctctccgacccgtcctccgcgctcgccgcgtgggaccctggcctgtccccgtccctctccccgtgccgatggccgcacctcctctgctccaacccgtcgtcctcctcctccgccgccatcgccgccgtgctcctctccaacctctccctcgccggcgagttcccggcgccgctgtgcgagctccggtcgctggcgctgctcgacctgtcgtacaatgacctcaccgggccgttgcccggctgcctcgccgcgatgccgtcgctgaggcaccttgatctcgccgggaatgggttctccggcgaggtcccgaggagctacggcgcggggttcccgtctctcttgacgctcagcctggccgggaacgagctgtccggcgagctcccggcgttcttggcgaacgtgagcgccctcgaggagctcctcctcgcgtacaaccagttcgcgccgtcgccgttgccggagacgttcaccggaatccggaggctacaggtgctgtggctggccgggtgcaacctcgtcggagatatcccgccgtcgatcgggagcctgaagagcctcgtcaacctcgacctctcgacgaacaacctcaccggcgagatcccgagcagcatcggagggttggagagcgtcgtccagctcgagctctactcgaaccagctcaccgggagcttgccggaggggatgtcggcgctcaagaagctgcggttcttcgacgccgccatgaaccagctctccggcgagataccggccgacctgttcctcgcaccgaggctggagagcctccacctgtaccagaacgagcttaccggacgcgtgccggcgacggtggccgacgcggcggcgctcaacgacctcaggctgttcaccaaccggctggtcggggagttgccgccggagttcgggaagaagagcccgcttgagttcttggacttgtcggacaaccgtatctccggcgagattccggcgacgctgtgcagcgccgggaagctggagcagcttctcatgctgaacaacgagctcgtcggcccgattccggcggagctggggcaatgccggacgctgacgcgggtgcggctgccgaacaaccggctctccggcgccgtgccgccggacatgtggggccttccgcacctgtacctgctggagctcgccgggaacgccctgtccggcgccgtcgcgcccgccattgccacggcgaggaacctgtcgcagctgctgatatctgacaaccgcttcgccggcgcgctgccgccggagctaggcagcttgccgaacctgttcgagctgtcggcttccaacaacgtgttctccgggccattgccggcgtcgttgaccgtggtcaccacgctcggccggcttgatttgaggaacaactcgctctccggcgagctgccgcgaggtgttcgacggtggcagaagctgacgcagctcgacctcgccgacaaccgcctcaccggaaacatccccgccgagctcggcgatctgccggtgctcaactcgctcgacctgtcgaacaacgagctcaccggcggcgtgccggtgcaactcgagaaccttaagctgagcctgctcaacctgtcgaacaaccggctcgccggcgtcctgcctcctctgttcgccggcgagatgtacaaggacagcttccttggcaatccggggctgtgcaccggcggttcgtgctcgagcggccgcagagcccgcgccggccgccgcggccttgtcgggagcgtcaccgtcgccgtcgccggcgtcatcctgctgctcggcgccgcgtggttcgcccacaggtacaggagtcaaaggaggtggagcacggaggacgccgccggcgagaagtcgaggtgggtggtcacgtcgttccacaaggcggagttcgacgaggaggacatcctgagctgcctcgacgacgaggacaacgtggtcggcacgggcgcagcgggcaaggtgtacaaggccgtcctcgggaacggcgcccgcggcggcgacgacggcgccgtcgtcgccgtcaagaagctctgggctaacggcggcgcggcgaaaaaagcggcggccatggaagccggcggcggcggcggcggcggcggcaaggacacgttcgaggcggaggtggcgacgctggggaggatacggcacaagaacatcgtgaagctgtggtgcagcctcagcagcggcgaccggcggctgctcgtctacgagtacatgcccaacggcagcctcggcgacctcctccacggcggcaagggcggcctcctcgactggccggcgcggcaccgcatcatggtcgacgccgccgagggtctctcctacctccaccacgactgcgcaccgccgatcgtgcaccgcgacgtcaagtccaataacatcctcctcgacgccgacctccgcgccaaggtcgccgacttcggcgtcgccagggccgtctccgccgcgccgcccaccgccgtgtccgccatcgccggctcctgcggntacatgcccccgtactcgtacacgctgcgtatcacggagaagagcgacgtgtacagcttcggcgtggtgatgctggagctcctcaccggcaaggcgccggcggggccggagctcggggagaaggacctcgtcaggtgggtgtgcggctgcgtcgagcgcgacggcgtcgaccgcgtgctcgacgcgaggctcgccggcgcgccgcgcgacgagacgcggagggcgctcaacgtcgcgctgctctgcgcgtccagcctcccgatcaaccgcccgtcgatgaggtccgtcgtgaagctgctgctggagctccggccggagagcaaggagaaggccatggcggaggagaagcctctcctcgtttgatcacacaaagccagcactgatgaacacactgaacagtagtccctcactttaattagcaattagcataatcactcgcttcaaaaatcagttagcataatcacattaacaatcagtagtaattaatgtactcaagtacccagcattaaggttgaagcctcaagcatgcaatgtaagctagaactacttaagtaaaggtcctctatgtatagctcattctagtattttcatgggttaatgtactactaccagtttgtctaaagtatcaatgccaacaaggatttggtttaagct

SEQ ID NO: 8259 - DNA, 990 bp, Oryza sativa
  Clone ID: PAT_MRT4530_14780C.1
atgtggcgccttcgtggctgccacgtgggccggctggaggaggacgaagggaggctggccggaacggacggcggacgacggcggcgctcactggagctcgttgggacatcttcggccaaagggagacgcaccggtgtgatgataagaacgagagggatcaagccttcagctcggatgcaccggaaatggctcgacggcgaggaatcgcggcagcgcacgccggcgacggcaaaagaggggaaaggcgacgggaccacgagggaccgattcctcagagcaagagcatctacacgacctcgggattgcattcctagcaccggattgggcggagctacaccgagagaagctggcgacgagcggcggcttgcggcggcgagcggcaacggtggtgatgccacgccgggcggtgggaagggcttgggcggcgcccgcgagcttctaggggtactacgagtgctaccacgtaatctaaggggaggaggaggagcgaagagggagaacggaggagagctctaccgagacaggacagggcgctgtgacgagaggccgacggcacaaaagaaatcggcaaatcgaacacatctggcgcacaaccacttcagcttcagcctccgggatgtagccaaccagctagatgcggagggaggaggcggagggcgggcggagaaggaggcggcgccggcgcctggcgcggtgctggaggcggcgccggcgcggttgaggcaggaggtggagggcgggcggaggcggcaccgggggcggcgccggcggtccggcgcggtggaggcaggaggcggcgccggcgcggacgaggcaggaggagtcgccaaggcggagggcggaggcggagaaggcggaggaggcgccaacgtggtgaaggcagtaggcggcgccggtgcggtcgaggcaggaggcgccgaggcggcgggcagaggcggcgagcgcggtgactgtgagaagggagtgcggggcctgagggagcagtggtag

SEQ ID NO: 8260 - DNA, 243 bp, Oryza sativa
  Clone ID: PAT_MRT4530_14781C.1
ggcacgagggatcagatcggagaagccaagaaacctcaccggcgcgaggaagaggagcgagagagagtgtatttccgaccgccgacgaaggggcccgaatgggcggcgggagatcggcggcaggaatggcgaggacggtgtacccaatcatgttgagagccgcagcctgcgttgggcgattcgtccgtgaagatgtacgaaatctatccatccaaaatctgctcaacttcgccctctccttca

SEQ ID NO: 8261 - DNA, 200 bp, Oryza sativa
  Clone ID: PAT_MRT4530_14782C.1
cccacgcgtccgcggacgcgtgggaaaaaaaaaaaaaaaaaaaaaaaaaaaaaaaaaaaaaaaaaatagggaaaaaaaaataatagggttgtacgttttaaaagatggggggtttacttatgagtgcttgcgttatcttacgtgttcttgcgcgtcacttaattttatttggctggcctaaattttacaaatttgggact

SEQ ID NO: 8262 - DNA, 2181 bp, Oryza sativa
  Clone ID: PAT_MRT4530_14783C.1
ggctcgagcctctaaattctcaaatgtaaacccctgctgtgacaagctccagccctgaagtcgggcaggatggcctaaatctgcttcaagagaagcaagaattcccaaccccttcccgagggtctgggcctcgaagcggaagcattcacacccgcaaccctctcgcctctggactccggccatgtcgctctcgtcggcgcgtcagcgtcgggccacggccgcgtcgccgccgaccgacgacggctactccaaggaagccaaggacaggaggcggcgccccagcggcgaggaggaggaggagggcatccggtggttcctcccgttcctcgccctcggcctcctccgccacatgagcgcgtcctccaacctgatccacgactgcgacgaggtgttcaactactgggagcccctccacttcctcctctaccgctccggcttccagacctgggagtacagttccaactttgctcttagatcatatctgtaccttttcattcacgctcttgtagctgggcctgcttcaatgatttttggggagcataaggttcgagtgttctactctgtgagaatctttcttggccttatatcaactataacagaaactgttctggttgttgctctttcaagaaaatatggaaaaagacttgcttgttatgtccttgcaatgctgtgcttaaccagtggctgcttctttgccagtaccagtttcttgccaagttcattctccatgtatgctgtaacactttcctctgcactcttcctacttgagaactatgctgctgcagtctctgttgcagctgcaggagttatccttggttggcctttctcaattttggtgtttctccctattacggtttactcactaattagaggatctttcagaagagtatttttatctggatttctgacttccatgttccttcttgtcctttcggttattgctgattactactgctatggcaaatggacagcatcagtgttcaatcttctgaaatataatgtgtttggtggtggtgaaagtcacttgtatggaacagaggggccttcattctattttaagaatggattcaataacttcaattttgcgttcatcttggctctgctatttttggggtttgtgccatttgcaaggaagaaatatgtcccagatctattgatagttgtatctcctgtctacatttggttggctttcatgtccttgcaggcacacaaagaagaaaggtttctttatccaatttacccattgatatgtgttgcagctgcagctgttattgacacctttccagattttttccatgacaaatattcatctgaacagtctatctttgaaaagatagcaaagggcctgcggcctttgatccttggcttcattttgtgtgcttcccacagccgaacattctccatgttgaatggatatggtgcccctattcagatctaccagcatctggaacatcatgaagatactgggcctggttctgttctctgtgttgggagtgaatggcaccgctatccatcatcgttcttcataccctcctatattagtgaagtttggtggatagatgatggcttccgagggcttcttccatttcccttcaatgaaaccctgggaggcaccactgctgctccatcttatttcaatgacaagaacaaggcctctgatgaacaatatctgaaagacattggggcatgtagcttactggtggaacttgatcttagacggccttacccatcccgaggaagtgatttgtcgacatgggagactaatctatcccaacgaatggagttgtataactgactgcgctgccctttctggatagagagctttcacctgcattaaaccggtcattcttcataccgcaccgatggcagcaaaacaatgtttttggcctgtacaaactgctgaggaggctgcctactgaccaagcgtaatctagtactggaacctcattatctataacacagtgaagtagcaaatcgtatgattgattagtcggcatagactgattcacaaattttgattaccagatgtttttcactgaaatgccccttttccctatttgtgaaattctgaacaatgttatgtgtagactaatctatcccaacgaatggagttgtataactgaatcattagcttttctatttttcttgacggaatctgaggattgcgtgattgtgccctgg

SEQ ID NO: 8263 - DNA, 467 bp, Oryza sativa
  unsure (1)..(467): unsure at all n locations
  Clone ID: PAT_MRT4530_14784C.1
gcacgagggtgcccgcgatccccctccagatcaagccctccgccggtgccgtcccaccgccggccccgtccatccatcagcgtcgcccttctcctccgcgccgtcattcgctgtcgaggccgccgccttccccagtcctagacctgtcggcccggataggggatctcaccgccaccgttgtccccatcgtcgtatctcgccgtcgccgcaacctacaaggctacaaggcagtttatctatggcaacaggatttgtgatgagaaaaatggacttggtagttatgaggtatgctcttagtcctttctatcttatcactgatgctacagtgcatagacccttttgttcattagagaactccttttctgctatagataatgttcccctttgttttcaggtgaacttttcttatattgaagtaggggaancttttcttagaacctgcatctacgtttgaatcgtatgcattc

SEQ ID NO: 8264 - DNA, 357 bp, Oryza sativa
  Clone ID: PAT_MRT4530_14785C.1
gtataccctttatccttggacgtacgatgagtactgatacggtatacccgcgcgtatacggacagtttctgtatacgttaaggaaatctatcacgtgatagaaacagaatccatggatggaagtagtcctactcggatgagactggatctttaccatattgtgagggttccgatatctccgagtcctacttggagatcaactgacccgcggtataaaagggaccccctgggcaggacctaaggcatcgaatctcaccgtcaatacacccaccacagcctacaaagccggagcgcgcaggagccaagtcgccggaagatctagtcggactaactcgactacgatcttgtcggtatcat

SEQ ID NO: 8265 - DNA, 603 bp, Oryza sativa
  Clone ID: PAT_MRT4530_14786C.1
atgagaccaactgtttgtgaattcccaagaaaagtttacggtatttatgctgcattaataatcatgactgatcagaatcatgtagtccctctgtctgtccctgacctgaaacatccggttggaactacatttcagggcttcgggctggaacagacactatcttggacacgcttctactttgatggtgttaagctcacaaagctagagcagtttgacttcatccaccaaaagagggagcagcagaagggaatatcattacccacacttactgcgaggccaaccaaccatgatggtgcagatgctgggtgttatgtggctcaacgtccaacgagaaggaatgggctaccacgacaggggtggggtgtagtcggccctcagttcgctatggacacgctgtcgtcggtgtccttcctcgccattcggcgagggttgtgggagtggggtagaggtgggcagccacaatggctggtgtactacaatgagcgggagaggtttaggatggacttggaggcgctggccacgttgcagctcatcaatggaagagggacaaggaagaagatgggatgtggtggaggtcgcttatatgtgggtctcacctactga

SEQ ID NO: 8266 - DNA, 1989 bp, Oryza sativa
  Clone ID: PAT_MRT4530_14787C.1
atgggggaggaggaggaggaggagctgtactacgggaaggggggagcgcgcggcggaggcaatgggggtggcgctttgtcggctgctgctgcggcggcgccgtccgtctccggcatctccgcaggggctagggggagaggcaatgccaccgtgaagaaggagctctcggctctcaaggatgccaatggcaatgtcatctccgcgcagacgttcaccttccgccagctcgccgcggcgacgaggaacttcagggaggagtgcttcattggggaaggagggtttgggcgcgtttacaagggccggttggacggcactggccagattgttgctataaaacagctcaatagggatggtactcaaggaaacaaagaatttctagtggaggttctcatgcttagtttgctgcatcatcaaaaccttgttaatttggttggttattgcgccgatggagatcaacgccttcttgtgtacgagtacatgcccctcggatcattggaagatcatttgcatgatctccctcctgataaggttcccttggattggaacactaggatgaaaatcgcagcaggtgcggctaaaggtctggagtaccttcatgacaaggctcaaccaccagttatatatagggacttcaagtcatcaaatattctattgggcgaggatttccatccaaagctttcagactttggtcttgctaaattgggtcccgttggtgacaagtctcacgtctctacacgtgtgatgggaacatatggatattgtgctccggaatatgctatgacgggacagcttacagttaaatcggatgtttatagcttcggagtagtcctgcttgagttgattactggccggaaggccattgacagtaccagaccacatgtagaaccaaaccttgtctcatggcatctgattatcttaacttctggcatttacactgtgttgacatcagccatcactttcttcaaaagatttattgggaaagtggatgttctaatcattgtcagaactaaatgtagggcgcgacctcttttcaacgacaggcggaagctcccaaagatggctgacccggggctggagggacgatatccgatgcgcgggctctaccaagcgctcgcggtggcatcaatgtgcatccagtcggaggccgcgtcccgacctctcatcgccgatgttgtgaccgcgctctcctacctggcgtcccagaagtacgatcccaacacgacgccgtcctcaaagaaggccggcggtggcgaggccgggagggcgctgtccaggaacgacgaggcgggcagctccggccacaagtcgccgtcgagcaaggactccccccgggagcagcagctcccggggatcctcaacgacagggagaggatggtggcggaggcgaagatgtggggggagaactggcgggagaagaggcgcgccgccgccaccacctccagcaatgcccaggaacaaatttgtcggacctcagttatttgctctgatgtcagacaaaaagaaaggaaagaagatgttgtacaactaacaactgatagagctagtacaaatgtcgaagccctgggcgcggcagtaggtccggcggccgcgctcgttggtgtccccgtcggcagcggcggcggcggcggcggcgaagaggaagccgaagccgagcacataattggtgtagcacgtgccaaaggggtcagcggggacgacggtgaggctgacggtggtgagtgtgaagcggcgcggagagcctctgtgcttggagaagacaccgcgggagggaagcaagttgaggagtcgcttgatgatggaggggtccaggtggcccgcgttggcgcctccgaccaaagcttggtggggacaccgagacgtatgatggcggtgagcgccatgggaacggagatcatgttcgctagctccatcatcacgaggcgggcctccatgggaagaatttaccgtctcggtcggctgttacggccattttcaaaagtatcaccatga

SEQ ID NO: 8267 - DNA, 676 bp, Oryza sativa
  Clone ID: PAT_MRT4530_14788C.1
aaaatacaagatacagttttccgagatgtggcactccagcagggtacagaattttacatagtcaatagaccctgaggagaaagcagcatagagaacagaatctaagaaacggagaatccacagtgctttcttcacaatcggctgaatttatacaggtttggttcacaaactgaccacacgaatccatccgaacgctgtccactcttcagactagaatcaggaacttctgcgacaactccagatctccaggattatttgcttaaacgatatttacactaatttgtgttatatacgtttcaacataatatagcggggatggatcttcctgtatttttcttggattcagcctgtatttgctactatacaaagacattctcatgttaccacagattataatatcatgggatttgtcagtaacaagtgttcttacatgtctgttcaatttgtcataggactttcttggtttggtggagaaattctactacctttctggaagatatgacctggagcttgcagttggtgctgcaatggagaattcatttctacgagcccttggccatattgaattggacctgcctgaggccccagaaaaagccccaaagccactgatccattctcaaaatttggtccgaagaatatcgcacatattccggttatcatcgtgagtcctgcaaac

SEQ ID NO: 8268 - DNA, 672 bp, Oryza sativa
  Clone ID: PAT_MRT4530_14789C.1
atgtggggcccatgtgtcatcctctatctctttcttctttctccccgctctctctcccttctcgctttcttgatcttcctctccccttcggccttctgcaagctacatcagcgctggagcagtggcaacggcgatgggtggcgagtggagtggtggcggcgcttcgggcagcggcggcaaagaagacagcatgcactcaagggccagagtggcggcgaccgacgggagggttggcgctcgagcggcagtgatgggacaggggccagaactggagcggcggcggagaggcatagctccaccggatttgctccctcggacgtcacgtacaaatcctgtgggcatggcatcttagacggcaaggtcaacgggtgcatccatcgacatcaccgccacgccgcatccgtgtctcttccccttcagctcttcccgccgtccacgccgcggtcagggtgcgcgcaccagagcccgacgaccagcgcgcgctccttctctgcgccatcgaactcgccgttcagccgcgtcgaggatgctgccgccgtgcgtgtcccagaaccactgcacgaggtggaccgtgttctcgcggccgttcatgaccaccgctggacaccggccgcaggtgacctcgaggaggacgacgctgaagctgtcatgatgctcatgcccgccgcgtaa

SEQ ID NO: 8269 - DNA, 236 bp, Oryza sativa
  Clone ID: PAT_MRT4530_1478C.1
ggagcggcggctgcctcccatgccaggggttgggccgccccaaccccctccacgctctgtctcgcgtgtgcggcttgggcgggtgctcccagcgcccacctaccacatttattaaggcagcgtcagcgcggcacatcgcatttaatgcgacgtgcaggcgcactaaccggccacttgcggccggaatgaccgatgtgacggtagccagggagacctgcgcacgcacctactgctag

SEQ ID NO: 8270 - DNA, 231 bp, Oryza sativa
  Clone ID: PAT_MRT4530_14790C.1
aggtacctcgtgtcggatatacggatgacggtcgtggagtctcttcttctaccacaaggactaggtgcgcaccttcgaatgcctgtctagccatggacaatgcccccgactcctcggccggcccaccaacggacgtatctaggatttcatgcactcaacgacactatctgcatcaaaccttcaagatcctgaaatttcatctctggtggagtcaaaactcacggaatgata

SEQ ID NO: 8271 - DNA, 360 bp, Oryza sativa
  Clone ID: PAT_MRT4530_14791C.1
atggaacaaatctggtggctgatgtgtatgctgggcgccatcggaattcgacgacggcagtacatgctagcagagctggagctgagatcgatcggtactagcttaattagtttgccgtcaactttactctttcgttggtctagcagcgaccggtcacgcttagtggcggtcggttcggtgctagccttcttctgggtctatgtattagtgttgtcgtacaagatcaatgcgtctcatcgatatatcaatgtatctcgactagaaattaatcgcaccaatcatggactttcgtcatgcacggtccatcgtcgaattattgcgtttctagaggtcgatcggctttcgtcaccatgcacgtac

SEQ ID NO: 8272 - DNA, 471 bp, Oryza sativa
  Clone ID: PAT_MRT4530_14792C.1
cctgtggattgattcccatcggggcgccttcggccaccaccacaaccactgggcttcaatggaatttagataattccagcatgagctttggaggacttattagcacattaaacattgtgagggaggagaggactgttgttacgataacttcagattgtgacctgatttggacaatatcgctccggcaccactcttgaaatacgtaacacaattgtatcatagttccaattttgtctcatctattttacgtcgttgagttctacccttagtaggagagtgaaaacatacatggcatctgatgtggctaaacctggtgaaatgttaatatgtaacttaaaggacttggcacgtctctaaatatataccttgcactgtaattgcacaattttttttttttgtaaacatgtcaccaaattacctgtaatgtaaagaaccagttgtatttgttaagcaaactccatattttcgctt

SEQ ID NO: 8273 - DNA, 1122 bp, Oryza sativa
  Clone ID: PAT_MRT4530_14793C.1
atgtctactaatgggggcttagaacatattgattcactctttgctgcaaactccctggtctactgtcgtgtttatgcaaaagcatttgcattagctccgcggcagctagtgaagtcatgcacagtccctattcatgtagcatccaaacgcctcattcccaagtcccttagccgctcgtacggtcgccggcggcgaccaaatgccaccgcctcactcgagctccgccaccgcacatcgccggctgccgtagctcatttcttagacaatccgagccgtccaccacatccccatactacactcgttcattcacagttgcccattcctcctacctcgcagccgttcgccggaacccgtcgaacgtcgtccgctgtccaattgcccggctatctcctctgtcttggtcaaagctacatggcaggactagtcgtccgccgtgggcaaggaccttcagcggctcggcgaagaggagaagggccacccttggtcgctagagagggaggagatgtcgatcgcgctggagatgatggaggcggagagggagatgcacaggcgacgaagtcgacgatggatggggtcaggcgcttgagaagggcgaaggaaaagcagcgctgccaccgcttcctcatccatcgcattcgagcggaggtggagagagcgactccttccgctgccggcgcttgtgcatcacgttcccttccgccggcggcaatactctccggcgccccctcttgttctgttcccttctctgccggcgtccgcttccccgccgcaggagcttctggcgccgccctgacgacttccggcgtgcgcacaggggcggtggtgcagaggagccccgcatggttctacctcctctcgcgcgacgccgccggcggcggcggcaactgcgacgacagctacaggcgtgcgtggagccggctgttgaggaggctggtgcgggagagtaggagtttctgtagcctcagcatcagcaggcacgaaatattgtaccatccaaaatatttacagaaatggcccctgccgctcaagtggagggcgtcaaggtgtgcgcatgttgcactgagatcccttgccgccctctacaagggttgcaagggggcaaatgtaatttcgctatgctaa

SEQ ID NO: 8274 - DNA, 2918 bp, Oryza sativa
  Clone ID: PAT_MRT4530_14794C.1
atgtcggcggaagcacataagcttcggttcgttagatgcccaaaatgcctccagcttcttgtggaatatccatccatttctgtctaccagtgcggtggctgtggtgctgttcttagagcaaagaaccgattcatgtctgtcacacaaactggatccaaacctgatgaacacaacaatatttcaagtagcttgaatgggtcctctcaggacaacgaatcagcttgctcagatggacagaaaattgactcttctagtgctcagcctaatgaagacgctgtggaggaaaacattccctccactaccaaggatgcaaaatcatgtgaagcagtaaatcaagaacaaaatacgaccactgtacagagcgtaacccctaccgaggatgagaataaggagaaatgtcctacaactgatgcagatatccgagacactggtttagagaatattggcacaagtgaaaatacagacttgggaaaaggttacagttacgattgtgtatctgatggaaatgctggtagtgatgttgctgctgtccacattgcaggtgaggaaccaggagcaatttctaatcatagtatgaagggggaggtagatagtgtgactgaccaaatattttctgttagcaataaaaatgtgaactgcaaagagttagatgaaagaaccaatctgtgtaaggaaactgaggccaagtcttgtaatgaattgattcaaatggaggagaggtcacagccgaatgaaggttttcatgttgaatctcatgaagatctgattgaagaattggaaagatctctatcatttagtgatgatgaagagagcttgttggatgcaactggcaacaatgaacttaatgaagctctacagtttcaaattggtagcaggagattttctccaggtagcaaaatgaatgatgcttctcgaagtgatcctcatggtcgactgattgaagaactggagagatctttcagtgatgcagaagaagcagcggagcagcatgttgtggttgtggataaggtcattacagagagagattttggtaatgagcatggcaaggttccaacttccctggttgctgaaagtggacatccatgtgaaggaaacatctcatcatatgatgatgggcatcagaaatctggtcagagttttcaacagaatgaactaacagctgatgaaactgaagaaaaggagcatggtctcttggaaaatgacagcaagatcaactgtattcatgggaatgagcatgccatggttgcagacaatgacattgcagagattcatagtgagcatgataaggatccacagttgctggatggtgaaagtgcaaaattatgtgaaggaaccatttcttcatttgatggacatctcaaatctggacaatgttttcaagaagatgagccaactgctgatggaaataaacaaaaggaggagagccatatgggcaataacaatgtgaccgactgtgcacatgaggataatgcaactgttgttggtttctcaagcttgtcaaatgatgggattcactgcaaatcacctatatttaatgagaaagaagaagagagatcagataaatacagagctaatcaactttatcagggactttcacttgattctgaggacttcatgtcaatccaaaactttatcgagtcacaaatggatgggacatcaagttctctctcaagtgggtctcccaatcaaggaaatttgtctctgaaatcatcaaccaaattcaagtttgatcgacttgagcgcctcaagaagatcgatgagctaagagatcagctaaataggctttgtagcaaaaagcgcttggagaataggtatcggatgaaaggccttgagtaccagccacaactgagtagctactacgttgaccaacatagtcaaaatgttgatgcagattccatccaaagttcctctactctagggtcctattattggaatggaaagcaaccaagttaccctccacgaaaccagttctcgccacctcattcatgcacacactgccattttgggcatgtggaaacgcacatgccacacaattatggtgcttgggatgagttcaattcgtattaccagccttcatatgctggaagctcaatcattgatcatgactcactcaattcaagctacaaggagcagaagcgagtggtgcgaaagcatattttgcggcctgtgtcaggtgcttcaccatttacagtatgcaatagctgtttcaatttagttcaaatgccatcagatatctacatatccaaaacaaagatgggcaaaatgcagtgcggccagtgctccaaggttcttgtattatcatttcctgccatacaccacgcgtgtgcaaatagcagtaaggaggtagcctcaaaatcaaacaagcacaaaggcagcatagtcgttaagcctgaggatgctgcttctcattttgctgagtcctttactcgagatcctgtcagtatgaatgaagaatatggagcatctttcacaagaagcttctctactcaagctggatcagcccttgctgcctcacaaagtggcaagaatgtttcagattcgacacttcatagactcatgggatatgattcagcaagccagctactacatgacttacgtcacagcaaggtttatgatgacggatacgagagctttgagtcaatggtgccagtatccagcagagtatccagaagaaagaacacttgaggttttgcagtgctccttgtaagcaggattataaggcaaacagttttgcggatccgttgttaagttcgtttttgaaaacatgcggacatcttgcctgcaaatagtttcacaggttttcccatggaaatctgaatccatttgatgttattgtttgtcagattctttggtcatcttggtatatgtgctgtatattcttttgctgtcaatttgttaatattcaagattattataac

SEQ ID NO: 8275 - DNA, 825 bp, Oryza sativa
  Clone ID: PAT_MRT4530_14795C.1
cgagcctcaagaaactcaaccttgatgctattggcttgcatggcatatttccaaatgtgctcggagacatggtttcactccaggttctagtattatcatcaaatgaaatgaccatgaaaacaacaaatctgaccaccctgtgcaacttgagggtcctacaactcaaagagtcatattcatacggtaacatatctgagctaattgaaagtttgccgctgtgcgcgtttggcaaattgcaggaactgtatttgcaagggaatcatttcacaggaaccctaccaaattggttggggcagttgactagtttggtcatccttgacttgtccatgaacaacattactggacctctgccaggtatttttgggaaatttactgatttaagggaccttaatcttgctggcaatcaactgacagggcatctgccatcccagatcagtatgctcagtaacttgaccaggttggatctaagcaacaatatcttggatggcctcatcacagatgaacactttgttggtctaaagggcttagagtatatagacttgtctcacaatagattgaagattgtgctgggctcacctccctttaggttgaagaagcacattttacaaactgccagatgggtcctatgtttcctgcatggcttcagtggcaggtggatctttcttaccttgatattacaagcacagatcagtgggggattgccaacaaactgggagatcatgtcagtggaacagctctatctgagttcaaaccaatttaccggcgaaataccctcattgccaagaaacattatcaccttggacatctcaagcaactctttaacag

SEQ ID NO: 8276 - DNA, 468 bp, Oryza sativa
  unsure (1)..(468): unsure at all n locations
  Clone ID: PAT_MRT4530_14796C.1
aacatagaaacgcttgagagaggcagcgttccaggaatggtcgaactcttcgccttccagtgtcgccagtcgaaaggatcccgtcctggatttgtgcttgatgaggtacggtccttcccatttcgattcaagtttgccaacggctatcgggttcgcctttttccttaggacaagatgaccaggcaatagctccgttggtcgaacttttttgttgtaagttgccgaagtgcctgtggcatacttttgcatgtgttcgagtgcttcgacttcttaccccttccaagagttcgagcgacacctcgcgcccccccttcgttcccggagaacgtcacccttggtgagttagcccctagctctgttgaggtcattgcttcgtcaccataaagtagcatgaacgggctgaacttggttggtcttgtgggggtcgttcgcagggcccagagataacaggngatcaacagggcgcgg

SEQ ID NO: 8277 - DNA, 421 bp, Oryza sativa
  Clone ID: PAT_MRT4530_14797C.1
acaggagggcgtcgtggaccaatggtgcgtgaagacatgctagagacgaagacagtgacacaaccggcggcggtcgttgaggaagatgacaccgaagagccgatgtagtcgaaccgtgaaggacgagatatcacacagggtttgccagaccccgggacaactcgggacaaacgcgcgccccggtgttgccaataccgcgcgggcgagacaggggaccaccatgaatcatacgccaattcgagacggtcgcggcgcgagaacggcatagagggagaattgctggaactagctgggaaaggtaggccggcgaggtgcgcggcacggaagctgaagtggtgtcgcagcaagcctgacatggtgggagcacggctaggctgggtcggtacggtggcgaggctaccccaggaggaggacggaggcg

SEQ ID NO: 8278 - DNA, 348 bp, Oryza sativa
  unsure (1)..(348): unsure at all n locations
  Clone ID: PAT_MRT4530_14798C.1
atgtggtcgcagccgtgcgcgtgcaagaggctgagaacgaatcccgccgaaacacgagttcaacagtccnccgtaggcgcctgctacttcgacaatcgagccggccgcctcctgcgtctattcggagaagtcaagtgcagtcccgccttcgcccggagcaccttccgcccgcgccccaaggtcattaagggccagccgaagagtgtaacaggcctccttggcggactctatggctggcaccagggttgcggccgtagcttcggccgacgcaagacaggcttcgagggatttaatcttctcctcggccgaagcaagttgtcagtctcgttcggcgtcccgctggcgtga

SEQ ID NO: 8279 - DNA, 921 bp, Oryza sativa
  Clone ID: PAT_MRT4530_14799C.1
ctagacataaaaacgcttgagagaggcagcgttccaggaatggtcgaactcttcgccttctagtgtcaccagtcgaaaggaccccgtcctggacctgtgcttgatgaggtacggtccttcccacttcgattcaatcttgccgacggctatcggattcgccttcttccttaggacaagatgaccaggcaatagctccgtcggtcgaacttttttgttgtaagttgccgaagtgcctgtggcatacttgcgcatgtgctcgagtgcttcgactcttaccccctccaagagttcgagcgacacctcgcgcccctcttcgcccccagagaacgtcacccttggtgagttagcccctagctctgtcggggtcattgcctcatcgccataaagaagcatgaacgggctgaacttggttggtcttgtgggggtcatccgaagggcccagagaacagatagcatttcctctggccatttgcccttcgctgcctcctcaagccttttctttagtgcttctaggatctctctttcctgtgctacgagcccaatggctccccgcaaacctaccaaggccagatcaactagagaagatcctggaagccttggtgaaggatggtcgtgcttccttggcaaatcacttgtcaaagaggccgacttgggcgaactggtatcatcgggttctctcatagagggccaaggatcatgcgggggcgaggccgttgttccctcgcctggggatgggcgaacggttgtcttcgccgcatacttcgctgctgggcttcgcctcccaagcgacaacttcttgccttcggtgctttcgatgtatgaggttaggcttccccagcttaacccgtcagcgttcccgaagctggcggttttcgcttggatgtgccggacctgtgggttcgcccctactgccgagctatt

SEQ ID NO: 8280 - DNA, 291 bp, Oryza sativa
  Clone ID: PAT_MRT4530_1479C.1
atggggaatttggttgcaaagaaacagcaggatctttcatggcacctacaacacgccaaattggaggaagaattgaatagcttggcgctcatcaccgaaatacaaccacgaatttgtccccgtgttttctggccgacgtcttcgcctagcaatcctatgcgtgccaagccacatcccacatctgttcaagttcatcccagaacaaggccagtcgccggcggtccaaagattgatgtcatggcagaagaccggagcgacggccaaagctctgggaagctgtccaacgattga

SEQ ID NO: 8281 - DNA, 535 bp, Oryza sativa
  Clone ID: PAT_MRT4530_147C.1
cccgggctgcaggctccctctccatcgccgtcgccgtccaagaagaggggagaaggagatggatccggtcgcgggaagcaggtacaggtttggtccgcacgagatagccgagcggcaggtgttccgcacctcgcccctctccttcgccatcgtcaacctccgacccacccgccctggtcatatcctttatttctgccaattatgtagtcttgtgaaactatttgctgatcttagccctgatgagactcgtgatttgtggatcatggcaaaggatattggtgtacgtgttgagcagtaccagagggcttcttcgctcacattcacaattcaggacggacctcactctggccaaacagttccacatgttcacgttcacatcgttccccgaaggaaggaagattttgagaacaatgataacaataatggcatgatgaatgcaaaaaacgagacattagacctggatattgaaagaaaagatagaacgatggaagaaatggcccaagaagccaaagaatatcgtgctcttttctcctag

SEQ ID NO: 8282 - DNA, 853 bp, Oryza sativa
  Clone ID: PAT_MRT4530_14800C.1
atgcttgaagaacccatttgcaggcagcacccaagtgatggaatgctcccatggcgtgtaaggccttgagaagtataaggtgatctaccacctggcggtggaaaggacgtaaatgaaggagattttggtggaatgataggttcacttgcccggtgctgcagtggttgctgaggataggaagatgttcggctcaatggtttggcatccccttgctgcaccagagtgtgtgactgtgaccaccatcttttactttcctgaaattcctcatcctctaaaatgtcttgatctacccagttaggaaattctacatcttcagcccaatcaacagttagagaacttcctcttgagatggatcgtctgtcaccaataacaccaggattccgtgttccactaatggttcggttcaactttgcaaaagtgctcgcaagatcatcaatatcggacaagttactcagattatcaatctcttctccaacagaggagagccggtacagcccttcttctgctcctccactgaatccaccgccattggcatcaccaccgccgccgccgccatcctccaagcaactgagctcgagcccctccagtggctccttcccgaagaaggagtactgcgcggcatcgaaattatctggagcggccgcggaggaggaggaggagaaaggcgcgccgccgccgccatccgactcgacgccccgcatctccgtacaagaaccctagcagcagcagcagcagcaagcggcggcgcgcatctagggggggctagggcttcgtttcttggcaccgcgattcctccctccctcccccgcgcgcggctttggatctgagcgcggctgcgcgaggaggaggagga

SEQ ID NO: 8283 - DNA, 784 bp, Oryza sativa
  Clone ID: PAT_MRT4530_14801C.1
ggccgcttttttttttttttttttatacaagaatcgcataatgtacagcttaatttccataaaatttccatgaattcgtccaatccagaagaggctaacatttgctcagggtttcatgcagaattactgatacatctaaccatcacacgaggttaactgcaactacttcattcaaatgatccagtttaaggctgcaactaataactactgtacacaaacttacaacaaaggcaggcagccttaatcctggtaaaaagtatatgatgcaaccagagtttccccctaaaaaaatgtttttgagcaaagagtaacctggaggcaagaaataaaatgacaacaaattgtaaccatgtataaataagagataatatagccccagtttccagtatcctcactatagtgtcagtaggtacctggaaacactggccatctccatgacattttaaatatctttccagaaacctaacaaacatcaccacttcattatccccaacacacttttgatcctaattaaaacatgataagaccagactactacgcacttgacgctaggaaccttccacactagtaaaaagacagacaggaaggcctcaaagtaccagagcctgtacaaccactgctgctaaacccactagtcttggatgtcttcttcactgggagcatatgaatgttatgttaaaagctaaaattcgccccaacgagacggctagttcatcccttatgaaggggttatgcatgtctccagatataaaagaattatcatccaaagacaagcacatttaag

SEQ ID NO: 8284 - DNA, 1448 bp, Oryza sativa
  Clone ID: PAT_MRT4530_14802C.1
atggacaccgacgggcgcctccgccgcgcgctggcggcgttcgggggcggggccgacgtgtgggacctcgtcgatgccgccctcgcctcggcggcgcgcgaccgccccgcagagctccgcgcgcgccgcgacggcatcgtggagcgcctctacgccaccgccgccggcggccgctgcgggaactgcgacgcgccgagatcggccgagcccgaggcggcggcggcggcggcggcttccccggcttcgcccgatgaggatgccgacgtggacggcctcgacgacgacgagggcggcggcatggagagcaagatcctggcgatcagggacttcttggaggaccccgaccagtcggaggacgagctggtcagcttgctgcagagcctcgcagacatggacatcacctacaaggctctccaggagacggacatcggccgccatgtcaacggcctgcgcaagcacccgtccggcgaggtccggcagcttgtgaagctgctcgtcaggaaatggaaggagatagtggatgactgggtgcggctgcacaactccggtggcgacggcggtagctcggttctaactgatggtgactctcctgataaaatccaaggcaggagctaccaaaatgctcaggtttcagacttcaagtattctcccagcccacagagacataatggtttgagttcagagagatctagcaataataatggcgtcgaatcaatgattgagaagcgcagaacaagcccagcacctacatatcataacaacaaacagaacaacagcatcggctattctactacttcctcctctgctccagttaggactgtaagggagcagaaagataatcttatggatcttgagaagcttgattctgccagaaagagactccaggaaaactaccaggaagcacaaaatgcaaaaaagcagaggacaattcaagtgatggatatccacgacataccaaagccgaaaaatagaaacgccttcatccgcaagggcggaggcggcctccctggaaagcaccggtgattatcctgcagacctacaattgtaatttcaaaaaggccgaaacgagaataaaagaagaagaatgaaggcttgatatttgttttctgggtattgtactatcgtttttacattgcctatttggtaccctaacgtagcctcacatcttccagttcactgtaatattgtccagttagtacatgaggctatgcgtctgggttcccttaccaagaagaggagagcaaagtttatagacttacagtgctcgtttctattgtaatttcttcttcattttgaatgtagcttgtttacaatgttgctgccgtttttcgattaataggtaggtattgtatgtactcatcaatttgactgtatatttgttcgttacaaattaaagtgatattaatatataacacaatggtatcacatggacgaatttaggaaaacca

SEQ ID NO: 8285 - DNA, 3702 bp, Oryza sativa
  Clone ID: PAT_MRT4530_14803C.1
ggaccaaaccaaccttttttgttcgcacaaggttaaaagccgaaatcttgggccattctgaccattcgttgattggcttaattacaacaaaccctaaccatctataactaccagttattatgctccctgtttccagtatactcaccctactctcagtaggtacctgcaaacaccggctatctccctggtatctaatatatctttccagactccaaacaaacatcagcatttccttacatctaaaacactttttatccttcctaaaaaatgatactactaaactgcacttcatttgtccctagcactatgcctctaaccaaaaaagacaaacagcaggctctgtacgtagctgagccgctagacaccttgcagacaagtaaagcaacctagtagaatgacatcaaagcgtaacaatgtataaataagagataatatagccccagtttccagtatcctcactatagtgtcagtaggtaccttgaaaaaaccccgccatctccagtgacattttaaatatctttccagaaacctaacaaacatcaccacttcattatccccaatcacacttttgatcctaattaaaacatgataagaccagactactacgcacttgacgctaggaaccttccacactagtaaaaagacagacaggaaggcctcaaagtaccagagcctgtacaaccactgctgctaaacccactagtcttggatgtcttcttcactgggagaatatgaatgttatgttaaaagctaaaattcgccccaacgagacggctagttcatccctgcatagtgttacaacagtgcatgtacatatgcatatcaggtgggtgctatataaatgacccacagaaaggagattgttggtctatgagattaatctgaagcctaaagtcacaatctgaaggctattttttcctgagcaaatggaactttctccaagctcacacaaccttaccttatgaaggggttatgcatgtctccagatataaaagaattatcatccaaagacaagcacatttaagtcctttaagcattgacaatctacactttttggcatcttgagctaaatcaaccaggaacagactcggaggtgatgtgcccaccatttgcaccgctggcattaaaaccagtcactggcatggttcgctgagcaaaatcaagcagcagctggcgttgctgatcatttgtatgagggaggcttgcacgtagcaactcaaccggcatctccctgctggttgctttggagacctcagatccaattacagagcctggtgactgcatggtaaacatctgcctaatactttcatacttgctgagacagtattttgtcagaagtccaaagaaagcatcaaatgatgcctgccagagagtccggtttgacactgtatagctggctgcggcatgctggtcagtcagtaactcagttgctcgatccagtactgatttaataataagagaagccccatcaccagcagagctagctagaggacgcagaggtggctgctcaggtgaacagaccacagcagcaaggcaagcactaagagcacctagttccatatggcgcacacaagatgaaagagtctttgcaagagtaactgttgtttctgctgcactagaatctgatggtaaacccccgaacaagtacctcagatgtcgaaaaatagccatgcatactatacgggtcaactcacttccaggggtaagaagtcgaaggtaacgtgacaaaaacttgcgtcctttaggaagagaaacaatgcgaagaaaaacaagatcatccttagcagccaatccagatgaatggcttgatgtgctcggcccgagagggtcaacaagctgaagtgatgcagctaaaccttcaaggaggacctgccgtcttcgcctcagttggaaactgttatcctgtgcctgactagactgcaacagacggtcaatatcatccacctcaagaagaaggcagagggcatcttcaacagtgactctagcggccagcattggttctttctccaatggtctcagagaagacttctgatcatgagaaccatcacttgatgaaggaaggtcaacttcaagaagagaacgaggcctacgtatggaagagaaggaaactcttcctacagcatcaacctgaagatatgcatgatggtcaccactggatcgggacttggaaggcaagtctttcattgacgttggggcaaaattggcctttggcctagaattggcaccccttttcgcgatgcaagcttggtggtaataatcaaccacataaggatcactgctgtgacttgctgaatgttgcattcttaagatagattcgatctcttcagatgacatgtacttagatctgaattttattcctccactatcaccattttgattaccagtatcaggcaatggttgagaaaaacgtatgttgtgttttcctcttcctgaccttgatctcttgtctcttgatgaaggaacactgctaacagaatcaaatcttcctgttaattctggggagtgatgttggtaaaatatgtgaggtggtaaatttaggtaattctgatgggatggttggacttgaacttgtgccaatctctgctgctgttgagaaaataacagtgatgacatcgggctatttggaagtgatatttgtttctgtaacatgttcggcagtagattaaattgctccccagcataaagattggcttggcttggccaatcattttgcattggattgtttacaggcagatttgaagtgccgaaggacatgctccctccatacggtagtccatgagatagtccagctatatgatatggagaacttggaagggacatgcttggagaacccatttgcaggccagcaccaagtgatggaatgctcccatggcgtgtaaggccttgagaagtataaggtgatctaccacctggcggtggaaaggacgtaaatgaaggagattttggtggaatgataggttcacttgcccggtgctgcagtggttgctgaggataggaagatgttcggctcaatggtttggcatccccttgctgcaccagagtgtgtgactgtgaccaccatcttttactttcctgaaattcctcatcctctaaaatgtcttgatctacccagttaggaaattctacatcttcagcccaatcaacagttagagaacttcctcttgagatggatcgtctgtcaccaataacaccaggattccgtgttccactaatggttcggttcaactttgcaaaagtgctcgcaagatcatcaatatcggacaagttactcagattatcaatcttgaacattatcgatttcactgtcatatcctcttctccaacagaggagagccggtacagcccttcttctgctcctccactgaatccaccgccattggcatcaccaccgccgccgccgccatcctccaagcaactgagctcgagcccctccagtggctccttcccgaagaaggagtactgcgcggcatcgaaattatctggagcggccgcggaggaggaggaggagaaaggcgcgccgccgccgccatccgactcgacgccccgcatctccgtacaagaaccctagcagcagcagcagcagcaagcggcggcgcgcatctagggggggctagggcttcgtttcttggcaccgcgattcctccctccctcccccgcgcgcggctttggatctgagcgcgcctcgtgccgaattcctgcagc

SEQ ID NO: 8286 - DNA, 427 bp, Oryza sativa
  unsure (1)..(427): unsure at all n locations
  Clone ID: PAT_MRT4530_14804C.1
gcncnntcccgcacgttgcggcatcggactgacaagctttcacctcgtgtatcgnccgttccctgggggcgcgaaccaccgcacagactccgcgcggcggcgacgcagtcgtcgagcgcctctacgcncaccccccggcggccgctgcggaactgcgacgcgccgagatcgccgagcccgagcagcggcggcggggcggcttcccgcgtcgcccgatgaggatgccgacgtggacggcctcgacgacgacgagggcggcggcatggagagcaagatcctggcgatcagggacttcttggaggaccccgaccaggtcccttcaaagatccccatctttacccgctttggcagtgtaggatcggaggacgagctggtcagcttgctgcagagcctcgcagacatggacatcacctacaaggctctccag

SEQ ID NO: 8287 - DNA, 711 bp, Oryza sativa
  Clone ID: PAT_MRT4530_14805C.1
atgcggcgccgctgccactcacctcctcctcgccaccgcacgtcgtcgagccctcctcaccgctgcgtcgagccgctgcaccgccgcgcgccgttgagccctcctcgccgctgccgctgcaagaacaaccggcggcggcgggcgggcggattcgtgtcccccaacctcgtggaggctagatccgacacccagcagtcgggggacggcggccgtggcgcccggcggtcggggaggggggcgaaggaggcggcgacctggatctggcgtggtggaggcaggaaggaggaggctacccggatctggcgtggtgcaggcgggaaggaggcggcgacccggaggcggtgggcgaaggagctgacgacggggcggcggagagacggcggcggcgaccatgaggctgagggcgaaggaggcggcgaccttcggaggtgggcgaaggaggccgccgcctccgcctctggtccccgccgatggacgatggacggcgccgcgccgctgctccccgagacaagccccaagagccggagagggcgaagaggcggacgtcggtcaccacgacgcggcccccgcacccgccggcgccggtgccgtctccgcctccgacacaggtcgatgaagagagaaagggttgagagggagagagagatggggggagtggttgagatggataaggatgagccggtagtagaggataaggatgagccgggatga

SEQ ID NO: 8288 - DNA, 2730 bp, Oryza sativa
  Clone ID: PAT_MRT4530_14806C.1
atgcagagggcaattgcagtggaactcaagcttgatgattcggtaattgaaattattgataagacagatgaggaggatgattttaagggagtggatgaaggctctagaagcgagataatgagtgttgcagaagtgattgatcaagtcctcagggatcacaaatttatggttgcttttcataatggaagtggtgattacattgatttaggtagctttgggttcccgcaaattacactatttcgttccaatctaatattatggacctttcggaagaggttccaaggaagggagcgttactctgagataaaagacaaagtgaagaacacccatttattcgcatttgaaacagagtattatataacaagaaacaacattctcttcccagtactgcaaaaagaggctgctgccatagctgcccattatccttgcatgcgggagatcgacccggaaaggatcgtgcattgctgtctatatggactatttctctatctttgtttgcccaaacatttggagaatgagtgggcagcccgagcatcagtgtactggatgtgtgatggcatcatacaaggtgatcaggcatgggagataagcgctgcactttcaaaagaaataaagtgggatctacaaccttctttacaagatgaggtgcgtcaagaattcatagaatcatcctcaaaaaactctgtaagtatccagagattcaaaaacagatactttgatgggcaaaagttttacccttggatcacaatcactgcatcaaataatattaatccagaaacactacaggacatccgatccaaaaatgcagaggcatcgtcttatttcttggctcctgaaagatccagtgatatcacactagtgttatctgatgggttgtttgaccaatggaacaacctccaagttctgcagttgtcatattgtgacttcagctttgcatcaccaccttttattggttgccagaatctaagatttattgggcttgaccactgtaaagataaaaaagaaggatgcaaacaaagtgacctaaggaagtggcagtttctccatagcttattagttttggatctcattgacactatctggtaccaagtattttccgaagacatggcagatctttttgttaaccttagggagctaaatatagtaggagtttattgctctcacatatggggccagctacaaaataagattgaatatgttgatttgtctaggaaaaggaatataaaacttccttccactctaagattcttcaggcttgatgaccgtcaacctacaccgcagtccacaccgggcattgaattatcgctaaaaggttgcatgggattggaaagtttattcctgagtcgaatatccaacctcacggagctggacctctccggaactgcaatcaggatacttgacttcacagctatggtggtggaagtctcaggtttgaaacgactatttctgctaggatgcaagcaactccaagcaataaaatgggacaatagtggttcaacgataaagccggacctagagttgttgtgcgttgacacaaggtctagaagtaaatatcctcagttatttgttgacaagaataaatcccccggtttcttgtcagtccatgctgttattgtggacgcgagaattgctcggtccttatgcgctctaatagagaactcatatcatgttgatatgcatatccatgtcacctcttcgaccatatatggtgaagttcaatccgaaggaacctacaaagatagcattagccaattaagtgatcatgtgaacatgcagcaacaagaccttatttcagcaggccagtaccatgatgtccaacttagcatggttggcgatgtcccaatgcagtcattcccccttcctccgacaacaatgttgagccgccatatcgagattgcacaggggagccacaacctggagagcgagctggatgatgattcaccgattcttactttagctcatctagtgcaggggaaggctgagtcactgcatgtgcatgatctctcaaccatcactcctttgcccggaggacaatggtgctgtctcaagtggtgtcgtatagagaggtgcccgaagatagaaattgtcttccctaaacacgcatggaatttctacggtctggaaaccgcctgggtgtcggatctcttgatggcccgttgcatctggagtaaaggttctctccagtacagtggttccttccaaaatctgcagcacctgcacctgcgcagctgcccaaggctccagttcgtgctcccggtgtgggcctcctccttcccggacctgaaaaccctccacgtcatccactgcagcaacctccacaacatcttcgtgctggacggagattacccagagcaaataaccgtcgaaggtgtagcattcccgaagctaaccaccatccacctgcacgacctcccgatgctgcggcagatttgcgacgtcgagttcaagatggtggctcccgcgctcgagaccatcaagatcaggggatgctggggcctgcgccggctgccggccgtcgctgcggatggaccgaagccggccgtggagatcgagaaggacgtgtgggacgcgctggagtgggacggggtggaagccgaccaccacccttccctcttccaggcgccggtgcactcgcgctactacaggaagaagctgcccaggggctccgtcctcagtggagatttcattacgcaaatgaaagcatcctgcttctgcactaaagtgcactaa

SEQ ID NO: 8289 - DNA, 461 bp, Oryza sativa
  Clone ID: PAT_MRT4530_14807C.1
tcccctcgacgtcgcctttcgctctccccccgtggtcgccgtgcgccatcccccgccgccgccgtgcgtatctggcgccggtcccccttcccccttcttcgccctcccctcgcggcggtggcgtaaccgacgccggtttccccctcccctcgtggcggcgtctgagtcggctccggtgctcccctccctcttccatcccctttcgacggcgtcggggatggcggcaacgccggtggtggtggcggtgtcaggtgcgggtagaaaggagctggtgactggcggggacaaggcgtcccgatctgcactgactcgatctgcgcgagacaaccccgcgccggattgaatagggtatgaggggagaggacggtggcatgggaggatgaagaggacaacgccgatggagaaaggggtgaggttgcccggcgggggatgctggccttcaccgacgcgtggctcccccc

SEQ ID NO: 8290 - DNA, 104 bp, Oryza sativa
  Clone ID: PAT_MRT4530_14808C.1
atggccatgggaaaaggatcggccgtccaagctacagcaaacctgctgaaatccttcagcgagaaagaaagaataactggaaatgagtacaagagactccaaaa

SEQ ID NO: 8291 - DNA, 355 bp, Oryza sativa
  Clone ID: PAT_MRT4530_14809C.1
cgcagcgcgaggactttatgaatgcgaatggctagagtcaacgagctctgcagtgccagcacttgctggcctaccgttggcgtggacgcgttagagccatgcatgcatgcgccagcctattccagtagcaaccacaaatgcttcggctatcatgccaagagctggtgtctaagctcgaaaagcttcttttgcccgtttcttgtagaagcgaaaggaaagagtgtcaagggtagctccatacccatcctcaaagagttcactagagagcaatgacaccattggcaagtccaggtcttcgagcaaattatggtgcacggacatcaccccttttaacaacaactgtgaggactaactg

SEQ ID NO: 8292 - DNA, 2553 bp, Oryza sativa
  unsure (1)..(2553): unsure at all n locations
  Clone ID: PAT_MRT4530_1480C.1
atggcgcggtcgagcgcggacgacatggagctgaagcggtcgtgcgaggccgggatcctgagcaaggagaaggaccgggagacggtggtgatgtcgatgcgcgtcgccaagggccgcggcgtctggggcaaggccggcaagctcgcctcccgccacatggccaagccccgcgtcctcgccgtcaccaccaagaagaaagggcagcgcaccaaggcgttcgtccgggtcctcaagtactccaatggcggcgtcctcgagcctgccaaggtgtacaagatgaagcacctctccaaggtggaggtcgtccccaacgatcccagcggctgcacattcctcctggggtttgataacctccggagccagagcgtgtcgcctccccaatggacgatgcgcaacaaggacgacaggaaccgcttcctcatgtgcatcctcaacatgtgcaaggagatatacggtgccattccaaaggttgttggcatggacgttgtggagatggctatgtgggcaaaggataataccacagtaaaggttactcaagtgagcacgaaagatggacccatcgaatcactagtaggagaggctgactcgcaagttgccattcagaaagacttggtcttacagacggaagatgaggatactgaggctctccttgacacgtatatcatggccattggtgaagcagaggcattttcagaacgaatgaagcgtgaactcgtggcacttgaatctgcaaatgtttatgcacttatggaaactgaaaccgtgatagaagaggtattggagggcttagaaatagctagtatatgtgttgaagattttgatgaatggcttggtattttcaatgtaaagcttaggcatatgagagaggatatacaatctatagaatggcgtaataacaagttagagctacaatctgatagtaatgtggcattgattgatgagcttgacaaaatgctcgtgctcctgcaaataccacctgagtatgaggcatctttaactggaggttcattcgatgaaggcaacatggttaagaacattgaagcttgtgagtggttgaccagtgctataaagaacctagaagcatcgaatctggatcccatatacgtgaaattgcgtgctgtaagggagaaacgtgcagaatttgtacttctaaagtgcacatttgtgcggagggcatccgagtttttaaggaattactttcccagtttgattgattttatgctaaatgacaaaggcaacttctcacagagagggcaactccagaggcctgaccatgctgatatgaggtacaaatgcaggacatatgcccgacttctacagttcatcaagaacctggacaagagctgtttgatgcctttacggaaatcttactgccattctcttaacttgttaattcgacgggaggctcgtgagttctccagtgaactccgtgctggttcaaaggcatcgaagagcagtacaccattatttgagggtcctgcaagtgcaaaccagtcgattagtattaccgatactactgcagacgcatactgcaaaatgattacggttttcattccactgcttgttgacgagagctcattctttgcacattttatgtgctttgatgttgctgcgctagctccgtcagatgaatcagataacaataatcctgttgctgtttcagaacctcctggaagcagtgccaaaccaattaacagttcagctgagttgggagtactaaaccaattccttcaagagttgcttgatggtattcaggaggacttctatgctatagttgactgggcattcaagctagatccattgagttgtatatcaatgcatggcataacagatcgctatctttctgctcagtttgttgatgatgcctgctaccagattgagaagtatgagcgcaatgtgcggcaaattggagttgtaccctatattccgaggttctcacaacttgcagcacgtatggagcagtatataaatggatccagggatctagttgatcaggcctatacaaaaattgtgaccattatgtttgtgaccctcgagaaaattgctcaagtggaacctaaatatgttgacattgtactattggagaattatgcagctttccagcacagtctgtacgatttagcaaatgttgtaccaacacttgctaagtattatcaccaagctagtgaagcttatgaacaagcttgctcacgccacatcaatttagtcatatatatccacttcgaaaaattattccagtttgctcggaaaattgaggaactaatgtacaacatgagccctgaggagatacctttccaagttggaatgtcgaaggtagacttccgtaagatgttgaagtccagcttaagtggtcttgacaagacaatcaatgcaatntatagaaaactacagaagaatattacggctgaagaattacttccttctctatgggataaatgcaagaaggagtttcttgacaaatatgcaaccttcctcaaattgatttccaaaatatatcccagtgaaacagtaatttcagtgaatgaaatgaaagacaccctagcttccctgtga

SEQ ID NO: 8293 - DNA, 1836 bp, Oryza sativa
  Clone ID: PAT_MRT4530_14810C.1
atgtccgccatgctcgtcgccgaggccgcctggatgggcctcgccagcctcgccgccgccgccgccaggcgcctccgtgggtacggctaccgctgggagcccatggccgcgccgcccgacgtcgaggcgcccgcgcccgcgcccgcggagttccccatggtgctcgtgcagatccccatgtacaacgagaaggaggtgtacaagctctccatcggagcggcgtgcgcgctcacgtggccaccggaccgtatcataatccaagtcttggatgactccactgatcctttcgttaaattttcattagtacaggaattagtggagcttgaatgtaaggaatgggccagcaagaaaattaatatcaagtatgaggttagaaacaacaggaagggatacaaagcaggagccctgcggaaaggcatggagcatacatatgcacaactgtgtgactttgttgctatcttcgatgcagatttcgagcctgaatcagacttcctcttaaaaaccatgccatatcttttgcacaatccaaagattgcacttgtgcagacacgttgggagtttgtgaactacaatgtttgcctgatgacaaggatacagaagatgtcactggactaccacttcaaagtggagcaagagtcaggctcatttatgcacgcattctttggtttcaacggtacagctggtgtgtggcgcgtatctgctattaatcaatctggaggatggaaagaccgcaccactgtggaagacatggatttggctgtaagggcaagcctaaagggatgggagttcttgtatgttggtgatataagggtgaagagtgaactcccaagtaccttccaggcctaccgtcaccaacaacatagatggacatgtggtgctgccaatcttttcagaaaaatggcatgggaaattattacaaacaaggaggtatcaatgtggaagaaatatcatcttctgtacagttttttcttcgtacggagagccattgctcccatcctgactttcttgttctactgtattgtcatcccattgtctgccatggttcctgaagtcactattcctgtgtggggcctggtctatattcccacagccattactattatgaatgccatcagaaatccagggtcagtccatctcatgccattctggattctatttgagaatgtcatggccatgcaccgtatgcgtgcagctctaagcggtttacttgaaactgcacgtgcaaatgattgggtagttactgaaaaagtaggtgatcaggtgaaggatgagcttgatgtcccacttcttgaaccactgaagcccactgaatgtgctgaaaggatttacattcctgagctcttgcttgcgctctatctccttatatgtgcatcgtatgatttcgttcttggaaatcataaatactacatctacatctacctccaagctgttgcattcactgtgatggggtttggctttgttggaacaagaactccttgttcgtagcttaccatttaccatttgagattttttttctcctatgacaagagccagtattttgtgtgcaagaaggatgatctgatgataggatatacaaaattgggttaaatgatctaggctagagatgtgtatatttctaattgatgcagaatgggagagatgacttctagagttccaacctcccagtagtggtaggatgagccaccagctgtatctgttttattcaggcataatttgggaaattacgtcctgactaactaataatcaatcagtttgattcagcaaaatttttttaaaaaaaaaaacaaaaaaaaaaaaaaaactcgagactagcctcgtgccgattcctgcagcccg

SEQ ID NO: 8294 - DNA, 315 bp, Oryza sativa
  Clone ID: PAT_MRT4530_14811C.1
agacactaacagggattttttatttattttattataaaaaggttacttaggggttaaaccaaaaaattgattgattaaccccgccctttaacccggcctaattaccgtttcaaaaaaaaccaatttaatcgccaacaaacgggtggtttttaattcgtccacctaattacaattaaaaaaacgtagccccaggtttagctttaactttttttatgcaacttttttagtaaaaatccaaaaaaaagcccggtgtactacataacatatggccataatttacacagtggctagacaccttatttttatgcaggctta

SEQ ID NO: 8295 - DNA, 357 bp, Oryza sativa
  Clone ID: PAT_MRT4530_14812C.1
tacagaaccaaatagtacagggaatccatttcaacagaaactccaaaatgaattctctctagcatcggatatcgagatgccactgcaaatgtctaagcaaaaaagcaaatcaagagtgaatggtagttttgctgcttttgagctttcaaaagcttcaggggaatcaagtggggcaaaaagctgctgatgcaaaactctttctgttcttgcttcattggctaataaagtctatagtgatcaaagagttccagcagcctttaaagtcccttctggtgctgtgataccaattggatcaatggaggatgcgctcaagaaaaagggatcactggaattccttaacagcccttctagaaaaga

SEQ ID NO: 8296 - DNA, 396 bp, Oryza sativa
  Clone ID: PAT_MRT4530_14813C.1
atgacgttctatttgaagccaccgaggcggcgagaggcaatcgcacgtgggggccggagcgcgacccgggtggggcccgcgcggcatccgacgtggcccccgcgccggcgctgctactactactacgacccagcaaaccttatcgccacagggccacgggccccacggccgcgtttccttctccaggatcaggccgacgtgtcggtttttggattggaagcaattgatcatctactcccccgcgacgcactcttcgtcttcgtcttctcgtcctctccggtggtgatcggggaactcatttgctcctcctccggcggccagcctccgctcgtcgccggctcgaagatcgccccgcttccgcgcattgtgcgctgcctcaccgggtgcaagcgctag

SEQ ID NO: 8297 - DNA, 447 bp, Oryza sativa
  Clone ID: PAT_MRT4530_14814C.1
atggccacctccagccgcgtcgcaacgccgcttcggtccttgccgacccgcgtcgtcgccttcctcggctccgcagggacggggagatccttggccactggccctcttcgccggaaatccgcccgagctccacctccctcgtcgccgaccgaggccgagcccgtcccccccttcctgagcgacgcccgtcgccggagctccgtcgcgccgtcttcccgaggagccccgctgccaccgttccttgccgtcggccgcccgtttgccgtcgtgacgctcggcggcggccctgtggccatccttgggtggcgggctttgaccctggccggtgcccacccggacccctgtggcccgccgatggctttggccgatccggccgtgggtcccgtgaccggcggtaaccgcctcggtgtcccggtccacggtggaccggcgcccttgtgcccctga

SEQ ID NO: 8298 - DNA, 411 bp, Oryza sativa
  Clone ID: PAT_MRT4530_14816C.1
ctgctgctgctgtgctcgcggctcccccgcgcccctggcatctgtgagcttttgcttccaatcaacactcctttttgtggtgagacgaggagctgagcttcagctgctgctgtacgagcgcaaaagctcagctcaagaacagatagaggcatcagcagcagcaagatcgagaggataacaagagatctcgtgatagtacttacgtttcgttgctcgatcttttttttcgccatggattgggacgccaagatgccttcctgggacctcggcacggtggtcggcccgagcggtggcggtggcggtggcggaggaggaggcggcgcgcttgacctcaagctcggcgcgccgacgagctggaagacgacgacgacggtgtctgctgcgtcggctgctccggcggcggtggcgcca

SEQ ID NO: 8299 - DNA, 339 bp, Oryza sativa
  Clone ID: PAT_MRT4530_14817C.1
ggttaaaaaatatttttttttttattattttttttgattattattttttttaatgaaaaaaattaatttttttattttttttttttgaggaaatttttttaatcttatttttgtccggagaaaaaaaaattgatttttggggtttaaccgggaaatataaggtgggtgaaaaaaaaaatgactggggtggttaccttaaagcgggtaatccccggttgatattgttgttcgcgggagaaaaaatatataaaagaccgctgggcttacacccttagttcaagaacaacccctcgccgctttattactccgagaaaaacaacaaccaagattgctccaggg

SEQ ID NO: 8300 - DNA, 683 bp, Oryza sativa
  Clone ID: PAT_MRT4530_14818C.1
ccaagccagctctcaccaccggcaacgattccggcgagcgctcgctcgcgacgacggcggcgacaatgtgcgacgagtgctgctgcacctgcagcaacaactgtagggacgggctcatcgtgtgcggcatcgtctttggcaccctcctcctcgccgtgctcatctccgcgttcggcttcgtccgccagcccaccttcgtcgtcgacgacgcctccctgacgcggttcaacctgtcggcggcggcgtcgtcgatcgcctacaacctcaccctgaagctggtcgtccacaaccgcaactgggcgatgtccgtcaagaacaccaagcccatggacgccgagtacaagttcgacggccagccgttcgagcggatccagctcgccgacaagggcgacaagctcggccccggcaagacggtggtgcaccggctgtcgtccggcagcgagggcgcgatcgtcccggcgctgggcaacgccggcgcccaggagtacaggaaggagagcgccaaggggacgttcgaggtggaggtggcgatcgccggcgaggtgaggtacacggcgaggctcaccaagtgcaagatcgaggcgacgtgcccgctcaagctgcagctcgcgccgccgggcaccacctccgtggcgttccagaaggtcaagtgcaagctcaccaagccggagaagaactgctag

SEQ ID NO: 8301 - DNA, 777 bp, Oryza sativa
  unsure (1)..(777): unsure at all n locations
  Clone ID: PAT_MRT4530_14819C.1
cttgcatggatatagtagctttgcatgcgctgatttattcattccaagtcctcatcattgggttctggctaagctacatttatccgttctgcacagaggcagacgatctgtgctcaagagacgtgctagcccacaacaattgccaacttggaggtcgtttgcagaggagagctaagctacagaaagaaccaagggtggagaaacttcgccaatcaccaccgacagcgctctccaatttcttttcccaaatcatgagaagtaaatgaacatattcttggtcgttcatcggaagatcctacctgcgaggcttcgcccctgtatatactcagatgatgccccagcggataggtgagtggggtgtatgtgttttggtcaaccgatttgaggaacagaagggatagtgtaactagtggttattgtactaggtattcttttcctgtgtctagattttgtttttaccatgttggaaaagtattggagtggccaaaggagtaaacttattggatggggtccatctagttgttgtataatagctgtctcacctatttgtgttatcacgccttcctcccatttgtaatactacctgtctctggtgctgacatgatgtacaatattatccttgtcgtcagaattttgtgtagtgtacaaaagttggtgaattgttataaaaagagagaaagagaaagagggcggcnncgcttctagaaggatccatagtcttacggtacgcgtgcaagtgcgacagtcataagtctcttactataagtgtcaacctaa

SEQ ID NO: 8302 - DNA, 483 bp, Oryza sativa
  Clone ID: PAT_MRT4530_1481C.1
atgccgacgaggaagggggtagcgctagacgaggcaacaccaatgaggattagacggtgcgggagggcggaagacggcgcggcggaaggtgtcaagtgtggagccgcaacgacccgtacgcagatcggttacaacccccaatcctccactgtctctggactctctctgcgtccgcttctccaaccgccctcgcggtcgcggcgcctcccccgtccgcaagcctctgtgccgctatacgcgcagcgtgcgtcgtcaagtctccctctggcgtcgcgcatggcgcggacagggtgcagtgacatcaagaccttttcgtacgccgattcccaaactcaacggtgttccctccttcctacggtcttacccgggcgtttcgctgtatcatctgttgtacgtgaaaaggcgtggtcaggcctggacgctggggaggctttcgaacagaggaagagttcccgcctctccgacgggatgatggagccctga

SEQ ID NO: 8303 - DNA, 379 bp, Oryza sativa
  unsure (1)..(379): unsure at all n locations
  Clone ID: PAT_MRT4530_14820C.1
atactctcactgcaatttctggagctcacactgcatgcgccggccaataatgggcgacgacgacggcganggtgcttcctcctgcttcaacggttggcgggctttcttgccttcttgccacaaccaacttgcccaaggaggcgggcgccgccgccgccggcccgttacttgcgggcangccttganggaacgggccgtngganggcgcgggaacatcatcgggtggaagacggtgccgccgccgttcgccaagtacgttcgccgacttacattcaacggcgancggtacggccgcgaagccgacgttgtgattcaaacgaaggccatcgcttacnccgagaagcttcaagctcttcggcaaccgggcaaggagatctng

SEQ ID NO: 8304 - DNA, 299 bp, Oryza sativa
  Clone ID: PAT_MRT4530_14821C.1
cccacgcgtacacgctgggcatcacggcgagcatctggcccgaccagcgggttctacagtcgctgccacacgggctgctggccaggtacgtgtatggtcatgactatcgggctaagctgcaggctaagccgcaccctatgactcccgctctgcttgtggctttactgctcacctaatgacctggtcttatctggaggcctctcaagataccgtatcaagtcttgcatgacgtccgacagacgattcagaggatgttaaggaagatgttatatataaagaggtacatgaaatggtgcccg

SEQ ID NO: 8305 - DNA, 350 bp, Oryza sativa
  Clone ID: PAT_MRT4530_14822C.1
ctctggtatatgtagttcttctatcccatgtgttttagagagatgccccctttcttctcgtactttcaaagtggactatggaattttgagctaaagattaaaggagctattgtcttggattaggaattttctgctttcatcctgagaattgagagatttaaactagtaaatcacaaaacttccaaaattggttcaagttctccaagaattcaccatagggggggtggatcaatacctgcttttattttcctggacatggatcctgtcacctccttcatcagtagcctcaaacaactaacttggcctggtttcaagtgtttccacactactgctgcatgccagggatggat

SEQ ID NO: 8306 - DNA, 140 bp, Oryza sativa
  Clone ID: PAT_MRT4530_14823C.1
atggacaaccgcgtccacgagcatgtggttgagaccacggtgcattggacggcgtgcgtgtcgagccaccgaggtcccgccactcatcggattggattcgtgcgtgccgggccgccgaggtcccgccatgcgttggtgtg

SEQ ID NO: 8307 - DNA, 441 bp, Oryza sativa
  Clone ID: PAT_MRT4530_14824C.1
cggcccgcgggcacactgcaccctgctcttaacccgtcacctcactgcgccgagctagctagtgatagatgagctcattgttgagctgctcttcttgattgctttgccaccattgcacaccggtgcccgagaagctagcagcagaaacaaagacgagaggttgatcttcatcttcatcttcatcaggggatcgaggagggcgggatgatgctgaggagggtggcggtgtgcgccgcccgacgccggggacgcggcggacgggaagccccgaggcggcgcggcggcgctcttcaaggtgccgcggctgctggtggggatggctggcggcggcggcggcggcgaggccgtgcgagtgcgactcgccggcgcgcagcccgacgtcgccgctcgacctcagggccttcgccgcgcccccgcttctccggtcgccgcggagttggg

SEQ ID NO: 8308 - DNA, 285 bp, Oryza sativa
  Clone ID: PAT_MRT4530_14825C.1
atgttcgtcatagtcgacctagttgcatccatgaggaaagcgagtgtggcggcggactattgctgcttgtacttgtcgccaacgaagatctcctacgaacgcaccatctcctttctccctaagattttcgccgcgaggtcctcgaactacctcatggttgaaaggtgcttgaagttaacgcgcatggcgtccaagcccgaatcgacgacgacgcatgccgacgggcatgccttgggcatccttgtgctcacgaggaagatgagtgtgtccatcaagctagcatag

SEQ ID NO: 8309 - DNA, 502 bp, Oryza sativa
  Clone ID: PAT_MRT4530_14826C.1
gggataaaaattttttaggcgcatggaaaaaaacaaagctgattcttttgtttggttcaggccgccacatacccaggcccagagcaagggagacagacaacacagagggaaagccggaaaggggccacccaaaatcatattcgggcaactctgggctgggaaaggatcgaaacatacgggggaaacatgctacatcggggaagggataacctctggccgaatcataacaacattccaacaaaagctcaaaggggcccaacagggggacccgaacctcaaagatcaaacaaccctataccctggggacgggggcaaaagggagaacttgaagtaaaaaaaaatgggcaattaaattcctatgggggcacctaggggtcattccgaccccggggagttaatagcgggtaatatcactcaagatgctaaaaaagggggggaaatctatcttttcctctccaccatagactggttccgcgcttcctcctgatggcccttgggcagc

SEQ ID NO: 8310 - DNA, 303 bp, Oryza sativa
  Clone ID: PAT_MRT4530_14827C.1
atgtggaactggatccacttgtcagccagtagctgctactgtaaatacattactgcagagaatccatgtccgctcgctcgtcttcgacctcgccgcggcggcggcacgttcgatgacgtcagcatcctcgccatcgacagtgtcgtgttcgaggtgctcgccaccaacggcgccacccacctcggcggcgaggcgaggacttcgaccaccaccacctcaagcgcccaggtgtcacaattcacaaacatcgatggggatgaggccccaagaacccaacaatatgttgagattatgggcatataa

SEQ ID NO: 8311 - DNA, 463 bp, Oryza sativa
  Clone ID: PAT_MRT4530_14828C.1
ctgcttggatgtcgcagctgcatcgctgcagtgtgcccaagcgtggtgttgcttacgcaacatgttgaggcgaatgaccagtgtgcccaggagacacggaattacgggtgctaccgccaaggagaatatgcccacccagatggtggccctgggtgacaggccacggacaaggtagcaatgctccagtgtatgtgcagcgccatgtatggatgacccccatatgctttgttggctacttttatgaacttcaacgccaatatggacacatacgattaagatgggatgatggccaggcttgcatgctgtagttgaatgtgagagatgatcgcccacattgttatgctccatgcatgtgtttgactagctgatggcgtgagatgctggcgtggatcgctcagatcccaatgaaagtgtgggtgataataatgggttgaatgcctagtaaaaaaaaaaaaaaaaaaaa

SEQ ID NO: 8312 - DNA, 309 bp, Oryza sativa
  Clone ID: PAT_MRT4530_14829C.1
atggacacgactcaaaccttcctaaagataaaaacaaacaagtctacatgacagactcttaccatatctctaattcaaaacgacattaaaatcctaattaatagatacagttgccttaaataagctctatctctatacaacaatgatggttatctcaatcgaggcccaaaccgagcccaagttgagctatatcggctgctttccatatcggctcaatcagcacaatctgttttggcaagattcaatctccttcaaatccgcttcggtatccaactccaaatcctagtctatcttgccaaatttcactgt

SEQ ID NO: 8313 - DNA, 642 bp, Oryza sativa
  Clone ID: PAT_MRT4530_1482C.1
gcccgcatgccgtcgtggcacccctcgaatcccgcgcctgcaccgagtgcctgaccacaacggaccacgtcaccactgctcgtacgaagaagcggagacggagacgggcgcgacggatgaggggcacgcgtgcgaagttgtagtagccggaggtgacggcaaggccgcggcggcacgccggcgccgacgtctcgagcatgcggcggcgaagagaatccggtcggtgaaggacgggtcgtcgtctgatgactcgtcgacggaggttgttccccggagctggccggcgtgcgtgtcgcacggctcggtgtcggtgatcgggcggcggagggagatggaggacgcggtggccatcgagcggacgttcatggcttcgacggacttcttcgcggtgtacgacggccacggcgggtcgcgggtggcggaggcgtgcaggaagcggatgcacgttgtgctcgcggaggaggtgagcctgcggcggctgcgggggcagagcgcgtcgggcggcgacgtgcgctggaaggaggcgatgttggccagcttcgcgaggatggacggcgaggtcgtcgggagctcggggttcaggacggtgggctccaccgccgtggtcgccgtcgtgggacgccgccgcatcgtcgttgccaa

SEQ ID NO: 8314 - DNA, 518 bp, Oryza sativa
  Clone ID: PAT_MRT4530_14830C.1
ttcactacaatcgaaaatactttgtatcgaggttaggatactacaacgtaacgaccacacttgacacggcatccaccgctttagtctctatatatcgcatggcgcgcgcgtcgtttgtcgtagctgggcgtgtctacgggatgcattcaagaactggctacttgatccatgcattccagatggacagatcacgccgccggccggctcttgtgtatatatatggacggcgagtggagcgacggggcgcggtgtcgtcgccgacgatgtccggcggcggcgggcgggagcagatgaagggcgttgaggacgtcgctgctgctgattgcccgtggtcgtcgtagtcaccgtcacctactgttttttattattctgtctgcttaattatcattattatcttttattatttctatttctaattctcttattttgtttttttattactactttttttattttattttatttttattttttttttttttatatatttccttcttatatttaattattatttttct

SEQ ID NO: 8315 - DNA, 223 bp, Oryza sativa
  Clone ID: PAT_MRT4530_14831C.1
gctgttcttgagcggaagtgcgatgtgcacaggagacggacgatgaacttatcgaggagctgccagaaccactcctgaggttcgtgacagggcattatccgcttgagaatgacatctatagagtgacactgtcacgcaaagatgtgaaaagcagagtgcagtttattgatgcgcaggaatagtgcagagtgtatttcactgtattgcgattagatttgagact

SEQ ID NO: 8316 - DNA, 583 bp, Oryza sativa
  Clone ID: PAT_MRT4530_14832C.1
atgtcatatgcatttaacaaattgctcccaactacccatttcaggcagtatgctcagaggtctcgtgttagaaagctccagtacattgcagagctcgagagaagagttcaagctttacagacagagggtgtagaagtttctgctgagatggattttcttggtcaacaaaatatcatgttagatttggagaataaagccttgaaacaacggcttgagagtctatctcaggaacacctaattaaacgctttcaacaggagatgtttgaacgggaaattggccgtctcagatcattgtttcagcaacagcaacagcagcagcacataccacagcagcagggtcctacccacagtcgtagtaacagcagagacctcgattcgcaatttgcaaacatgtctctaaaacacggcgatcccaactcagggcgtgatgctgttccaggccttcgcatttagggattcttttcccccagcttatgattctgtgagtttcacatagcttcgctatccctgtcataccactatttgtggtcattagttgcatcaggaggggagcagcgacgatgaacctggaatcacatccaat

SEQ ID NO: 8317 - DNA, 195 bp, Oryza sativa
  Clone ID: PAT_MRT4530_14833C.1
atggagatggttaataactattctccacgggaatcaaatggtcccaaacttatcaccatcggggatgacgggggcgggacgccgtcgtcgcgccgcctggtgcctgccgccatcgtcgcgccgtccgtccaccgtccaccgttagcgccctccctcgcgccgttcgacgccaccgattcccctgacggctactga

SEQ ID NO: 8318 - DNA, 1179 bp, Oryza sativa
  Clone ID: PAT_MRT4530_14834C.1
atggccgcgtccgccgccgccgtggcatccaccgcgccgccgcagccgctgcggccgcgccgggggatagccgtgccgtcgtcatactcacaccgcgcggcgacgcggccgcgcctcgccgtctcggcgtcctccaccaccaccggcaccaccgagacgacgagcgaacgcggcggtgccgagcggttctacttcaacttcaccgggttccccttcccgctcgggccgttcctcaaccgccgcaccatccgcaccgagcttctcaaggagctcgacgcgccggtggagcacatcgtgctgccgaccttcgcctacgagcacaaggtcttcttcgggccattcaccaggaaattccccagggcgcagatatgggtggcgcccaggcagtggagctggccgatcaacctgccgctggagttcttcgggatcttccgggccaagcccctccaagacgaggacgacgacaccccatgggcgggcgagatcgagcagaagatgctcagctcgcctgaagttgggattggaccctatgtggaggtggcattctaccacaagccttcgcggacattgttggtgacggatgccgtcatttttgttcctcggcagccacctgagtgtatcagcaaagagtcgttgctggcatctgccaagaacggcttggcagtgaagattttgagcaaaggaaaagaggtcccagatgaaccagttgtggacaataagctgaaccgtcagaaaggatgggagcgaatggtactgcaaatattgtttcttggtccctcaaatcttctggagccaaacgcaagttttgctcaaatgtctcagaagttgattgtctccccaattgtgaagacacttgttttcagcaaagttccagagaaggtgagagactgggtcgacaggatcgctgcagactggccattcaggaggataatcccagctcacttcgcagctccgattaacgcgaaccggtccgacttcttggctgcctttgctttcctagatgagttcctccccgagcgatctccagcatcgcccggcctctcactcctctttgcctcgctcatgggcaaggcggcgagctacttcccccctgatgacatgaagaccctgtcatccctggacgagttcttggtttcagttggtgctgtcaagaagacagtttcaggcagaaagcgatga

SEQ ID NO: 8319 - DNA, 255 bp, Oryza sativa
  Clone ID: PAT_MRT4530_14835C.1
gacctcttttgatgcagctatataacgttctccctgcaccatattcatggatgaaattgatgcgatcgccgccagtagaaacccaaaggaccaacagcatatgaacatgacgttgaatcaggtgcttgtccagctggatcgctctacccacactgaggtgatcactgttattgctggaggcaacttttttttttttttagataaaggactagtgagacctgcgcgctttgaccgcactaccgttgttcctcaatc

SEQ ID NO: 8320 - DNA, 187 bp, Oryza sativa
  Clone ID: PAT_MRT4530_14836C.1
yccctgagctagctgatgtccttctgcgttcgagagtatcaargcartggacactycctttgacttcagtgrraaagaggttatmactggccaggctcaaagrtgtgatgctcagcatwgtgcawacgwtrctcgggtggctgatcgctgcaccrttcgcamtagctgcgctgtmcaarrttttcmc

SEQ ID NO: 8321 - DNA, 1061 bp, Oryza sativa
  Clone ID: PAT_MRT4530_14837C.1
ctaaccgtccacgtgtccgctgcggcggcccttcctcagccgtgggatcgtcgaatcgggaacgaacggcgtaaatttagtccacccacacgaaaccctagccctccctccccggcctgtctcgcccgcagccacgccgccgcctcgccctttgcacgcgccatggccgccgcatcctcgccctcctccagccatcatcgtcgcgccgctgccaccaataagggaggccgtggcatcagctagtgatggccccgcgtctgtcgcccgcggcgagacgcgctctccgctccggtcagtgcggcgccaaatccacctcggggacatcggctgtctcgctgcggtagaaggaggtggtaggaccattgggggttgaacagtgattgctaggagatcgaggaggataaggaaggagaagagcacagctcagttacggctgccacgacgatagctgctggtcggcgacaactacggcaaggccatcgcccagtgccacacgtgccgctgtacatgtcaccacgccgtcctctcttgctccaccagaatctcctcatctcctctctgtcctcttcaggaatggccaattcgtcactgattattttcttgacgttcatgattcctaacactatgaatggatgagtgacaagtttgacaatgagttttgcctacattatgcatgaatctaaaaagtccacctacataattcatcaagcctacaggtgctctcctacgatatctcacaaggatttaggtactctcatatttctgctagacccaaaatctcatgaacgagtatgtatctgtgttctctatttaacaatgagcgattcattgaagctagaatgctttagatatgataatttgaatcaaggtcgctaattgtggttcaataccaaatggcaatgctggtggccttgctgtagttgtcgaattaactatgaacctatctcagcagctgccaaattcatgaataatttcccccctttttcctgtgttcatatttctatcatttacattccttttgcaggaatttatacatcctacaaaagacagaacaacatagt

SEQ ID NO: 8322 - DNA, 396 bp, Oryza sativa
  Clone ID: PAT_MRT4530_14838C.1
atggcacgcgcgcacgggacgaggcgcgtcggctgccgggagagcgccaccgcgccaggcgcccgtgacgtgcatgcgacggcgtggccgccccgtgcgggacgtttcaaacaaaaacataggcagattggtcgtgcgacgacgtgcgataaaaagtggaggaagcctagactagacgagacaagctgcgtgcgtgtgcgcgtagtggccaatgtgggggcggctgcggcgcagttgatcattagccgcggcgcaatgtcgcggtggattcgctttcctttcgtcgtccggtggaccgcgcgcccatatgcgatgcgccgctgcgcgaaagggaggatcgcgaagagacgtgcggaggacgcgcgcgaagactatcagtgtgggcctgactcgtga

SEQ ID NO: 8323 - DNA, 1194 bp, Oryza sativa
  Clone ID: PAT_MRT4530_14839C.1
atggcggtggcttgtttgccggaggacggcggcgaggtggtcctggtgcgggagttcgacggcggccgcgaccgtcccggcgtcgaactggttgagcgcgcctgcgaggtgggtccgagcggcggcaagctctgcctcttcaccgacctcctcggcgacccgctctgccgcgtccgccactcgccggcctacctcatgctcgtcgcggaggctgtgggtggcccgctcggcacggagatcgtcggcgtcgtgcgcggctgcgtcaagaccgtggcgtgcgggcgcagccagctcttctccaaggtggcgtacctgctcggcctccgggtctcgccgcgccaccggcggcgagggatcgggaggaggctggtggagaggatggaggagtggttccgggagatgggcgccgagtacgcctacgtcgccaccgaccgcgacaacgagccctcggtgcgcctcttcaccggcgcctgcggctacgccaagttccgcacgccgtcggtgctcgtgcacccggtgttcggccacgacctcgcgccgtcgcggcgcgccgccgtcgtccgcctcgacgcgcgcgaggccgagctgctgtaccgccgccgcctcggctccgtggagttcttcccgcgggacatcgacgccgtgctctccaacgccctgtcgctcggcacgttcctggccgtgccgcgcgggacgcggtggcgcggcgtggaggggttcctggcctcgccgccggcgtcgtgggcggtggccagcctgtggaactgcaaagacgcgttccgcctcgaggtgcgcggcgcgccgcggctgtggcgcgcggccgcccgcgcgacgcgcgccgccgaccgcgccgcgccgtggctgggcatcccgtccatcccgaacctgttcgagccgttcggcctccacttcgtctacggcctcggcggcggcggccccgcggcggcgcgcatggcgcgggcgctgttccggcacgcccacaacgtggcgcggcgcggcggggcgcgcgtggtggccaccgaggtgggcgcgtgcgagccgctccgcgccggcgtgccgcactggccgcgcctcggcgccgacgacctctggtgcatcaagcggctggccgacggctacggcgacggcgcgctcggcgactggagcaaggcgccgccgggaacctccatcttcgtagacccaagggagttttag

SEQ ID NO: 8324 - DNA, 1503 bp, Oryza sativa
  Clone ID: PAT_MRT4530_1483C.1
actagtggatccccgggctgcaggattcggcacgaggcgttgctctctctactacgcgtgggacatgagggagacgggcgcgacggatgaggggcacgcgtgcgaagttgtagtagccggaggtgacggcaaggccgcggcggcacgccggcgccgacgtctcgagctccggcggctcgggctggcggcggaggatgatgcggcggcgaagagaatccggtcggtgaaggacgggtcgtcgtctgatgactcgtcgacggaggttgttccccggagctggccggcgtgcgtgtcgcacggctcggtgtcggtgatcgggcggcggagggagatggaggacgcggtggccatcgagcggacgttcatggcttcgacgggggatggtgcgggcgctatcaggggcggcggggagggcgaggaggacttcttcgcggtgtacgacggccacggcgggtcgcgggtggcggaggcgtgcaggaagcggatgcacgttgtgctcgcggaggaggtgagcctgcggcggctgcgggggcagagcgcgtcgggcggcgacgtgcgctggaaggaggcgatgttggccagcttcgcgaggatggacggcgaggtcgtcgggagcgtcgccgccgccgccccccgcgtcgacggcaccgagccgtcggggttcaggacggtgggctccaccgccgtggtcgccgtcgtgggacgccgccgcatcgtcgttgccaactgcggcgactcgcgcgccgtgctctcccgcggtggcgtcgcgctgccactctccactgaccacaagccagatcggcctgacgagttggaacgagtggaagcagctggaggcagagtcatcaactggaacggttaccgtgtccttggtgttttagccacttctagatccataggcgactactacctgaagccgttcgtgagcgcagagccggaggtgagggtggtggagaggacggacaaggacgagttcctgatcctggcgagcgacgggctgtgggacgtggtgtccaacgaggtggcgtgcaagatcgccaggaactgcctcaacggccgcgcggcctccatgttcccggagtccgtctccggcagctcggccgccgacgccgcggcgctcctcgccgagctcgccgtctcgcgcggcagcagggacaacatcagcgtcgtcgtcgtcgagctcaggcggctcaagagcagggcagcttgagcttcgacatcatccgcgatggaggcggcacgtcgctactaattaataagctactagtagctccctgtacattacgtcgatgatactattaatttgggcatcgcgcggcgagacgccggaattaaacggttccggcgatgaaggtttcgattgagaagagatgatcgattctgtggtttgtatagatgtagtagtcggatgtgttggactctcgggtctgataattatagcatccaatgcatgcactgttagatcttcagttaattatttcttgctgcatcgtgcggtgaggt

SEQ ID NO: 8325 - DNA, 222 bp, Oryza sativa
  Clone ID: PAT_MRT4530_14840C.1
atggcttggttttgtggtggcagcgtggtttcagtggctattggggaaaatggagcggtggccggtgtgcagcgcacggcagcgaagccgttggtggcggcggcacagtgcgtgctcgggggcgacggggaggccggggcgagcctcccgctcggcaccttggccctccttgccgcctggtgcaccgccggaggagattggtgtaggagggtggagaggtag

SEQ ID NO: 8326 - DNA, 300 bp, Oryza sativa
  unsure (1)..(300): unsure at all n locations
  Clone ID: PAT_MRT4530_14841C.1
aagcttagcgctaccgtggcacctgagtactacactactagcgatgctgatatctagctcgtcgtatctcattgacatcctcagggtgatcaaacncagccacactacagtacgttgtgctccaatcagaccaagttctcatggggtgctccactgcccatgatcatgtccaggcttctgcgagcgcatcacaacgtcgtactccgccaccgcctagccaccgtggggatgatccactcatagccgatcgactcaagcacctttgagctgtacagcttcttcatgaacttgatccctggg

SEQ ID NO: 8327 - DNA, 826 bp, Oryza sativa
  Clone ID: PAT_MRT4530_14842C.1
aaatttgcacaacctacaagagttggaaatggcggcggagctagcgggtgaaggagacggtggacgacgccagcgggggcaaacacatcagtatcagcatgatgagctatatcaacaatatcggccagaagaatctcaaagacatcaaaatatagaagattgggccgatggaattgcaaaaattagtagaggagcagtttggacttggacctaaggaacatatccatatgtatcggcagccatatcctgagtagttcgatagggttccattaccacactgatacaaggttctagacttctccaaattttcagggcaagatgatgtatctataatggaacacatcagctgattcttagcacaatgtggtgaagcatcgactaaagaggctctgaaagttagattttttttccattgtctttgactggatcggctttctcttggttttcatcattaccatcaaattctatcataggatgggccaattttgagaagcaatttcattactacttctttgctggcatcgatgagatgaagttttcagatttgatatcagttcaatagcaagaaggggaattggcaatggaatatattcaaagatttcgtgacgtctgcaaccgaagttatactttgagtctaagcgatgagcagctagcagatcttgccttccaagggctatcaacacctatcaaagatagattcttttgccatgagtttgacagcttagcttatctaatgcagacagtatcggctcatgaaagccgattggaagaagcaaagaaagatcatatggcccgtcacaggtatctagtcacctcttatgggtcg

SEQ ID NO: 8328 - DNA, 480 bp, Oryza sativa
  Clone ID: PAT_MRT4530_14843C.1
ttttttttttttcatataaaatggcatcaatgacacccttttgttggtcgaaatattttcgtaagcataaagaggaataataatcatgagatctttgcatcttacatcaaatcaaaatagcattctggagatcttgaaaggtctgcaaaaacaatcccaggaaacataactagtctaaagacaactcatctcacaaggtgagtgtttatctttaggttttcttttgttgtgtctgacattctagactagcttctgatgcttttcagtcttcacgtttctccttttctaacttctgaaaatcacaaatgaacatgtcagcatgcgactcagaagctccacaacaacgtattgcaagataaagagggaaaccgcctcaaactgtagataacaagaagctgataccatatagttcatttcaaaacatatttcaaccacacaccatgattaattgaagcagtgatttaaaccacaaaatcatta

SEQ ID NO: 8329 - DNA, 507 bp, Oryza sativa
  Clone ID: PAT_MRT4530_14844C.1
atgccccgccaccgacgccgccgctggcccactgcctcccctggagaagagaaggtcgctggagttgaaggagaaggtctagagtacgaatctcgaagctcatccagtgacctaaaatctacaagatttagagatgcaatttctgtcgacgtgccccggagagagtcccaatcaaaatcgggggcggttgcaacggtgaaacacgtcgatatcaatgaggaggacgtatcatccggtagatccgtagatgcacactactgtttggtttatctcatcaacggatctcggaagattcgagtgcgaggcgtgcgacgttatgatgatgaggcatcttcgtatgttaagcttaagaagttagtggagaataacttcgatcgatcggtcgctacagtgataaacagctgtttcggcgcacaacgctgtagcggatttaccacgatgttgttgtcgtgtttccctgctagtgtaaaagcaggggatctggatcgctacgaaagttcaaacttc

SEQ ID NO: 8330 - DNA, 2870 bp, Oryza sativa
  Clone ID: PAT_MRT4530_14845C.1
atgaggcgggtcgcgccggcgatgatcgccgcagctgccggcggtggcggcgggtacgacggggaggaggcggatgcgggggcggcggtggtggagaaggcgctgccgaatggggatgtgtaccgcggcgggttcgccgggggcgcgccgcacgggaaggggaagtatgtgtgggcggatgggtgcatgtacgagggggaatggcggcgggggaaggcgtccgggaaggggaggttctcgtggccgtcgggggccacgttcgagggggagttccgcggcgggcggatcgaggggcagggcgtgttcgtcggccccgacggcgccacgtaccggggcgcgtgggcggcggaccggcggcacggcgtgggcgccaagagctacgccaacggggactactacgaggggcagtggcgccgcaacctgcaggacggccacggccgctacgtgtggcgccaacggcaaccagtacgtcggggagtggcgcgccggggtgatctccggccgtggcgtgctgatctgggccaacgggagccgctacgacggcgtgtgggagaacggcgtcccgaggggcaccggggtgttcacctggcccgacgggagccgctacgtgggttcctggccgaggagctgcgtcgacatgccggccattagcggcacgttcttcccgccggtcggcgccggtggcggaggcgcggtgaggaagaggtcctccgtcgagggagtaggtgacaaggcgtccgccgtccctcggatctgcatctgggagtccgagggcgaggcgggggacatcacctgcgacatcgtggacgcgctcgaggcgtccatgctctaccgggaggccacgacggttggaggtggtgtgccgtacgttcgcacacagcggagcacccggcgagtagccagcggaggcacgtgctgggcgccatcggcggctgctacaccggagggcaaaaggccagggcagacaatctccaaggggcataagaactacgagcttatgctgcagctgcaattggggataaggcactcagtggggaagtctgcggcagtgccaatgcgggagctttcgcctgcagattttgatccaaaggagaagttctggacacgattcccacctgagggatcaaaggtcacaccaccacattcctcttcagatttccggtggaaggactactgccctatggtgttcaggcacttgaggaagttgttctcagttgatccagcagattacatgatcgcgatctgcgggaatgatgcattgagagagctgtcttcacctggaaaaagtgggagcttcttttaccttacccaggatgatcgtttcatgattaagacagtgaagaaatcagaagtgaagttgctaattcggatgttacctagctattaccaacatgtaagtcaatatcgtgactctctaattacaaggttctacggtgtccactgtgtgaagcctcttaatggacagaaggtccgatttattgttatgggtaatttattctgctcagaatatcggattcatcgccgttttgatctaaaaggttcatcctatggacggacagcagacaaatttgatgacgagattgatgagacaaccactctcaaggacttggatctcaactttgtttttcgattgcaacgaacttggtttagagatctccatgagcaactcaggcgggattgtgaatttttggaatcagaagggatcatggactacagtttcttagtgggagttcacttttgtgatgacctctctgcctcaaagacaggcttatctacttttacagcttctcctatgagattacccatccatctatctagcctaaccaatgatcggtattcagagttttcaatgaagagggagtcgttccaaggtggtggtggcatgccagagctgtgcttctcagatagtgattttgataggatacctgattgccggaaaccattgattagactgggggcacacatgccagcacgggcagagcaagcatccagaaggagtgagtttgacccatttctccttaatggtgggggattcttggccccgaatcagactggtgaagtgtatgatgtgattctatattttgggataatagacattctccaggattatgacatcacgaaaaggctagagcatgcatacaagtcattacagaccgaccccaattcgatttctgctgtggatccaaagctctattcgaaaagatttcaagatttcattggcagaatttttgtggaagatggctagaaatggatcaaaggtgcactgtaaattccattcaaaggccagagcaccggcaatgatttgaagatggttttggtaggtttctgtgcacggtaaagaatatccattatcacgaacgatcatcttcatctactgggatccgttaaagcggctcatcggccaccggtaaagcctcaacccaggagcacaggtaatcgggtttgcaaagcggtttgatgcaaattcgttgcaagaactggaatggctggattttcagaggcagccacgacagaggcatctgtaaattttgtgatttggtgggtgacagattggtacttccagttccctagtagttctttctttcttttcttttttttccttttgttagggattccttactgcttcagttttcccccttttatatatctgttggatgtagaaggggacagggaaatttttgtttccagaaagaggatttaaggctgtagcaagcagtgaataatgaagatcatgtacagatacacttcgatccagagaatggggattataatttaattcagcatcttcattcctgtgggcccctgctcactgcttctcagttctctctctctctctccccgtgccggaattcctgcagcccgggggatcc

SEQ ID NO: 8331 - DNA, 156 bp, Oryza sativa
  Clone ID: PAT_MRT4530_14846C.1
atggcggaacagggcgacaggcacgtcgtgctcaagatcgagtgcggaggtggacatcgccaagctctcctcaccatgcgcttggtgccgatcgctaaaggtgttctggggtttcgaggtgaagagtacactcgtcgccacaacccggcagcctga

SEQ ID NO: 8332 - DNA, 246 bp, Oryza sativa
  Clone ID: PAT_MRT4530_14847C.1
atggacatcagccaagccaccaaagagccacttccttcacatggccagcaccaacttgttggaagagactacaacatgctatcgttgccaagcgtcgccgcaccccaacagcaagcaactccgacttcatccgcagaaacaactgaagagtgtgtcgcccatcacaagaacgaagcggacccaaaaagcttaggccttgccaaacaccaaggaaagaaagcttttaaaccgaagagactatcatag

SEQ ID NO: 8333 - DNA, 765 bp, Oryza sativa
  Clone ID: PAT_MRT4530_14848C.1
gcacgagggtcgcattgctaattaggcttctagtattctagattgaaggaagctaatatgggagcgagaggaagaagagatcgaatgggcagcgccggcggctgcggggggtcgccgccggtcgtcgtccggcggtacaaccggagcgaggcgccgcggatgcggtggccggaggagctgcaccgccgcttcgtccacgccgtccgccgcctcggcggatgccacgaggcaacaccgaagcgaattatgcagctgatgggcgctaagggagtcagtatatcgcacgttaaaagccatcttcagatgtacaggaactccaacaacagtagcaatgttaaccgtcgtcatcctgtcaccccacaaatcgattggacgacgacggcgcagcaggatgaacagcagagacgacagatgagcagcttcagcttccttgcaacaagaacggtgccagcagctggaattgggagccatagccaccagagacctcaccggcggcaagcgctgcacgccggagacgacgacggctgcgagctgacgctgtcgatcagcggcggcgccgctgaagaatcgaaagacggtggctcgagcatcaccgacgacgacgacgagcttctgatccagccaccggcgcctaacatcatcaacgacgacggatcaacgcggcatggtcatcgtcatccttttgcttgttccacacagccgctgccgccggcggccattaaccttgaacttacgatttcttctccttgctgctggctcacctag

SEQ ID NO: 8334 - DNA, 213 bp, Oryza sativa
  Clone ID: PAT_MRT4530_14849C.1
atgacgatgacgatgacgatgacgatgacgatgatgatgtggcccttgcagaaccatgttatgttgatgatcaatgcaatgccaatcaaagtagcttttgcaaacgatggagaaagtgacctccattttcttgaccattggtgggttttggaccagaggctcaaggccaatctcaagcagaagtttcacttattaaatgaaactctacagtga

SEQ ID NO: 8335 - DNA, 356 bp, Oryza sativa
  Clone ID: PAT_MRT4530_1484C.1
gcaggcaggatctacgacgttgtgccgcaccgacgggtgtggtttggggccaacccgagatcggctcatgcagtcgcgcgctcgccgaatcaaacccggcgtccggctcgaccgggttcgcgttcgtcggcgagcttttagcttctgttgttgtctctcgtctggctcctgtgcgttcgcgaccgcgcatcaatcataccgagcaggcgcgcgtgccgcccgccgttcgagcggcgctgggacgcacgcgcgcgcgggcgcggcgtgctgcgctctccgacgacgaggaggcccaccaggccaccaccacctttgcagggcagtgcagcgcagcgcagcgcgttgctgcatgccag

SEQ ID NO: 8336 - DNA, 426 bp, Oryza sativa
  Clone ID: PAT_MRT4530_14850C.1
atgtcgtcgtggatgcagcacaggcggcggtcgtggacggcgcggttgctgtcctccgcgtcgctcccgccggtgcgcctgctcgtcttcttcgccatcgtcatcttcttcctctccgtctcctcctacgtcgactacaaggccatcgagcgccgtgcggagatcggcctccgcgtcttcgccgccccgctcgccgccgtcaccatcttcctcctctttctcgtcctccagcatcgacgccgctactggacgctgcgccgccaagtacaccaccaccatgcatatgctgatcaggccgaggctgcagggagcgggtcgccgtgggttgtggcgctgctgctgctgctgttgctgctcatgctctccttccaatcctctgtccattccatctggttcaggcctctctgggattctgctgattactag

SEQ ID NO: 8337 - DNA, 472 bp, Oryza sativa
  Clone ID: PAT_MRT4530_14851C.1
tcgcgatctagaaccgtcaatccccaaaccctcctcctcctctccggcgatccacccatcgatcggcgatgacgctggggagctccggcgccggatcgagcgtcgtcggtgagcgatcgatcgaatccccccttcccttcttcccttcccccccttttctcgcgagtgcctagggccttcggatcggaggaggctgaggaggagaatccacgcgggtttcgctccgttccgcgcctcgtaactttggcgctgtgtcccgccatggctgtgctgcgctcgatgtggttggtgatcaggcgagacgccgacgcgttggtttgtttgttggaattagcgatctgcggtttttgtaccatatgggttccatccatctggtgatttagcttggtttgcatgcgtgcagcggtcatgggatctctctagatggcctgggttgctcggtttgcgaatttatttacggcatgttgatgat

SEQ ID NO: 8338 - DNA, 2569 bp, Oryza sativa
  Clone ID: PAT_MRT4530_14852C.1
atgggacagggagatgtcagcagcgaagctgatctcgctgacggtggccgcgggcgagaagatgtcagcgtcggcctcagtgaggaggtgctttcactgacggtggccgcgggatggggatatgtcagcggcggcctcgagttgctctcgatgacggtggccacgagcggggagatgtcggcagctgcctcccctgcggccggctcagcttcttcgccgccagattcttccaggatggcgatggatgactccgcggaaggcgacagcggggttgtaccggtttggggaaggagggacaccttcgcggcgtcgggtccgccaccacgtgcgttcgcggaggaggcgatgatggagataaggagcacaccggtcacggagccgctcgtgcagcccatacattaccggcccaatgggccatgcgcactttccgctcggtcaaagccctcaaacccacgcctcccaaaaatttgtccccatcattctccccttccgctctccaatttcaaaatctcaattctccaaaccccaaccccaaccccaaccccaaatcccccaactccggcaccggaaatgcggcgcggcggcggcggagggggcaggcgcctcccgaagtcctccctggcgccctcggcggcgtcggatcgcaccccgctgctggatccccacgtcctccacccgcgcaacctcgacctcgccttctcccgccgcgactccgacgccgccagcctctgcagcagccggccgtcctccatcggcacgggcccttcgttcgccgcccccgtcaccaacttctccgacagggcctcccaggcggccgccctccgcgtcgtcaacgcctacctcgcccccgccgtcagcctccgcccgcctctcccctccgccaaggacatcgtcgccgccttccgccacctcttcgagtgcctcgacttccccctccacggcgcgttcgaggacgacctcctcttcgtcctccgcgtcctccgctgccccttcaagctcacccgctccgccctcaaggcccccggcaccccgcactcctggccgccgctcctctccgtcctctactggctcaccctcctcgtcaactccagtgagagcggcgccggcggcgacgactctcctgccgcctcaaatgacctcatgctctacattaccaacagctactcgctgttcatctctggggacgatgattcggtcgcgtctctcgacgaggagtactcctccaaagcccgtgcacatgcgcaggcagccgtcgaggcctcacaggcgctggagaaggaggcactggatctggagtccaagaggactaagctcacctcaggaccctcgcggctggaggcactgcaggcagagaaggaggccctcactgccgacgtggagaaatttgaagcggttgtgaagagttggacagtgaagatacaggagaaggaagagtcatctgtacatttggagaaggaattggaggccaagctgatggatcaacagcggatagcagctgaaaacgaggagctgatgaagaaggtggacgcacaggttgtgaatgtgagagatgtcgatcggatgcagagggagatccagtcagtggagcgtgacaatgtcaagttggagaatgggaatgcgacattggaggagaagggttgggagctcgaagctgcggtggttgggaagcttgaggagattgagggacttgtggagcagtgcaaccaggccctcagaaaattgaaacctggtattgatttccagtacatgctaaacacaaaagcgtcctccccggttgaactgctaggaaccagttacaaaactattatgaaacctgcactcaattctcttgctgacgaggctagaaggatatccatcttaaagcatgatgagtcagttgagctagaaaaacagtcacaacgaaatgctaaaattctgtctgagaaaaagaaccatatttcagtttgtcagaccaaaactgatgagatggttgctcgattggattcactggatgttgaaattgggaatcatgtttcaagatgtaaggctgatgctagactaatgaaagatgagctggagaaaaaggatcaccacctgagtactgttgagaaggagtcagaagaatttttaaagatctccgaaaagaagcttgaagatgcaaaaagggaaactgatgaagaaattcagatgtgcgccagagaactgctgaaacttattgattcggttacagagtacaaagagttcatggaaacatcaatatctgggatgaggaaagacctttatgaaaccgtcgacgacatctcttctttggcatccaaggcagcatctacccgccaaacttctgctcagtttgtaatgtgattatgtgaagaaagctcttcacggaagtgttagctcccaagtgatctcttccttcctacgcctgagatatttatacctcttggagctcttgtacgcatgtgccatcctgttaatataaactaggtgagtattccttagattgcaatggaaataggatattatttgctttccaactcttgtgcatgttgattaaaatagaaatgtttttgttgggcctgcaaaaaaaaaa

SEQ ID NO: 8339 - DNA, 287 bp, Oryza sativa
  Clone ID: PAT_MRT4530_14853C.1
atatccactcagtgaatcatggatcaataacctcatggaaaagttaaaatgtgatcaagatacgactctgctgctgtcaacgagcgcatccttactttcatgtataaaaaacatgttgctgatgatgcatggcacgatctgtagataggtccacgagctccatcagttttcaactgtgtggttgaaatttctagaggcaacaaagttaaatatgagttagataatgcaactggtctaattaaagttgatcgtattctttactcatctgttgtttacccacacaacta

SEQ ID NO: 8340 - DNA, 1803 bp, Oryza sativa
  Clone ID: PAT_MRT4530_14854C.1
tcagttgctctgtcgataaaccacattcgcataggtcggtaggcggtaacgtccagaaagctcttgagaaattaacgttcttcacgacctagccgatgatgggggtgcaacagcagaaccaaacaaacacgctaagctacataaattttaacagatgggagaaggcgcagagatcgcccagcctatacatcaccagatgcgctgcactgcttgacaaagagagggggcaccagaccacactgggattagggcctcgcctctgcaaaagaccgattcctccacggtgcaatagcaatcacgtcagatcagacccgagcctactcttttccccaatctaggtatcacatcgcaggtgctaggatcttggtcacaaaatcaatagggaagtgaatggaacaaatacagggtgaaatggaaatggaacgtatcgatgaatgccgcctgacggtaaagtcgatgtcctcgatagtcgtgagtaagcccactgtgtgatgagctccggcctccagcaaacgcctttgaagtgccagtagcttgcgatcgaaccaagctgctgctagaagaaagagaggatcttgaatgaaaagatggagatctccttgctaataaaccatttggagacaatttagacatattatcagctccgccgagtgataaccgacgagaagggccattgctgaagctctttccctcggtaggcagacgactagagccacttggtggccctctcagtccatcttctaaaaccttcaggcgtaactgatatttttcctttaattgggcctcagatcttgctgtccgctctgcgacagcaagcttatcacgaagttgttgcatttcaccctgcaggaatctgcgctcttcaagccactgtttaactggcatgactttgtcattagaatctttccactcgttggcaaccacaacagcaaccctgtttgctgtaacttttgcacgagcaagttcacattcaagtgtctttttttggtcattcacttcctgaacttggcgctggtaatctctaactacattagcagttgcgccacctcgaagaacagcctcttccagttctttcacggttaggctaagttttttaacttctgcaaccttttggcgttgtaacttgtccaatattttattttcttcatgacagatctctatttgcttcatcaactcttggttcttgttttgtaagtcatcaaccatagcagcttttgccattgctatttccacagtcctttctgcatctagtagtgctgcctccttttgttttgttagacgatccagagctcgattgtcatcttgtagttttgcaatctcttgccgagcaagctttagctcagcttcaagcggtgcgagaatggcttcaattggtggcatgtcatcatccttttgggctgcatgtactctccgcaaagtcgcttctgctgcaaactgagcagccattgcagcctttttctcatcattaatcttcttgacttctagatttttgctgtcaaggagtgattctgtcaacttgagtttctcaaacatcttctccaactcatctgtaagctcctccacggccttctcccgcgccctctccgacagccgtagcgcgcgtatctccgtctgcgcctccccgagctccctctccttgtccctcagctcgttctcgaggcgggtgagctccaccctgacgggatccgagccgtgcatcagcgcgatgaactcgtcggcgtcgaggctggcccgcacggtgcccctccgccgcgcggggcccctgggcgccaccgcattcccctcctccaccccgtcggccat

SEQ ID NO: 8341 - DNA, 621 bp, Oryza sativa
  Clone ID: PAT_MRT4530_14855C.1
aggatgatcccattcaaagtaatctatcccagaacgcaccctttcaccattttggaacatcaacgctcacagcttcgtgtatattactcaaagcccttccccggtttccaagttgtcaccaaccaatggaaagccagtgttcaacggcgagcttcccgcggaccagctgcttattataccacaacactatgtagttgtaaagaaggcacaaagagaaggatgtgcttacattgcattcaagacaaaccctaactctatggtaagccacattgcaggaaagagttccatcttccgtgctctcccaactgatgttctagcaaatgcatatcgcatctcaagagaagaggctcagaggctcaagcataacagaggagatgagttcggtgcattcactcccctccaatacaagagctaccaagacgtttataatgcgccggaatcctcttaagttggcaatgcggataaagaataactaaataaataaattgcaagcaattgttttgctgctatgtactgtccagtctttcgactaatgatgataaagcctctctttatccttaatataaataaaaaataagaataaaaccttagatccagctactacgcgtgctgcactctagt

SEQ ID NO: 8342 - DNA, 365 bp, Oryza sativa
  Clone ID: PAT_MRT4530_14856C.1
gcattgcaagacccatatcctaactctatgggtaagccaacaattggcaggaaaagagttccatgcttccagtggctgctgcccaaaatgatgttctagcaaatgcatatcgcatctccaagagaagaggctccagaggctcaagcataaccagaggagatgagttcggtggcatgtcactccaatgccaatacaagagctaccaagacgtttataatgcggcagaatcctcttaggtcggcttgcggataaagaataactaaataaataaatggcaagcaattgttttgctgctatgtactgtccagtctttcgactaatgatgataaaccctctctttatcctaaaaaaaaaaaaaaaaaaaa

SEQ ID NO: 8343 - DNA, 427 bp, Oryza sativa
  unsure (1)..(427): unsure at all n locations
  Clone ID: PAT_MRT4530_14857C.1
acaccacaacccnccccaaaaccggccgaagtttagcaagangnacgcgcttcgggcaccacggccaccanggccaagaccagccgccccagcaccacggcggcggcggcggcggcgcgcaccagcccaccnncaagaacnncngccgcgccgacgaggggnaccgcgncgccgngcgcgaggggaacgncgnccncgccccgaccaacccgcgcgacgagcaccagcacnggnacaaggacangcgcnncagcgccaagaacaaggacgaggagggcaacccggcgancgcgcccgncaacaaggccaccggccncgccancaagcacncccncggccagggccacccggngaagcnggcgccgnncaacccggagnacccggacgaggcggcgcngnggacggagagcggcgacgngggcaagag

SEQ ID NO: 8344 - DNA, 639 bp, Oryza sativa
  Clone ID: PAT_MRT4530_14858C.1
caatctcacacccagaattccccattcttaatcttgtacagatgagtcagtcaagtaaatctataccagaaccactcctttcaccattttggaacatcaacgctcacagcgtcgtgtatattactcaagccgtgcccgggttcaagttgtcaacacaatggaaagacagtgttcaacggcgagcttcgccgcggacagctgcttattataccacacactatgcagttgtaaagaaggcacaaagagaaggatgtgcttacattgcattcaagaccaatcctaacttctatgggtaagccacattgcaggaaagagttccattcttccggtggcttctcccaaaatgattgtttctagcaaatgccatatcgccaattctccaagagaagagggctccagaagggcctccagccattaacaggagggagattgagtttcggtggcaatttcaactcccaatcccaattaacaaagaggctaccaagacgtttataatccgccagaatcctcttagtcggcttccggataaagaataactaaataaataaattgcaagcattgttttgctgctatgtactgtccagtctttcgactaatgatgataaagcctctctttatccttaaaaaaaaaaaaaaaaa

SEQ ID NO: 8345 - DNA, 520 bp, Oryza sativa
  Clone ID: PAT_MRT4530_14859C.1
tttgggaacagtcacaccgctcacagcgtcggtgtgatattactcaagccgtgcccgggttcaagttgtcaacaacaatggaaagacagtgttcaacggcgagcttcgccgcggacagctgcttattataccccgaccctatgccagttgtaaagaaggccaccaagagaaggatgtgcttaccttggcattcaagacccatcctaactctatggtaagccacattgcaggaaagagttccatcttccgtgctctccccaatgatgttctagccaatgcatatcgcatctcaagagaagaggctcagaggcctcaagcataacagaggagatgagttcggtgcattcactccatcccaatacacagagctacccagacgtttataatcccccagaatcctcttaggtcggcttccggataaagaataactaaataaataaattccaacccattgttttgctgctatgtactgtccagtctttcgactaatgatgataacctctctttacccttaaaaaaa

SEQ ID NO: 8346 - DNA, 522 bp, Oryza sativa
  Clone ID: PAT_MRT4530_1485C.1
atggagatccgcttccaggccgtgcccccccacgacggcgacaaagcacaccattcccgccgccgatatgtcgatgtgccgcgggtcgtggctcctcgccggaccatgctggagccctcccagcgactcagggagatcggagatggagtggtgcggcggacgacggcgcggcggccactggccggacgaccggctgcggaggaggcgcacacgctcgggcggccggcggcagaggcggagctcgcccgggagtccggcggcggaggcggagattgcccaagtggtgggctgctgaggtggaactcgcccgggcggccggtggcggaggcggagctccatctcgtgcatcgccgtcgtggacacggccatcgacaccctcgccacttcgctgccctcctcacccaccacgacgccctcagcctccagtgcgactccctcagcggcgacgccgtgctcccgtcgcgccagtcgcccgctctccgccacgcccgccacccgccgcgcccatctccggccacctag

SEQ ID NO: 8347 - DNA, 825 bp, Oryza sativa
  Clone ID: PAT_MRT4530_14860C.1
atggtggaaaataaactatccccttgggcctccagtactaggcctcgggccacggcccaggtggctcgagacttgggtccgctcctggttgtcttcacacagtggccatcagagagggattttgccggctctggcaacatgtttttggatggtgtggacgaagcttgtggtgaaggtcaatctgtggcaaactgttggatcattcttcagcatgttcttgatctattggaagttcatcgacagccatatagcaataatggtgaacgttacagcctatgcccaggacaacaaaagtacaaatcaaaacagtggcgtagcattgacacctatgatgatgatggcaagaagcagacttattacggtttcatagagtcaatttgggagctagattacagagtcctcaaagtccctctactccgatgcaagtgggtaagaattccaagagggttgaaggttgataagcacgggatgatcatcgttgacctgaatgatgttggctacaaagatgagccgttcatgctcgcgaaatcctttaagcagatattatatgtcaaggacccatcacttgcgaaatctgccagaccacatcatgttgtattcgtaggcaagctaaatattgttggaatggagaatatcgttgatgaagaagactacgatcaacccgacgagcaaccgccacccacaactgatgtcgaattagaaaatgaggaaacaaatgaagaagatgaagaagccttgtatgtacggaccgatcatcaagaagggctactagtaagggtggtgatggtgaaatggcaaatcctgatacctccgaggccaacctga

SEQ ID NO: 8348 - DNA, 559 bp, Oryza sativa
  Clone ID: PAT_MRT4530_14861C.1
ccatgttgggaacatcaacgctcacagcgtcgtgtatattactcaagccgtgccccgggttcaagttgtcaacacaccatggaaagaccagtgttcaacggcgagcttcgcccgcggacagctgcttattatacccccaccctatgccgttgtaaagaaggcacccaagagaaggatgtgcttaccttgcattcaagacccatcctaactctatggtaagcccacccttgccaggaaagagttccatcttccgtggcctctgccccaatgatgttctagcacaatgcatatcgcatctcaagagaagaggctcagaggctcaagcataacacgaggagatgagttcggtgcattcactcccatcccatacccagagctacccacagacgtttataatgcggcagaatcctcttaggtcggcttgccggataaagaataactaaataaataaattgcacacccattgttttgctgctatgtactgtccagtctttcgactaatgatgataaaccctctctttatccttaaaaaaaaaaataaaaaaaaaaaaaaaaaaaa

SEQ ID NO: 8349 - DNA, 270 bp, Oryza sativa
  Clone ID: PAT_MRT4530_14862C.1
atggcgtcgtcgtcggcaatggtgagggtggtgttggtgtccgtgctgctgatgcagtgctgcaacgcgatcatggcggcgaggctgctggaaggtgatctgggcagctggctgcagggtcagggcggcgtcgccggcgagctcatcttgcaggtgctcaagggagggtcgccgccgggaggcaatggttgtcaccaaggtcccggaggcggctccggaggcaactgctaccaaccacagaccggcaacggcaggcatgaactaacctga

SEQ ID NO: 8350 - DNA, 483 bp, Oryza sativa
  Clone ID: PAT_MRT4530_14863C.1
ccgagtttcccccgccggaccagctgccttatttataccctccaaccactctatcccacgttgtaaaggaagggcaccaaaggagaagggatgtgccttgaccattgccattccaagacccaatccctaacctctatggtaagcccaccacttggccaggaaagagttcccatcttccgtgcttcttcccaaatgatgtttctagccaaagtggcagtagtcgccattcttcaagagaagaggcctcagaggcgtcaagccataaccagaggagatgagtttcggtgcattcacctccaatccaataccaagagctaccaagacgtttataatgcggccagaatgcctcttaggtgcggcttgcggataaagaataactaaataaataaattgcaagcaattgttttgctgctatgtactgtccagtctttcgactaatgatgataaagcctctctttatccttaaaaaaaaaaaaaaaaaaa

SEQ ID NO: 8351 - DNA, 1546 bp, Oryza sativa
  unsure (1)..(1546): unsure at all n locations
  Clone ID: PAT_MRT4530_14864C.1
cccacgcgtccgcccacgcgtccgcttgtacagatgagggcagtcaaagtaaatctataccagaacgcactcctttgcaccattttggaacatcaacgctcacagcgtcgtgtatattactcaaggccgtgcccgggttcaagttgtcaacaacaatggaaagacagtgttcaacggcgagcttcgccgcggacagctgcttattataccacaacactatgcagttgtaaagaaggcacaaagagaaggatgtgcttacattgcattcaagaccaatcctaactctatggtaagccacattgcaggaaagagttccatcttccgtgctctcccaaatgatgttctagcaaatgcatatcgcatctcaagagaagaggctcagaggctcaagcataatagaggagatgagttcggtgcattcactccaatccaatacaagagctaccaagacgtttataatgcggcagaatcctcttaggtcggcttgcggataaagatcacaccagccgccgctgccgcctcgtcgtcccaaatcgtccgagcgccgccgccgccgccgccgccatgggtaaggttcacggctcgctggctcgcgccgggaaggtgagggggcagacgccgaaggtggcgaagcaggacaagaagaagaagccccggggccgcgcccacaagcggatgcagtacaaccgccgtttcgtcaccgccgtcgtcggcttcggcaagaagcgcgggccaaactcctccgagaagtagatctagagatcgctcctttgcccccgtctcattaattaatactcatggatccctttttttgtttgttccctagtagttttttgttcaagtatgcaatttttggtattgaactgatgtcactgtaatacctatgatatctctatggatggtgttaagatcttatcgtcgaaaaaaaaaaaaaaaaaaaaaaaaaaaaaaaaaaaaaaaaaaaaaaaaaaaaaanaaaaaaaaaaaaaaancctttgggggggggcccggccccaaattccccttttagggagtctttttcccccccctcactgcccgtctttttaaacgtggtaatggggaaacccctgggggtcccaacttaaatggctttgaaaaaattccccttttgcccagttggcgaataagcaaaaagcccccccagatggccttccaaaatttgcccccctaattggatatgggcaccccctttccggcccttaaacccggggggtgggtggttccccgcaagtaccgttacattgcaaggccttaacgccgttcttttggttttttccttttttttcgaccgttccgcgttttcccggaaggtttatatgggggctcttttgggtcccattaaggcttccggccctgcccaaaaattttttggggaggttccgttgggccccccctctaaacgtttccctcttacggaacccctctttaaaggggttttccaaagaaaaacaccatttgggtttttataaagggttcgcctggctttgtaaaagcgtttacaattaccattaaaatacccacttgg

SEQ ID NO: 8352 - DNA, 273 bp, Oryza sativa
  Clone ID: PAT_MRT4530_14865C.1
gtaacctgaaagtgtgattgacatataaaattctgtgattgaagttacggtctaacaaaaaactaaacccacacgcgggaccttctcccaacaaacagcaaaatctaccaccttagctactcatcttcattggcgggcccctctctgcgacccctcctatcctccctgtccaccttcttcaactctcctctcccgctcaacatcctcaatgacacgagcgcctacttccctactgtcgccttgtacctccaccacgatttccactcttacctc

SEQ ID NO: 8353 - DNA, 143 bp, Oryza sativa
  Clone ID: PAT_MRT4530_14866C.1
gagataacacggcatgcgcacgcgcgcgagcgcgtgtcctctatattgttgcgccctctttttttttttttttaggcagtaacacaacaaaccatgaatttggaaatgaaggatgcgacagggagggaaaacatcagcaatac

SEQ ID NO: 8354 - DNA, 563 bp, Oryza sativa
  Clone ID: PAT_MRT4530_14867C.1
aaacaaatatgtatattttattcatagccaattgaaataatatcagcattatatgtttatgcaatcatatccttttgagtataaccaaaaggaaacaaagagttaaaagacacattcacacatctacatgttaggctttataacagcacattattttgatcatttgcaaccattttttcccaaacttgtagtaatctgatcagatgaatcttgaataccttccagattcttcccttctgatgccaacgagcaagactgcgaaacgaaaaacacactcgaagaagaagaagattcagcagtcgaaaacaactccctttcatcgaatcccctagatttcttcatgtctctctcttcttcttcctcaggtttcactctctttgacccgttgtaacgaacagccgaaggtacttgttggtcattagaagacacagatgggcaaagaccaggttctttaatggtattagcccctaaggcctcgaagctatctgctacaatctcatcaggtgctgctccgatcatgatctgtgcttaacgggttcttgaaatagctttagctagtagct

SEQ ID NO: 8355 - DNA, 239 bp, Oryza sativa
  Clone ID: PAT_MRT4530_14869C.1
ggaggggatttatataggctgatctctaataaattcagagtagatctgtcccacattaacaaccacatctgtttcaggcctacagtttggttttatttaaaccaaatgccactcacatcattccctaagaccattctatcaaacatctgtgctttcctgtccatcatacccccaattttccttttctttgcatttgtactacaaaggcccctaaccaccaattccctttactaattaaa

SEQ ID NO: 8356 - DNA, 180 bp, Oryza sativa
  Clone ID: PAT_MRT4530_1486C.1
tctacgattatgatcttcgatttgttcgtgtgtcctggcctgcttatctgtaatgttggtcataacccagcgtcctcagactatgtggtgtcactctcctctggagatctttatctacaactaatgtgttttatgtgccaatgcgtaatatcggatctatgtgctctgtgagataaaaaa

SEQ ID NO: 8357 - DNA, 705 bp, Oryza sativa
  Clone ID: PAT_MRT4530_14870C.1
actgaacacaaacaaatttcaattgagaaaccacatattgaagcacatgggatccagaagacaaagcgagacacttcatcttctcattagaactaccctagtgtcttgcaagctaaaatcgaaaacatccagttaaatgcctagtgatacgaactaatctcgaatcgaacaaactaagtactgcatatacagtgaccaatgaatggaaggacatgaagctaggagcgcgcctgcttcttgggggacttggcggctttgtccttggacgccttggccggcttgtcggccttctccgcggtcttcttcgggagcagcaccgggttgatgttcggcagcacgccgccgtgcgcgatggtgaccccggcgagcagcttcccgagctcctcgtcgttgcggatcgccagcagcacgtgcctcgggatgatccggttcttcttgttgtcccgcgccgcgttcccggcgagctccagcacctctgcggcgaggtactcgaggacggcggcgaggtagacgggggcgccggtgccgacgcgctgggcgtagcggcccttcttgaggtagcggccgatgcggccgacggggaactggagcccggccttgacggagcgcgacaccggcttcttcttcggcccgcccagcttccgccccaccgccttcttcgccgccttgccgccgacgccgacgtccatctccgggaaacgtgag

SEQ ID NO: 8358 - DNA, 213 bp, Oryza sativa
  Clone ID: PAT_MRT4530_14872C.1
atgggtcttagtgctggtctgctccgccacagtcatgctttttgccgctttgacttctcctgccagagactgagaaaagggctcggcccaaagcatatgtatgcatcgcaacagctgaagatcagggagaaggggaaaaatacaaacatgtgtgtcaagccagatgggtcagacaacgaccacaagagaatagatgctatggtgacttggtga

SEQ ID NO: 8359 - DNA, 618 bp, Oryza sativa
  Clone ID: PAT_MRT4530_14873C.1
atgtggcgctcatgtctccacatgccgcatctcaattaccttcccaaagcgacggtcggcggcgacgacagcgacggcggcgcaaggcggcgacgcacggcgcggcggctccgggacgacggcgcggcggcttcgaaggatccccaagtccgccgctacccgtcgccaccttcgccttcatctcttgccatcggaagcgtcctagcgccgtgtgacctagcgccgtcgtcgtcgccgccgctccagccgtgcgccgccgtcgttccagtcatcgccgtcgctcgggaaggtcgtcatcgtggtcgccgtcgcttcgccgtcctcgtccgccccttcgcagtcgctgttgaccgccggagcaccgtcgccgccgtcgacccgatcttctccgccgcttcaacctcgtcgccgtcgccatccgttgatcttccgccgcttctttggtcatcggtgagttcgccgcgtcgcgctctacgtcctggtgctctccgttcgtgccgaagcgctgttgttcgccggcgagcatgcgtgcccgagccgccgagccgctgccgggttgatctcggccgtccgttcccgtggaccgctgccgtgcgcccggtctaccgcaaaccctag

SEQ ID NO: 8360 - DNA, 730 bp, Oryza sativa
  Clone ID: PAT_MRT4530_14874C.1
ggaaaaagagatttattgcgtcagcggctagggtttgcggtagaccgggcgcacggcagcggtccacgggaacggacggccgagatcaaccctatccaaaacggacggccgagatcgatcggtccacgaccggctcacggcaaaccgccacgatgacgtcagcggtgacgtcatcgatgacgtcagcaccggcagcggctcggcggctcgggcacgcatgctcgccggcgaacaacagcgcttcggcacgaacggagagcaccaggacgtagagcgcgacgcggcgaactcaccgatgaccaaagaagcggcggaagatcaacggatggcgacggcgacgaggttgaagcggcggagaagatcgggtcgacggcggcgacggtgctccggcggtcaacagcgactgcgaaggggcggacgaggacggcgaagcgacggcgaccacgatgacgaccttcccgagcgacggcgatgactggaacgacggcggcgcacggctggagcggcggcgacgacgacggcgctaggtcacacggcgctaggacgcttccgatggcaagagatgaaggcgaaggtggcgacgggtagcggcggacttggggatccttttaaagaggctagggggcggcggcgaaggcccacggcgaccggcgacgcgaaggaaacctcgggttcgggagagagagaggaatccgattcgatcttgaatccatcgatttccaaaccgaaa

SEQ ID NO: 8361 - DNA, 1455 bp, Oryza sativa
  Clone ID: PAT_MRT4530_14875C.1
atggcgacggcgcacgtgctggtgttcccggccccagcgcagggccacctcaactgcttcctccacttcgccacggccctcctccgcgccggcctccacgtcaccttcctccacacccaccacaacctccgccgcctcggcgccgccgccgccgccgccgctgccatctcgccgcggctccgcttcctgtccgtgcccgacggcctccccgacgacgacccgcgccgcgtcgacggcctcccggagctcatggagggcctgcggaccaccggcagcgccgcgtaccgcgccctgctcgcctcgctggtggtgcgcgccgcggcgtacggacgtgcgtcgtcgccgacggcatactgccgttcgccgtcgacatcgccgaggagctcggcatgccggcgatcgcattccggacgcctcatcgagctcggcgagctcccgttccccggacgcggcggggacgacggcctcgacgagcgcgtgcgcggcgtcccaggaatggagagcttcctgcggcggcgagacctccccatccagtgccgccacctcgccgcgacgacgacccacggcgaccccctactgacatccgtggtcgccgccaccgcgcacagccgcaacgcgagggcgctcctcaacacggccatctccctggagcacccagctctgacccacctcgcgcggcacatgcgcgacgtgttcgccattgggccgctccacgccatgtccccggcgccggcggctgccacgagcctatggcgccacgacgacgggtgcatggcgtggctagacagccaacccaaccagtccgtggtgtacgtcagcctggggagcctcacggtcatctcccacgagcagttcaccgagctcctctccgggctcctcgccgccggctaccctttcctctgggtgctccgccctgactgtgaagatgatcctttggatcagctcaacaaaccgcttaacactgacatggccgggaacaaccacgacgacgcgttgctccgacaagccctcctcgacgtggccggagccggagcgtgcgtggtgccatgggcgccgcagcgcgacgtgctgcggcacagggcggtggggtgcttcctgacgcacagcgggtggaactcgacggcggagggcgtcgcggagggcgtgccgatggtgtgctggcccttcttcgcggaccagcagatcaacagccgcctcgtcggggccgtgtgggggaacagggtggacatgaaggacgcgtgcgagaggggcgtggtggagaggtcggtcaaggaggcgatggagtccggcgagatcaggaggtctgctcgtcgcctggcggagcaggtgaagcgggacaccggtgacggcggttcgtcggcgttggagtttgagcggctcgtcggcttcatcagggagctcagcaaggtagacgatgagccactggtggagaaatgctctttactcctggtttag

SEQ ID NO: 8362 - DNA, 212 bp, Oryza sativa
  unsure (1)..(212): unsure at all n locations
  Clone ID: PAT_MRT4530_14876C.1
tcgtgacgcgtgggcgagtacctgcttctatccaattttttgccttgcctcnagttcagcaagattggattcaactaccgggataaccacacctcttcctggtactactatggcatgtattgtgaccatatggaagctttccattttctgctgcaccgattccacccatattcttaaggagcttgaagaggtcaatatatcttaccttcttt

SEQ ID NO: 8363 - DNA, 207 bp, Oryza sativa
  Clone ID: PAT_MRT4530_14877C.1
ttctgctgtgtgtttcgtggcacagcacattttaagtgatttactgctagcttgtaccttttctgtttgtaatattccgatcgtgcagcgagtggtcagataatcgaacctgctgcgcgtagaagtgacgcaagaaggcagcgggcccactaggcaggcggcccaggtagcaggaggcccaggtagtcgcagaggcgcggcccacat

SEQ ID NO: 8364 - DNA, 417 bp, Oryza sativa
  Clone ID: PAT_MRT4530_14878C.1
atggagtggtctttgggttttgccatgaacgctccccgactggaagtaaagcaagtttgcttcacaaacggttgcgccgggcattttgttcatctccggcgaggcaaccttggatgcaagcctaggagagaagctgagagtttttattgttttacaatggaagcctcaaccttcaagtggaggtctcttttggcgggtgcggcgcaggggtggatgcgggcggcgagcgagcggcagttcagcgccgccgcaacctcctccgtcaggcctcaggactctagcacggcggcgagctcggcgccgacgtgctgccgcgcgtcgccgacgggccacacgctccaccctacagccatctcggcggcgatgaggctgtgcaccttggtgagctccgcttcgagctgctcctcctcccagtag

SEQ ID NO: 8365 - DNA, 458 bp, Oryza sativa
  Clone ID: PAT_MRT4530_14879C.1
ttttgttttttttaattttgggtggttttattttttttttttttttttttttttgggcccaagcaacatggtgaaattttataccaaaacctggcaaccgggggccggggggatatacgggtttacacatgaacatttcacaggattgggatttccaattgccggaaggcgataaaaaacccggcccgacagggaaaaggcaaatgagggggggaagaaaagcaaagaaagaaaccagaaactgggttgggggcttgaaacttcaaaatttttattacaaagggtccagaggaaaaaggaaaaaatctggggaaaatttttggggcgagggggggttacaaagggaggagcaggagcaggttttaccttctcacttccactggggggggaccatttcggggagggccaccaccctttgggggggtccccacttggggggggacccggggaagacccta

SEQ ID NO: 8366 - DNA, 347 bp, Oryza sativa
  Clone ID: PAT_MRT4530_1487C.1
ttgactcgtgggaacgccgcctacttcgcctccgccgccccaccccccgccgccaccaacggcaccgtcgccttcgccgtcgcctacccttaccctgcgccgccgccccactcccactgccaccggccacatactactacggacgcgtaccaccaccgccactacctacgagctactactcctaaccacgacgcctacgcgcctcaccgcgctacgtccagctgcctgcgccgcctcctcggactagagatccacgcattcctcctgctcggcgccgacaccttcaacgtttggattctcctgggtccccgcaagccggacttgtccgttgagtacctcaccctctg

SEQ ID NO: 8367 - DNA, 1209 bp, Oryza sativa
  Clone ID: PAT_MRT4530_14880C.1
atggagctcatggctagagtgttcctgcttcttctcctgcctctctcctcctccgcggccaccgccgttgccgcccctccgcctcctcgatctcaagctcaaaccgccgatggtaatggcgtgctggtgaacggcaacttcgcgatgagcccccggaagatgaacgccacggtgatcgtcgggagggactctctgccggggtgggcgctgcgcggccgcgtcgagtacgtctccggcgggccgcagcccggcgggatgtacttcgccgccgcgccgggcgcccacgcgctccgcctgggagcgcgcgcgtcggcggcgcaggcggtggcggtgcgccccggcgcggcgtacgcgctcacgttcgcggccacgcgcgcctgcgcgcgcgacggcgagcgcgaggaggcgctgcgcgtcgccgtgtcgccgtcgttctccgctcccggcgacgtccccgtgcgcacgctctacggcgccggcgccgccgacgcctgggcgtgggggttccgcgccgccgagaggaacgcccaggtcgagttcagtaaccccgccgccgccgacgaccacgacggcgacgacggcctcaactgcggcccgctcctcgccgccgtcgccttcaaggagctcccggcgccaatgccatccaaagacaacctgatccggaatgccgacttcgaggccgggccggcggcgatcccgaactccaccgccggcgtgctgctgccgccgaagcggaaggacgcgacgtcgccgctgccggggtggatcgtcgagtcgctccgccccgtccgcctcgtcgacgcgccgcacttcgcggtgccgcaggggcagcgcgccgtggagctcgtcgccgggcgggagggcgcggtcgcgcaggtgatccgcaccgcaccgggccgctcgtacaacctctccttcgccgtcggcgacgccagggacggctgcgagggcgccatgctggtgcacgccgtcgtcgtcgccggcggcggcggcaacgcgacggcgaaggcggcggcggcggccgtgccctacgcgtcgcgcggcggcggcggcgccaggcaggccagcctgaggttcgtggcgagcgggcggcgcgccagggtgacgttctacagctcctactaccacaccagcgccggcgacggcgtgtcgccgtgcgggccggtgctggaccaggtgaaggtgcagccattgatgacgaaagcttag

SEQ ID NO: 8368 - DNA, 1393 bp, Oryza sativa
  Clone ID: PAT_MRT4530_14881C.1
tcacagtctgcctacattctccagtctccacttcccacctaagcggagaagcgcggggaaccgaaacccggtgatggcgcacccgcacccgcggccgctggaagacgacgacctcctcgccgagatacttctccgcctcccgccgcggccctcctccctcccgcgcgccgccgccgtctgcgcgcgctggcgccgcctcgtcaccgccgaccccgccttcctccgccgcttccgcgcccaccaccgccgcggcgcgcccctcctcggcttcttccacagccaccgggtgagcccctccttcgtctccaccatggatccccccgaccgcgtccccgcggccgtgggcgccggcgggcgcttctcgctgcggttcgacgacttccgctgcaggatcctcggctgccgcgacggcctcgtcctcgccgtcaacccagtgatgccgcggctgcgcggctgcttcctcgtgtgggaccccgtctccggcgaccagcgccgcgttgccttcccgccggagtgcgaccagggacagaccgaggtgcggaacggcgcggtgtttcgccttcccggcggcggcggcggattccgattccagatcgttctggtgggcacccgccatcagtacgaagccatcggttgcatctactcgtcggagaccggcaaatggggggatctcatcgcaacacccctcccacacaatttgactaggatatccctggctgttcccggtgttcggattggggattccctctactggttgatttcggggattccgggtggaatcctcgagttcgatctgaacgagcagaggctagctgtgattgatgatgtgccaatggctgtgagtgatggataccgacgattttgtgtcgtgccggcagcggatggtggcctcggcttcgtcttcatgtcggatttgggctcacaattttggaggaggaagaatgattgggatgatgatgtctctgagtctggatgggtgctggagaaaacagttcaattgggcgagcttctatccttgagtccaacagagcgcaagggctccccaatcgtaatggggttttctgaggactataatgtgattttcctaaagacaattaatggtctcttcatggtccatcttgagtctatggagttcaagagaattttgaaagactgtgctgcccttttcatttatccatttgcaagtgtttacactgcaggcatgagcattggtgatggacatgatgaagatggacagtctccagctatgctagtttataatccccttaaccccacattttccattgcacatcttctattttgtccgtatcaaataaatcctctatacccatttgtggctagattgggccatgggctagttgtcaggggtttatcggtcacattaatattttaa

SEQ ID NO: 8369 - DNA, 1029 bp, Oryza sativa
  Clone ID: PAT_MRT4530_14882C.1
atgtcgaacactggagacaaggagaaggagactcccgtcaacaccaacggaggcaatactgcctcaaactccagcggaggaccattcttggggggtaattttggtatgggatgttttcttcgcttcttcgcatcaggcagcggcgcggcaaaaatcgttggctgcgcggccagcggctcggcgcagcgaaatcctcagtttgcagacgtgtttgatttgggattagccttctcggcgagcgacactccaggcctgactggtgtggcggaggaagccagccttgcacgagtcgcactggaagcaaagcgtttgatggtcgttgctccaccggctacagtcgtcgtccttgttgttgttggttacttgggcaacggcagctggggcacctgctgatgctgctgtcgatatccacgtcgtcccattcacgtatgttaatccacacgatgatggtggcttgcagcatccagactcgataggggacattacacgtgggtcggcgtccaccccgtgtctcttggcccacctttcgaaggaggatgggcggggaacaaaaatgccggtgtcggggttgcgtaccaggttagtcatgccgttgcagacgtggctgcggcggaggcacgcgctggttgatgcccagaaatgcgaggagtgggtgacgcgacccctaagccacccccgcttgcactcactgaggctgtactctcgggcattcgccgcatgccccgcgtcgatgcctcccacggcaacgtatccgaagatgataaaggcgaggaggaggaggattgccaagaacacgccgaggaggtagcagtcgtagaggtcaccatcgtttttcttcaggccacacgaacccaccacgaacatgacaatgaggaagaggccgatagcgattataggccccaagaacatgccgccggtgcaagtcttgggggccttgatgctgccggccgacagcaggaggaccgacgctaggcacgtcagcaccaccgacttgccctttatcaaccacgctcggtcttctggcgtcat

SEQ ID NO: 8370 - DNA, 423 bp, Oryza sativa
  Clone ID: PAT_MRT4530_14883C.1
atggattattgccgccctcccagcaagccgggggtcgcgctcgcgccatggctgtcgcccgggcattggaccgtgcaaaccatcgtcgccgcgacgcggccacgctctgtgcagcggacacgaagcatgcgcgcgcacatggcggcaggcacatgcgcggtggaggacgcatcagaacacggagggcgcgtcgcgggccgatgtccggagcgcgtgcgcgttcaccgcatcagggccaggcaatgggacgacgcgcgccgcgcggcggcgcttcgatcgatcgatcgacaatatgcatgcattgatcgatctcccccgtggaaaacgaaggccgttgacgggttgagtgtacgtataggtatccactcttacgatacgaagacacatgctttctacctacacaagttcgtgtgggccggcgcg

SEQ ID NO: 8371 - DNA, 156 bp, Oryza sativa
  Clone ID: PAT_MRT4530_14884C.1
gagataccccaagttacaatcgagttccacagaacattacatgattggaccggaaattaattaatcgtctggacacattacaagaatgaaccaatggagattcaacgcacacttcatcctatgcgatattttcctcctatatcaacattgcaggca

SEQ ID NO: 8372 - DNA, 363 bp, Oryza sativa
  Clone ID: PAT_MRT4530_14885C.1
gctacaaaacagagcggcggacataaacactcgtacagtgccatgcatgcatacaaatacatacaggcactccaattatcttacaaccattcacactataacactgaaaggcccaaacaaaactgacaacagacgcatgcatcgaacatatcatatgcatgaccgaccatagacacacatagcaaagtggacaacgtaatcaagaacaattaatacagcagatgatcgatctatatgatcaaatgaacatagttgccatcataacgctcgcacgctggtgctcctgaacgagcaaagcgcctaggcggacttgcctgacagcaccagattgtgggacgccgacgacaagaacacggtgatcac

SEQ ID NO: 8373 - DNA, 610 bp, Oryza sativa
  unsure (1)..(610): unsure at all n locations
  Clone ID: PAT_MRT4530_14886C.1
cccacgcgtccgcccacgcgtccgcaccaggccacgggccggttctccaacgggctcaacatccccgacattatcagcgagcatcttggggccgagcctgcattgccgtacctgagccctgagctccgaggggacaagctgctcgtcggcgcgaacttcgcgtcggccggcgtcgggatcctgaatgacaccggggtgcaattcgtgaacataatcaggatcggcgatcagctgcagtacttccgggagtaccagcgcaagctaagggctctggtcggcgaggagcaggcgaagcggatcgtgaatggtgctctggtgctcatcacgctgggaggcaacgacttcgtgaacaactactacctcgtgcccatgtccgtgcggtcgcgccagtacgccatccaggactacgtcccgttcatcatctccgagtacaggaaaatcctctcgaggctgtacgagctgggggcgcggcgcgtgatcgtgacggngacggggccgctggggtgcgtgccggcggagctggcgctgcacagccgccgcggcgagtgcgcggcggagctgacgcgcgccgtggacctgtacaacccgcagctggtgaacatggtgcgcg

SEQ ID NO: 8374 - DNA, 897 bp, Oryza sativa
  Clone ID: PAT_MRT4530_14887C.1
atggcgcgagaggtgagcagcgaggaggaggctggcggcggcgacgagctccggcgagggccgtggacggtggaggaggacctgctcctcgtcaactacatcgccgcccatggcgagggccgctggaacgcgctcgcgcgctgcgccgggctgaagcggacggggaagagctgccggctgcggtggctgaactacctgaggccggacgtgaggagggggaacatgacggcggaggagcagctgctgatactggagctccatgggcggtgggggaatcggtggagcaagatcgcgcagcatctccccggccgcaccgacaacgagatcaagaactactggcgcacccgcgtccagaagcacgccaagcacctcaactgcgacgtcaactcccagcagttcaaggacctcatgcgctacctctggatgccccgcctcctcgaacgcatccaccgctcctcccaatcccaatcccacgacgccgacgacgccgacctctccgtctccgccgccaccagctgcatcacctccgacctcgtcgtcgacgcgcatcacccgccgctcgccatggccgacagcaacgactctgcagccatgtggcagcaacatcaagcaccacagatgagcgtcgccggcgcgccgccgccgacgacgacgatggcccaacatgtagtactgccgaccgcggcggcgtcgtgccaccagatgcaggatcagttcgtctgcgcgcgcgcggcggagacgacgacgtgctgctggtccgagtcggagtcgctgccgggtctcgcggggctgtactacgacgacgcggcggcggcgctgccggagtttgacgtggagaccatggccatgtggggccctgaggacgacccatggtacacgcaaatgcttggcttgtga

SEQ ID NO: 8375 - DNA, 413 bp, Oryza sativa
  Clone ID: PAT_MRT4530_14888C.1
tctttggtaaagttggttcttggtctggttcatctgccttgttactatcttccttttgctaatcttgttctgcttagattgtcttttctcttggggcatcctttgcattttggctaatcttgtcatctccttttgaagtttcacctctcttcctgcatctcactacctgatttggtgcttagtctaatccaattcctttttggttcttgcgattgcagtgggtgattaggtgcttaacataatcccaatcctagaaaaatacattcggagtggttgctgctgagctcaaccaatcaagcttgttggggaggcaagcagtcacaatgatgagcttcaacaagagccaagaaggatttgggcaggttgctgctgtggccaccctggcctccaatggaggaggctctctaccatgg

SEQ ID NO: 8376 - DNA, 437 bp, Oryza sativa
  Clone ID: PAT_MRT4530_14889C.1
aagagatcaggtagaacagtgagagtgaggtgcagaaaaatttgagctgaagctgaggatggcaacatccatgatcaccctggcggtggtggcgcccccccggaccaagggccttccaggcatatgccgccggggatcctccttactcatcgactgcagcggggggaagaagatcaagaccagacacgccctacggcataggaggtggcatgatagtctgatataagatgcatctggccagaagagcacggggaaggatgcgtaccaaatgcctgacaagtacggcgcacacgaccacggatacagtccaatctactgcccggaggaatggtgtcccaccggcgacacctacgtgggcggaaccaccggtcttctgatctgggccgtgaccctgggcgtgctcctcgacggacgcgccctagtaggctacaacacca

SEQ ID NO: 8377 - DNA, 1452 bp, Oryza sativa
  unsure (1)..(1452): unsure at all n locations
  Clone ID: PAT_MRT4530_1488C.1
atgacggcagccaacaaggtgggcgtttggtacggtgatatgaagcgagaagactctaaagcaaccgagcattttaaggttgaatcacaagggttaggaagggtgtacacaccgttcgttctaaatctccctcaaacataccagatctgccattgtgtctctagccgcacccacgtagggctcaaatattcgttaattggtgctacctgtgatttgagatggatatggtatggctatatgatgttattatttaggaaaaaatgtcgctgggagcgacgactaggtggccggagatgggcgcggcgggtggcgggcgtggcggagagcgggcgactggcgcgacgggagcacggcgtcgccgctgagggagtcgcactggaggctgagggcgtcgtggtgggtgaggagggcagcgaagtggcgagggtgtcgatggccgtgtccacgacggcgatgcacgagatggagctgcataggagtgccgatgaccgccgctcatccctttcccctttccttctgttccgactccctcccctttcctgcagtgcagcgacagtggtcggggcggagaaggcagcggcagcagtccaggcagagaaggcggcgacgtcggcggtggtctggacagacaaggtctcggggtaccgagctcgaannnnnnnnnnnnnnnnnnnnnnnnnnnnnnnnnnnnnnnnnnnnnnnnnnnnnnnnnnnnnnnnnnnnnnnnnnnnnnnnnnnnnnnnnnnnnnnnnnnncaccactcacctccgcctccgccaccggccgcccgggcgagttccacctcagcagcccaccacttgggcaatctccgcctccgccgccggactcccgggcgagctccgcctctgccgccggccgcccgagcgtgtgcgcctcctccgcagccggtcgtccggccagtggccgccgcgccgtcgtccgccgcaccactccatctccgatctccctgagtcgctgggagggctccagcatggtccggcgaggagccacgacccgcggcacatcgacatatcggcggcgggaatggtgtgctttgtcgccgtcgtgggggggcacggcctggaagcggatctccattgccgcagtcgtctccaaggtctcgggcgacaagcgcttcgatctatttgtgaccgggaaattggagctcgaacagccatggcggaacccgtgggcgaacgagcaatgcccccccaaccccggcgtcacagcaaggtcctgacgatgttggaaaaccataaatgtagtgcctcagttttatcgttgaattggactagtcactaatggggtggggcatcttctgcatgtgatgtttagtttcttcagataactttgctttcatgtttgtttaattttagatttctaggtagtacttcattttgcaaaagatgagaagattaaacttggtcgaagtcacttggcacaaatgatgct

SEQ ID NO: 8378 - DNA, 3414 bp, Oryza sativa
  Clone ID: PAT_MRT4530_14890C.1
atgggcagtctctgtctcgagcgccggaagcaaccggacgatcccctctccatttcgcagcagctccacctgtgcctccttcctctcctcttctgcgcggcttcaaagttttcggcttttgagggagttcttgctcaatatcccgatttttctttcttttttttctctgcctctgcgagaaatcgaggttttgatatcaacgtgcttcacaaagaagcaaggagcaggtggctaaagccttctgaagtctactatatcttgcaaaatcatgagaggttcccaatcacccctgaaccgccaaagaagccacccagtggttctctattcctttataatcgccgtgtgaatcggtattttcggagggatggccatgcatggcggaggaagaaggatggaagaactgttggggaggctcatgaacgattgaaggttggaaatgttgatgctctcagttgttattatgctcatggtgagcaaaatccatgttttcagaggcgatgtttctggatgctggaaccagcatatgaacatattgtgctggtacaatatcgagaagtaggagcagctgagggtagatataattcagcatcactgttgaatgggccaacagattctctttcagtcttgagttatccaaatgctacatatggaaaccaatatcttggctccacttctggcgttagtgatggtagtgaatcactccattctaatttgagctctgtaacggaggtaagttcctattctgcaaacaaagacaatggtattctgcaaagcatacaggagctcagccagtcaactataatgggtgcaccggcgcttggccagagtagtctggagcaaagtattgaagttcgctgggtagataacagtaattcaacaaataaatctgggctcaaccgagctttgaagcaaattgttgagcagttaagcttgggggatgatgaggatgatgactacatacaccaagcacagccttttgacttcattacaaatattgaagctccagataggcagcgtgatgcaagcagaaatgtttcagaatatcaaccaccaggaagtctatacaacagtgatatgcagcagatttctgctgctaaaagatttcttttggagacagaagactctattgattcaccatcttataactatgtgcccagagaagaaggaaacaatggcactaatactctttcagttcatgactatagtcttcagagcagtctgaacccagattggaaaaaaacagcacctctaacacttcaaagcaatttgtatggctctgaaataccaagcttattgttggaccatggtcagtttgaatcattgtcctctggtgaaaatacaagattgatcttgggtcaaaacccccggtttagcatccgtgaggtctctccagaatggacatactgctatgagatcaccaaggtcatcattactggagatttcttatgtgatccatcaagctcatgttgggcagtaatgtttggtgatagtgaggtgccagctgaaattgttcaggcaggtgttcttcgctgccacacaccattacatagtagtgggaagctaacaatctgtgttacttctgggaatagagaaatttgcagtgaagtcaaagactttgagttccgtgcaaagtcaacagcttctagtttcctagacatttcaccatcatctagatctctgaaatctagcgaagagttgttacttcttgcgaaatttgtaagaatgctattgtgtgagaatggaagtcatgcaaattcaaacggtgatcctcagtctgtgcagtgtccaaaacttaagatgaatgacgagcactggcagcggttgatagatgaactcaaaggaggatgtgagaatccattaaacgtgtctgattggattatggaggagcttcttaaaagtaaattgcagcagtggttatcagttaagctacaaggatatgatggcatagcctgttctctgtccaagcatgagcagggtattatacacttgatctctgcactaggctatgagtgggctctgtcttcaattcttagtgctgatgttggtataaatttccgtgatacgaatggatggacagcacttcattgggctgcttattttggaagggaaaagatggttgctgcacttcttgctgctggggcgtctgctccagcagtcacagaccccactgcacaagatccagtgggaaaaacagcggctttcctggcttctgaacggggacacttgggccttgcagcctatctttcagaagtgtcactaactagttatcttgcgtcgctcactatacaagagagtgatacttcaaaaggatcagctgcagctgaagcagaaagagcagtagagagcatatcccagaggaatgcccagctgcatggtggtacagaagatgagctctcgttaaaggactctttggcagccgtgagaaatgcagctcaagcagcggctcgaattcagaacgctttccgtgccttctctttcaggaagagacaacaaaagactgctcgacttaaggatgagtatgggatgacccaagaagatatagatgaacttgcagctgcatcaaggtcatattaccaatctcttcttccaaatggtcagttttatgataaagcagctgtctcaattcagaagaaattcaaaggttggaaaggacgaagacattttctcaacatgcgcaggaatgcagttaaaatacagctgtattttacacaagcacaaggaccttaccttagcggcccattctttgtacaggctcatgtaagaggccatcaagtgagaaagaaatacaagactttcgtcagcactgtcagtgtgctagagaaagtgatactgaggtggcgtcggaaaggacatggtctacgtggcttccgagctgagcaaacagcaatggctgaagcagaagaggatgacgaggatgatgatgatgacgacttcaatgatgatgaagcggtcaaagtgttccgccgacagaaggttgatgaatctgtcaaggaggctatgtcaagagtactgtccatggtggactctcctgaagcaaggatgcaatatcgtcgaatgcttgaggaatttcgacaagccactgctgaatagggtgcatcagatgaagcggcatcaacactcgacaatgatttactaacaagaatcgacgacttcatgcactgaaacaatgcatcagacaaggggcgatcacggagctgtctacagttaattaggaaatagatagtctgcagctaatttatgacctgatagtgttccgtttgtacagtctttgcctgatggatctatctaatgttctgagtaaattattgttatttaggaacactttacatatgtaattcgaggggaaataatataatgttctgagtacattattgttgcttaaaaaaaaaaaaaaaaaaaagaaaaaaaaaaaaa

SEQ ID NO: 8379 - DNA, 1134 bp, Oryza sativa
  unsure (1)..(1134): unsure at all n locations
  Clone ID: PAT_MRT4530_14891C.1
ggcacgaggaagggagtaagtactacatagtactgtattaatttctntgttcagctgatgtaaatcagtcccccgtattaattttatatcttacggcaatagtttgagaattttacctggaatgtttgtatctaaataccttcttagaattttggtgcttacaagactaaaatgattggtggttcaagattttcaactaattcataccaagctataaataatgttatcttcaatgacttaataacagtatttgagaattcatggacattcagttaagttatacatcagttgctgttaacatgtgaccagcagaacactttaactcccaagtcatggtttgaaaataattagctgcatacttgtatagaagggaaattcattcatctttgttgcccattttggagctggttgctgcacttggttctcacattgtgaggcagtgtccttaagtgtcatggtaagttttctcactatttgagcctaatacactttctactagagcacttggtattcactaattagcactcagcgccttacaggttactgaggaacaaaattcgttgaaggtgacttgttttaattaagcataataagttgggtcagaactatgtcataacaagttcttcctccgggttgataatacttgtcgttttggacaaaggcaaggtctccaaaaagtaactttgataactattttctattataatatatataggaatatcaacaaatatatggttttactgaagtactttttaagactaatctacgcatatggttttcatatttttaagataaatattttagaaattatttgtagtcaaagattttaaagtttaactttacccttgtccaaaatgactaatattatcagcccggagggagtataacaaataaataacaagtattttgtgttccatcaacaaaaagggttacagaagataacttgtttttaagcttgtaactgtaaaaaaaactactaggtgttacttcaatactacaaaggaatctgattgatacatgtataggagttgattgagcatgatatatgacttgtgcagttgtgccatgcactaagagtagtttaaatgttactaatgctagcgcaactgctcaagtctttccttgcaatactat

SEQ ID NO: 8380 - DNA, 144 bp, Oryza sativa
  Clone ID: PAT_MRT4530_14892C.1
atggggaagaagcaggacccggcggtggggaagaaaaggacccggcagtggctccggcgtggccgcggaggagcggtggcagcggggatccgtctgcacgacgacgatgaagaaatgattcttgttccatctaacctaatctaa

SEQ ID NO: 8381 - DNA, 1832 bp, Oryza sativa
  Clone ID: PAT_MRT4530_14893C.1
gcgcgcgccctgcgttcgcatgcgagacagagaggtcagtgaaggtagcaatggcggcagcctcctctgttcttcgttgctgcctcctcgtcgcagcactgatgacgctgtccgcaatgggagctgaagccatcacaaggcagtacctattcgatgtgcaaacgacgagcgtgacgcggctgtgcagcacgaagagcatcgtgacggtgaacgggcagtacccgggccccacgctgttcgcccgcgagggcgaccacgtcgaggtcacggtcgtcaaccactccccctacaacatgagcatccactggcacgggatccggcagctgctgagcgggtgggcggacgggccgtcgtacatcacgcagtgcccgatccagcccgggggaagctacgtgtacaggttcaccatcaccgggcagcgtggcacgctgtggtggcacgcgcacatctcctggctgcgcgccaccgtgcatggccccatggtcatcttgccccctgccggcgtcgggtacccgttcccggcgccgcatgaggaggtgcccatcatgttcggcgagtggtggaacaacgacacggaggcggtgatcagccaggcgctccagaccggcggcgggcccaacatctccgacgcctacaccctcaacggcctccctggccccctctacaactgctcagcccaagacacgtttaagctgaaggtgaagcccgggaagacgtacatgctgaggctcatcaacgctgcactcaacgacgagctcttcttctccatcgccaaccacacgctcaccgtggtcgacgtcgacgcgctctacgtcaagcccttcaccgtcgacacgctcatcatcgcgccgggccagaccagcaacgtgcttctcaccgccaagccgacgtacccgggcgccagctactacatgctggctcgcccgtacaccaccacgcagggcaccttcgacaacaccaccgtcgccggcgtcctcgagtacgacgacccctgccccaccaccgccgccggcaagatcgtccccatcttctcccctacgctgccgcagatcaacgacaccaacgccgtctccaacttcaccgccaagctccgcagcctggccagcgccgggtacccggcggcggtgccgcagcaggtggatcaccgcttcttcttcaccgtggggctcggcacccacccctgcgccgtcaacgggacgtgccagggacccaacggctcccggttcgccgcctccatcaacaacgtctccttcgtgctcccggcgacggcgctgctccagtcgcacttcgccggcaagtccaagggcgtgtacgcctccaacttcccgtactacccgctgaacccgttcaactacaccggcacgccgccgaacaacaccaacgtgatgaacgggaccaaggtgctcgtgctgccgtacggcgccaacgtcgagctggtgatgcaggacaccagcattcttggcgccgagagccacccgctgcacctgcacggcttcaacttcttcgtcgtcggccagggcttcggcaactttgaccccatcaacgacccggccaagttcaacctctacgaccccgtcgagcgcaacaccgtcggcgtgcccgccggcggctgggtcgccatccgcttccacgcagacaacccaggcatgtactctgaaccacatcgattcccctgcgattccacatttgcaccaacttaaaaatggcgtggctggtgctggatggcagccgtcctgaccagaagctcccgcctccaccgttggatctcccaaaatgtgttgtccgatcagatatatattttgctgcttcggtttctcatcgtcgatcgacat

SEQ ID NO: 8382 - DNA, 480 bp, Oryza sativa
  Clone ID: PAT_MRT4530_14894C.1
gaatttctgaattattcagagtttcatccattccactattcgctagtgctaatctacgctgtgatagggaggaggaggaggaagggatcgagcaggttggttaggttttaccaggaggggacgaggttggcggctatgaagaggaggtagccggaggtgccgagcacgatcgcgcgcctggaccccatccgccggaccaccggcgagcccaccaccgagaacgccgtgaacgacgtgtacaggagccccagcgacaccgaccccaggttctcgtcctgcaaccccacccacccaccagcaatgcaaaacaccaaatccgatcggattaatctgaatccatggaggccgcgtctgcgtgatcgatcgatcggtcgaattgaatcgattcggctaccgtgttgacggtgctctgcaggttctgggcggcgtggtaggcgaggaacacaaataggaaggccgagctcatcacgtgcaagtcgc

SEQ ID NO: 8383 - DNA, 279 bp, Oryza sativa
  Clone ID: PAT_MRT4530_14895C.1
atggcccaaaatggtggtcaagaggtcatcgggagccgccatctcaacgccgagactgccaccggtgccggagttgggacgacactgagtccggcgacggcgtcgagccgtccactcagcggccaccaagacgatgaggaagagaaggacaagcggaggagtccgcttgcatattggactgcttccccaacgcgcgccaacgagatgaatccgcattctaccggcgagggctcggcggcggaaggcaacgaggaactggaggccttcgtatttgagtaa

SEQ ID NO: 8384 - DNA, 460 bp, Oryza sativa
  Clone ID: PAT_MRT4530_14896C.1
ctaccgcttgtttaaccatacaaaaccatcaaaacatgcgtgcatacatggttgatccacgaaacaaaacggcaccaaaccaaagatgtgtgaaacgaagcagcacacaagaagaagatcatgggtcgggtgatgggctagtagaaaacaaaagcaccccgtacgtccatcttttggcagtggatgaggacagtaactagcagctagctagctagctacttcccttggcgtgccgaagccgaagcaaaagccgcgttctcgggggtcttgtgggcgtcacggccggcgacggggtctccgattcccaactgggaacgtgaaatgctcatgggcctactaacacaatctcacctttgtctggagcaccatcggccaggggacgcccataataccggggccgaggagacccgtgttccaagcaccagacggatgtctttcatgcgggcgatgacgctgccct

SEQ ID NO: 8385 - DNA, 255 bp, Oryza sativa
  Clone ID: PAT_MRT4530_14897C.1
gggatgtgtgggctcgggttgaaattgaaatgaattgcggtcaagataaaaggaaacgaagagataagaggaacactatcgaggactcctcctcatggagccgcgcggctggatctaggattccagcctgctgattttagagacgagtgccactgattcagcttcaaagttagcatgagtactgtcagcggcgctcgacgtgccccaaggaggcaatcacaagatggacctggtgataaagacgttgtgaacctg

SEQ ID NO: 8386 - DNA, 377 bp, Oryza sativa
  Clone ID: PAT_MRT4530_14898C.1
ggggagacggcccacgcgaccgcccacgcgtgcgcccacgcaccgatctcctgctgctcccgagcataccgaccccatggccgaagacgatctaaaccaccacctcatcgcacgcggagacggagaagaagccgacaccgcccattgctggctgcgcgcgggtgagcggaatatggcgcagctggtggtgtcgctgggcatattggtcgccgacgacaagatggaggagcaggccttcgcagccgccaccatcaagttccccagcgccctcagccgcatgcagctgcggactacgacctccgcctctgactacctgctgagatcgccaacggaagcatggcacccttcgaccccgccaccggcttcatgcacagggg

SEQ ID NO: 8387 - DNA, 1998 bp, Oryza sativa
  Clone ID: PAT_MRT4530_14899C.1
atgctgccggggtcggcggcgccggcggctgggagcggcatgttcgtgccaacgcagacggtgggcacggtgctgtgctgcatctgcggcgtggcgatgcagcccaacccggccaacatgtgcgcgcgctgcatccgcgcccgcgtcgacatcaccgagggcgtcccgcgccacgccgccgtcgtctactgccccgactgcacctcctacctccagccgccgcgctcctggctccgcgccggcccggagtcccccgagctcatgcagatcctcctccgccgcctcaaccgccccctcgcccgcctccgcgtctccctctccgccgccgagttcgtcttctccgagccccactccaagcgcctccgcctcaagctccgcctccgccgcgaggtcttcaacgccgtcgtcctcgagcagacccaccccgtcgagttcaccgtccacgatcgcctctgcgatgcctgcgcccgcgcccagtccaaccccgaccagtgggtcgccgtcgtccagctccgccagcacgtcccgcaccgccgcaccttcctctacctcgagcagctcctcctcaagcacggccaggcctccctcgccctccgcgtcgccgccgcccccggcggcctcgacttcttcttcggctcccgctcgcacgccgcccgcctcgtcgacttcctcgccaccgtcgcccccgtccagacccagaccgccaagcagctcgtctcccacgacaccaagagcaacgtctacaactacaagcacaccttctccgtcgagatctgccccatctgccgggaggacctcatcgcccttagccctcaggtgtcccgcgatcttggaggccttggacctatcgtcctctgcatcaaggtcaccaatgccatcgctctgcttgaccccctcaccctgcgtgtgcaccacctcgaggaaaagaagtacagggtctacaacttcaaggctgctctcaccagcaagcagctcgtcgagtacatcgtgctagacatcgagcacgagtcaccagagattaccattgacggatctcgctaccagttggcttatgcccaggtcgcccgggtctccgactttgggaaaaacgacaccatgttcaccgtgcggactcatcttggccacctgctgaatcctggagaccttgcccttgggtatgatctttatggtgccaacttgaatgatgatgacatggacacagctatgatgcgccacagtctgcctgaagtcattcttgttaagaagagcttcgccaagaggccacgcacacgccgatggaagctgaagaggcttccaatggaggaagatgctgtaaataaggccaagggggagctagagaagagggctgatgagtatgaggagtttctcagggacttggagcacaactctgatattagattccagattgatctatacaaggatgaggactacaggtcggagatggcatctactattggtgatgatgttcccactgtgccgattgaggaactaattgaggacctaagtcttggtgatgatgaggaggaggatgaaggtggggaaggcaaccaacatgctgttatggtgggatgagttaatatgtttacctgtgctgtgcttctgccttctggtgatggttgctgccaaccgcagatcataggtctgaactgcatctgtttaatccgtataagttttgttctcccctttacttctataagttataagttttgttgctaaattgtttcaacttttgctgtttctcatgatagatgttgtatcaccttatcctgtatctggtgttgcagcttggcttaaattatatttctctataaaaattgtctgtgatatgttgttttcttgccatagtgtggctgatcacaacatatcttaaaatagatgcattgtttgatttccaaaacatctagtttggtgcttagattgtgcccaaaaaaaaaaaaaaaaaaactcgagactagttctctctctctctctccctcgtgccgaattcctgcagcccgg

SEQ ID NO: 8388 - DNA, 2403 bp, Oryza sativa
  Clone ID: PAT_MRT4530_1489C.1
atggcggaaagcaaggcgacgagcacggcggcgctagggcgtgcgtgcttgccggagagacgacctccctcgccagcgacgccgaagaggggaggtaatcgagacgtttcgataggtgggaaatggtgttggaatacccatgggttagcccaagggcccgacactattcacgcgggctggagtggtggggctcgtggaatccgccatggatggtccatgcgtgatctgctcccgagcccgattaaggaggtttttttgtctgcgagctgggtgtgggtgccgaaagggggttctctgagtcctcatctagggtttccagccaccaggcgagaggtcgtgcgttttggggcgacgacgaggcggatctggagagctccggcgagactcactgacgggagatccttcctcgaggtagcgaagggaagtatggatcgtaaacctcaattccaacgtcctgatcaatgggttcccaataagagaagagcgttcgaagaggaggggggaggtgggaattgggggaatcgaaatttgcaggaaagggaggaacgtgaacttcggaatcggttgatggggcaacaacaacagcgcgaggaagggaggtggcagcaagttgagagaaggggggccaacaaacagtggcaaggagacagaaacagggagggtggtgcttgggagggaggggatcggcgtccgactcgtggaaaggagaagctgggggaggaagggagatcaggtccttcccagaaggaagagatcaagtgtttcaactgtggagaaagtggttatcatcaggtgaactgtcagaaacctcctctgtgctatgtctgtaagaatcctggacacatctcatctcattgccctgttcatgttggggggagtagctctaatttgagcaaactagaagtaaagctaaaaggttatggcatacctgagcagggttttttcagcctaaatgtagataatttaggtgtggctgagaaaggggcacaattcagaggaatcctaactgtggagaaaggggctggttcagtgcaaaaggtggccaatgagatgtctcatctatttagggagaaaaattgggattggaatgtgaagcaaatcagcagtaataatttcttgattgatttcccgagtgaagatgctagaagacaagttactaagtcagggggtttcgccaaaaagcaggaaatcattagagcaatatctgatattgtgggtgaatttaaagaagtggatgagaaatctttgaagggggaaggagctgttaggataaaagtgggatgcttggaccctagtgctatcaactattctgtcataatatatattaatgacattggatataagataaaatgggaggcagaggttgatacagaggggacagggtctattgattggggggggacaatgatgatgatgatgctgatgatctggatgatgattaccctccaggaggaaagaaaggtgggggtcaggatgccaaagggagtccaaagaaaaaggaacctgctaaggatgcagatagcaaaggaaggattgtcagtggagaatgaggtgggggtcactgctaagggtgaggatcctattgaatcaattaccgtggagaaaaaggcagacaaggcagtggtgttatggaagtcagaggaattttcacaaccagaattgtttgagcaagtttcacaggaggaggacaaaagtggtgaccttctcaaaagaatggatgtggatttaaaattggggggtgttagattattcacagatgaagagggggagaaatgtgctatccccgctgactcagacattgagttgatgagggcagaggaagatgatgacagtgaacaactagatctggaaagtgaagcagagatacagctcaaggaggttaacttccagaaagtcaggcacaagaaaaagcaagttagtttggtcaagagacagagttctagggtgaaggataaagaggtatcagttcatctaaaagctgagctcaggaagtccaaaatgaacatgacctcaggtatgtcatcaaaaaattcttatgcaatctttcattctgttagtcaggattatcttatcaacattgctagggctaggggaatctctttgggtgacaattctgtggaagtgagatgcaacttagatgctatttgtgctagggaattggcacaggctactatttttgatgcagataagagtttacaacagatggctgaaaaagcaagtttggaggaagaaggggggcaggaagtccccccaaatgggaatagtgtaattctggggttttctgtggtagaaatggagaatgatcagtttgttgagggcctgaaggaggaaaatagggatgagttggatgatgcagataaagagagttctgataatctgggggattttgacttgcatgactag

SEQ ID NO: 8389 - DNA, 403 bp, Oryza sativa
  Clone ID: PAT_MRT4530_148C.1
aacaacatgggggacaggaacaaccatttttaaatggccctacaactccgttttttttatggtggaaaaatataataatttttttggttgaaacacgttttggaaaatttaagcgggaattaaggaagtaattttttttttgtggcagtaaaaaagtcccccaccccccgtttttttattcccccaaaaccatgggtggatcggccggtaagggtttggttttcaccttacacgagggggggggaaatggggattcccccgggaatggggaacttggaaaactttattcccgggttggggggaaaccttgaatttagggcccttatggggaagggaaaacttcgggccaaggcccaaaagggggtgttcggggggaagcccccccgggcgggccaaaaggggg

SEQ ID NO: 8390 - DNA, 351 bp, Oryza sativa
  Clone ID: PAT_MRT4530_14900C.1
atgacgaggaccccacgagcagacgacgaggccatcgagggtgctgaggtggaagcgacgaggagacggagcgaggaggacggcggtggcgacgtggatctggagcggcgccgggcccctcctctcttagccggcaacaaggagacggagcgcggagacggaaaagaagcgtggcgacgaggagatggcacggcggcgaccccggctctccttgccaccggtcgtcgtgcctttctcttccgttggtggctctccctcaccacccactccttccttggcgtcgccgcgcccccgaccagcccccaccgtttcttcctgtgctccggctactccccttcctcgtcggactag

SEQ ID NO: 8391 - DNA, 723 bp, Oryza sativa
  Clone ID: PAT_MRT4530_14901C.1
atgttagaaagtaatggcaatggtggagaagagcctagtttggctcgagtccttgcggcccttgagagaaatcaaagtgttaatgcaatgaatcagttgaagtttcttgaggctattgcaactcagttgatgagtaatcgtactctagaagcatcatcatcaaatggatctgcactagactatatgcagcaattcacctatctctccaggtatgctctagatgatgttaacactgagactaagaaggttgaagctttcttcaatggcatgcaagactctctgaagttccacctgtctggtttcaaatttgcaacacttcatgagcttgttgatgatgccattcagaaggaagagacccgtaccaacttagaggagtctcgcaagagaggcaaactagattgtgctaagaaggttgtggagatagttggtgcagatggacaaaacgttgagtacaaaagtaattctaagatgaatgagtttaaaaagagggttgtgaatgtggcaattgcaaaaggagttgtcccaatagtcaatgagtatctagaagtgttccctgatgacttgctaggtatgccaccggatagagaagtagagtttagtattgagttgaaaccaggaaccaagccagttgctaaagcaccttataggatgtcagcaagggagcatgatggattgaagagacaaaaagatgagtgtcacaccctaaaaatcctaaatatataa

SEQ ID NO: 8392 - DNA, 1656 bp, Oryza sativa
  Clone ID: PAT_MRT4530_14902C.1
atggctgagcagactgagaaggcattcctgaagcagccaaaggttttcctcagctcaaagaagtctggcaagggtaagaagccaggtaagggtggcaaccgtttctggaagagcattggccttggcttcaagactcccagggaagcaattgaagggacatacattgataagaagtgcccattcactggaactgtttctatcagaggcagaatcattgccggaacatgccatagtgctaagatgaacaggactatcattgttcgcaggaactacctccactttgtgaagaaatatcagaggcaagtaaacaattatggattctacttatgtatgagaagaggcattccaacattccggctcacgtctccccatgcttccgtgtcaaggaaggtgaccatgtcatcattggccagtgcagcaccggcggccattaacgcgctccgccgcctccgccgatcctcggctccggctcctcctgcagacgcgtccgccgcagcggccacggcgaatggtagcgggagagatagctgttctaagatgagactgcggttgcatctgctgattctttgcttgatcattttatttctggtttataacatggcgagttaccaacataaacagacaaagttggaagcaaaatcccgtccatttgatacaattacggtgtctgacaaagtgtcttctaaggtgtctaaaagatctgccaatagggttggttttttaccccatggtatagtggaaccttactctgacatggagttgaagccattatggctcacaagaagtgcgcaatcaaaggattctagccagaaggatcggtgcttgcttgccatccctgctggtatagatcagaaaagaagtgtggatgctattatgaagaagtttcttccagagaattttacagttatgttgttccactacgatggtaatgttgatgggtggaacgatctaccttggagcaaaagtgtgatacatatagctgcttctaaccagacaaaatggtggtttgcaaaaagattcctccatccttctgttgtctccatgtacgagtatatatttctttgggatgaagatctggaagtagataactttcacccaaggaggtacttgaatatagttaaatcagaagggctagagatatctcaaccaggtcttgatcctaaattgtctgaaattcatcatcggataactgttcgtaaaaaggggtggagtttccacagatgggttgagggcatggcaccagttttctcgagatctgcttggcgatgtgcttggcatcttatccagaatgatcttatccacggatggggcattgattacaaatttgggtactgtgctcagggtgacagaacaaagaacattggagtagttgatagtgaatacatagttcatcgaggggtacagacattgggaggtccttcagtaaagcgatcccatggcaaaaacaatgatccacttcaccagaaaactgcagaagcgcaacaacagatgagagtgaaggcaggccttgatatgcggacaaaggtcaggagatattcacgatcggagcttcgggatttccagaagcgttgggagcgggccaccagggaagacagagcatgggtcgatccgtttgctcgcccacgaagaaaaaggaagagaactgatagacaatag

SEQ ID NO: 8393 - DNA, 1059 bp, Oryza sativa
  Clone ID: PAT_MRT4530_14903C.1
cgtgccgtaccggaacggcagggtcgacccgcgcgacccgtccgaaagggagcattctgtcgccagctgggcatcacaccactcttgaagtacacaccaaatgcgagcctcgggtcgatagttatttgtgcggggatcggacttgtggactacaaagcacctattatcattgggagggtctgcaaaatggatttcatttcttgcatgggagcattctttggtgtggtcttcgcatctgttgagataggtcttttaatagctgtatcgatttcatttgctaaaattcttcttcaagtaacaaggccaaggactgtacttctgggaaaccttccaggcaccacaatatacaggaacactgatcagtatccagaagcaagacatattcctggggttgtaatagtgagggttgattctgctatctacttctccaactcaaactatgtccgggagagaactcttaggtggttgacggaggaagaagagaaagccaaagcagagggacagtctaaaatcaatttcttgatcatagagatgtccccggtcatagatatcgatacaagtggcatccatgctctagaagatctatacaagaatcttaagaagagagacattcagctcatcctagcaaatcctggatccatcgtcatggaaaagctcttgtcatccaagctcaacgagcacatagggagtaacaatattttcctcacggttgctgacgctgtgcgtttctgcacaagaaagtcgatgcaagaaccatgaagaaaaatagatgagagataaagagagagatgatgaacaatattatatagcatatgcgtatcatctacttatgatatagaggaatagatccatagtcaaatcagctggttcagtgaaatactggtgatagcatatacaattggaaatagttgtatggtgaatagggttgctataaaccaaaatgtcatgacagacaaatggaaggaaactgataataataggttaaggcaatccttcctaccctgaaaaaaaaaaaaaaaaaaaaaaaaaacagacaatataaaaataacaaaaaatacg

SEQ ID NO: 8394 - DNA, 499 bp, Oryza sativa
  unsure (1)..(499): unsure at all n locations
  Clone ID: PAT_MRT4530_14904C.1
aaaggagaagagtgccctctaacctacctatgccttcctccaaaatcctgatatcttgagccacttgttgctgccactctgccataagcttccatcctatcaagcaccaatatatgagccactatagactgtacactcgcagcaatcccactcttgagcactgaatcaccaagaggattacctgtgtaggtgttgtgtgctgtggaagtttcttgggagggcaagctgtgcagattgcatagcttcagtttctgcattgattcaatggggagacattcctgctgctacaagcagaagctgaggaaggggctctggtcacctgaggaggatgagaagctcatgaaccacataaccaagcatggcatggctgctggagcaccgttcccaaactttgcaggggtttcagagatgtngcaaaagctttcaggctgaggttgggtnaactacttgagggcttgnccttaagggggggtgcattctntttaggggggagngggcc

SEQ ID NO: 8395 - DNA, 702 bp, Oryza sativa
  Clone ID: PAT_MRT4530_14905C.1
cagagactcgcaacgcaggtcagagcggaaggggagaagaaggtgctcctctcgagtctggagaagactcccgcctctccggatcccccgcgcgccgccgccgccgcccgcccgccggtcgatacccctccgcggcagccatggctgagcagactgagaaggcattcctgaagcagccaaaggttttcctcagctcaaagaagtctggcaagggtaagaagccaggtaagggtggcaaccgtttctggaagagcattggccttggcttcaagactcccagggaagcaattgaagggacatacattgataagaagtgcccattcactggaactgtttctatcagaggcagaatcattgccggaacatgccatagtgctaagatgaacaggactatcattgttcgcaggaactacctccactttgtgaagaaatatcagaggtatgagaagaggcattccaacattccggctcacgtctccccatgcttccgtgtcaaggaaggtgaccatgtcatcattggccttcaccgcagcatgagcttgtactcgcattattcatgggtagtttatagacagatccttttgcttgaagtcctggcagggctggtgttttgaccctatcgatttggatattgttcccaacaaaacgaagtcttatcatcagaacgtgttttatggaatcactctatgcgaagttttgtgg

SEQ ID NO: 8396 - DNA, 973 bp, Oryza sativa
  unsure (1)..(973): unsure at all n locations
  Clone ID: PAT_MRT4530_14906C.1
gcggggccggccggggcgccgccgcatcctccttcgcaagcctcgcctccactccccgcgccgccgccgccgccgccgactcgccggtcgtcaccctcgccccgcagccatggctgagcagactgagaaggctttcctgaagcagccaaaggttttcctcagctcaaagaagtctggcaagggtaagaagccaggcaagggtggcaaccgcttctggaagagcattggccttggcttcaagacccccagggaagcaattgaagggacatacattgacaagaagtgcccattcactggaactgtttctatcagaggcagaatcattgctggaacatgccacagtgccaagatgaacagaactatcattgttcgcaggaactacctccattttgtcaagaaatatcagaggtatgagaagaggcattccaacattccggctcacgtctccccatgcttccgtgtcaaggaaggtgaccatgtcatcattggccagtgcaggccgctgtcgaaaactgtgaggttcaacgtcctgaaggtcatcccagctggatccaccggcggcagcggcggcaagaaggccttcaccgcagcatgagcttgtactcgcattattcatgggtagtttatagacagatccttttgcttgaagtcctggcagggctggtgttttgaccctatcgatttggatattgttcccaacaaaacgaagtcttatcatcagaacgtgttttatggaatctactctatgcaaagttttgttaaaatacctgttaatgctcgatataaaaaaaaacataaattaacaagaaaaaaaaaaaaaaaaaaaaaaaaaaaaaaaaatataactaacatttcaaaagatgtctctatttcacatgaactaaaagatcttgtgatgtttgcttnnnaaaaaaaaaaaaaaaaaaaaaaaaaaaaaaaaaaaaaaaaaaaaaaaaaacctgaactagttctc

SEQ ID NO: 8397 - DNA, 291 bp, Oryza sativa
  Clone ID: PAT_MRT4530_14907C.1
gatatctcaaccaggtcttgatcctaaattgtctgaaattcatcatcggataactgttcgtaaaaaggggtggagtttccacagaaaagttaatcggggaaacaaagattgtgcaaaagagggaccgccttgttctggatgggttgagggcatggcaccagttttctcgagatctgcttggcgatgtgcttggcatcttatccagaatgatcttatccacggatggggcattgattacaaatttgggtactgtgctcagggtgactgaacaaataacattggagtagatgt

SEQ ID NO: 8398 - DNA, 1151 bp, Oryza sativa
  Clone ID: PAT_MRT4530_14908C.1
ccggccgggctccttcttagcaaagcctcgtctccactcccctgccctcccgcctctccggatcccccgcgcgccgccgccgccgcccgcccgccggtcgatacccctccgcggcagccatggctgagcagactgagaaggctttcctgaagcagccaaaggttttcctcagctcaaagaagtctggcaagggtaagaagccaggtaagggtggcaaccgtttctggaagagcattggccttggcttcaagactcccagggaagcaattgaagggacatacattgataagaagtgcccattcactggaactgtttctatcagaggcagaatcattgctggaacatgccatagtgctaagatgaacaggactatcattgttcgcaggaactacctccactttgtgaagaaatatcagaggtatgagaagaggcattccaacattccggctcacgtctccccatgcttccgtgtcaaggaaggtgaccatgtcatcattggccagtgcaggccgctgtcgaaaactgtgaggttcaacgtcctgaagaatggtagcgggagagatagctgttctaagatgagactgcggttgcatctgctgattctttgcttgatcattttatttctggtttataacatggcgagttaccaacataaacagacaaagttggaagcaaaatcccgtccatttgatacaattacggtgtctgacaaagtgtcttctaaggtgtctaaaagatctgccaatagggttggttttttaccccatggtatagtggaaccttactctgacatggagttgaagccattatggctcacaagaagtgcgcaatcaaaggattctagccagaaggatcggtgcttgcttgccatccctgctggtatagatcagaaaagaagtgtggatgctattatgaagaagtttcttccagagaattttacagttatgttgttccactacgatggtaatgttgatgggtggaacgatctaccttggagcaaaagtgtgatacatatagctgcttctaaccagacaaaatggtatggcatctttctgcccttcctctgtgagaagagcctgactttgagtgctcttgctgttgaatatactttgcttcaccttgcgatttctactgatctggtgtcgtcttaa

SEQ ID NO: 8399 - DNA, 267 bp, Oryza sativa
  Clone ID: PAT_MRT4530_14909C.1
atggagctggactgctggaggaagaacggacgttggcaccaacatgtggttgccaagagtcacactggtgttgacatggctagaggttgcttcaagaagcctagcacagatggtcaaagctcgaccttgccctccatcgacatcgtccatgggcacctggctcgaccttgccctccacagacaccacatctggaatcgaccaagcctctagcctccagacaggttgtccctaggcttgacgccagcctccatctaagacatctctaa

SEQ ID NO: 8400 - DNA, 873 bp, Oryza sativa
  Clone ID: PAT_MRT4530_1490C.1
atggagttatgccggcatacgtgtgaagcatgcgaatgcgagtatggtgctgagaagaccaacgtcacacggaaaacttcagatttcaagcaccataatttgagcctactggaaatgaaagggtttgaggttaagaagagggtgatgcaatacttaggcctctcacagtgcactgagctaagaagaacagatcggattcaacaaaatgaaaaagaaaaagaaagcaaaatcatcacaggattcgcgctgcatcggcgcgtcggctcccaccgtcttgacggtggcagcgtcaccgctggcggtggcgttgaggacggcgaactcgtcgaggctgatgaagccgtcgccgccggtggctgtgtggccgaggctctcgagccacgagatctggccgttgccgttgtcgtcgaactagacgaggctagccaccgccgacggagtctgccctgctccggaccgccgccaccttctccatctccacctccttctcggccgcggcccttcaccgccgcctcgaatcgctcgccgctccagggcctcacgcggacaaccgccgaggccaccagatccgccgtcttggccggagagatgccgagctctgccgccaacaccgccacggataagctgcggcggcggtggacggagacagacgtgggaggaggcctcggccgccgctgctcgcggtcgccgtggtggaggaggcgcggcgaggcgcgagtgaggcggcgtggtcgacggggaggaggcggcgaggtcaacggggaggaggcggcgcggtcgaggagaaggaggcgcggcgcgtgggagggagaagaagaaggggcggtgcggctaagagaaagagaagggtcgcgagaaaggaagggtaggtga

SEQ ID NO: 8401 - DNA, 369 bp, Oryza sativa
  unsure (1)..(369): unsure at all n locations
  Clone ID: PAT_MRT4530_14910C.1
ccatttcctcntaaccccggcaaacaaaaaccanagagtgtggacttttaaagaaaacgacggggaaccccccacaccacccaaaaaaaagccaccaacaaacgacaggaaaacaccaacaacaaaacgaaacacaagcaacaaaaaaaccacccgccggggaaagagaaaaccaagaacaccagacccccaaccacaagaattttttagagttttaaaaaaaacatttaaaaaatccctttttttttgataatggggaaacaactttccttaattgattacccaacctttacccaccgcaaatttttttaaaacattccaactctttatctaacccctgatacatccctcttatacaccaaactccac

SEQ ID NO: 8402 - DNA, 288 bp, Oryza sativa
  Clone ID: PAT_MRT4530_14911C.1
atgacagagtgggatggccccagggaggttccgggcaaaagtgccaggaacttctgggcagtacttaggaaattttttgcaaataaacggcgcccggaagtttcggccagaacctccgggacactaaaagtttatggtctttgctatgagacattcaaagcacgcgtatctttttatggacaccgtaaaaacatgaccaaattcgatcccctctcctcgaaccctaagttttggggcaatgatgatggtgcggcggcgagttgcgtcgacaacggtgagctctggtga

SEQ ID NO: 8403 - DNA, 315 bp, Oryza sativa
  Clone ID: PAT_MRT4530_14912C.1
atgccaacaccgtgttgcttcaatcggccaccgctctcaccagagctcaccgttgtcgacgcaactcgccgccgcaccatcatcattgccccaaaacttagggttcgaggagaggggatcgaatttggtctgattcgagatagtcacaatcaccttcagaagccgatcgacccgagggggaaaatgagagggctacccggaggttctggccgaaacttccgggcgccgtttatttgcaaaaaatttcctaagtactgcccagaagttcctggcacttttgcccggaacctcctggcaggtttccagttcaaactt

SEQ ID NO: 8404 - DNA, 473 bp, Oryza sativa
  unsure (1)..(473): unsure at all n locations
  Clone ID: PAT_MRT4530_14913C.1
cccgcccgccaagcgaggccggcgtgggggggaggggccggcgcccgagggcgcatatctgctacgcggctggacagcggtctctcgacccagcccccgggggcctcgccctacctgggcccggattacaaaggcggccgggcgggcgggggcgggccngaccnccagcgcgcggcgggggggcccggtggcgagcgccggggcccggttctaaatcgttcgcccgcccgcggggccgccgcgtaacgggtgcgcgcccccgctggcgcccgggggggggtgggcgcacccggaacaaacacggtgggggcaccgggcgggaggcacacccgggagggtccnagccccggcctgggtcgggagcaacagtaaagaccgggggcnagtggccacggggggaggtcggcccccgcaacccggggcccgggtgcggcggacacaaccacaaccctccccccgggnntagtggatga

SEQ ID NO: 8405 - DNA, 784 bp, Oryza sativa
  Clone ID: PAT_MRT4530_14914C.1
ccggccgggctagccatccgctcacccccttcgcttcggtgactctctccccatctccttcccctaggccgccgctatgaaacctccggtcgccatggattctgccggaggaaactcaggtgagagctacccatctcacctcggcctgttcgcgcatctcacagtgcggaggcttggatctgatctgatccaccggtggctgttgtgcaggcaagctgttcgacgaaatgcctccccgttcgtcggatcgaggatgcccccggagcccgtcaccggcggcgatggaacacggcttcgacagacactgtgtggtgctcggcggaatgcccaagaagagatcaaggttggagttggacgcgggggtgtcactgtgggcaggccttcaaccggacattctgggaatcgtgctccacttccttccatgccttgccgaccgtgcgaggatgcggtccgtgtgccgtcactggcgagccagcgcgaacggccacgtcctgccaccgccgctgcccctgctgatgcttcctggtttcaagttctcgagcctatcagacaagggggatttgatgcctgtgcggtgcgtgccggtgcctaaggaagttgcagctgatgatccccgatgtgtgggttattttgatggatggcttgtaggtgtgactcctaacaaggatcgcagcgacgagtacaacagagatgccgatggtgactgctttctggtgaatgttttctctcgcaaggtcatccgcctaccgcagctgtgccatatgcgttacaattttcctgctta

SEQ ID NO: 8406 - DNA, 378 bp, Oryza sativa
  Clone ID: PAT_MRT4530_14915C.1
atgagcggcgccagcatctcacccccgccgccgccgcctccggacatcctcatcgccgccgccagctccgccgcgtccgacctgctccggccgcgcgcccgggccggcgacagcccgcgcgccacctcctcccgcagcgcggcgaagaagccgccgccaccaccaccaccccccctcctccgttccatgggatggacggacagggacctatttgcaattagagaaaactacggggggaacgatgagacacttatggaaaaggaatcgaagccgcaagatgaagcaaggttgatctacgtggacccgctagagcaaatggtgaatgcggtgcaacaaggaagaacctaccactatggcatgttgtggcggctgccatag

SEQ ID NO: 8407 - DNA, 1326 bp, Oryza sativa
  Clone ID: PAT_MRT4530_14916C.1
ctaagacgcccgatatttcaacacatcttcagcatcatgacccttgatattcttcatctcgtaccgtgtaaagaaattataaaggtccttcatcacaaaaccaacctcatctaactcatcatggttattctccataacctccatgatttgaaagggcctaaggccactcatgcgaagctcgaccgcttgggctttcttaaaatcactcatcacatgatgaactcctaaaaaagcaacatggtcaggatttgcaagttcgtgcgtatgttggttatcaaactccttaacaaaccacacccccttctcctcgttccgctcaatctcaagcttagctaagcaaccgcagcgggtcagtgcccgtggctcccttttccgctctgtcctctcaaagtgctttaactccctgtacccttcacatgagcatacgaattgcctccatataatctcaccgtccttccgtttcaagttgtttttcctcacactgaaacccttcccctttgcatagtctgatgatttcgccgtgcccagccgctggccgcgccgccgcctgcgtcggacagatgcgacgcgtggcgccaccggccgcgacgccgcctgcctggaggaatagccaccgggcgcgtagccgcctgccggtgcctgcctccgaccaaatgcgaaccgaagggggagggtgaagagggcggggagatgtacggcgacggagggggcgaagacggcggcaacagaggaagcgaagacgaaggtgacggatggagcgaagacggcggcgagggcgggggaggcggacggcgacggaggggggcggagaaggcgacgcgggcggaggagacagacggcgattgaggaggcggagaaggcggcgacggcgagcgatacggacagcaacggaggcgggcaaggcggcgaggccgggggaggaatggcgcgacggaatccacaccgcatgtgcatctggcggtggttcggcacggcggcggacccagcggctgctgctcctcctctcaggtgtggcgacgtggccgggagtggtgatgggctcaggagcggcggcgggctcgggagccagtcacggcggaagacgactacggcgacgacggcggtgaccacaaggaaggcggatgtcagttgcatgcggcgtccaggagggagcgcgggacttgcggaacggctggcgggggcagtggggcacccgctcacgccgccggtcttcacgccgctcctcctctggctcctaggcagaggggcgctttttcttctcgcgcggcttgggagttgggggttagtggacgaggccggcgagtcggggaagctgtccatgtccat

SEQ ID NO: 8408 - DNA, 168 bp, Oryza sativa
  Clone ID: PAT_MRT4530_14917C.1
aatctataaagacatacataataggaggggtttattttaaaattaggtggtcgttttaccaattaggagaattaacccctgaagaaataaccctttacaacaatttccaagagaactccttaagacagagagctctctgatgccaaatttgccctggctttgtgtaaa

SEQ ID NO: 8409 - DNA, 1946 bp, Oryza sativa
  Clone ID: PAT_MRT4530_14918C.1
ccggccgccgaaaaaaaaccgacagggaaacacacgcagccgtcggcttggtttcccccccctgaatccaagtcacctcctcctcacacctcaccttccccctctctcctccgatcgcgcgcgcatggcgatgtcacgagccgccgccgctgccgcggggactcccgtggcgcggcggcgattgatgggggccgtggcggcgaggtcgatggcgtcgtggttcggccacgtggaaccggccgccaaggaccccatcctcggcgtcaccgaggcgttcctcgccgacccctccccggacaaagtcaacgtcggcgtcggcgcgtaccgggacgacagcgggaagcccgtggtgctggagtgcgtgcgcgaggcggagcggcggatcgccgggagcatgaacatggagtaccttccaatgggtggaagcataaagatgattgaagaatcacttaaactggcctatggggagaactgtgagttcatcaaggacaagaggatcgcagcagtgcaggctctttcaggaactggtgcatgtcgcctctttgcagatttccagaagcgtttcttgccagattcacagatttatatacccacacctacatgggccaaccatcacaatatttggagggatgcccaagtaccacaaaagacatttacctattaccatccagagtcaagaggacttgactttgcaggcctaatggatgatatcaagaatgctccagatggttcattctttttgcttcatgcttgtgcgcataatcccactggagtagatccttcagaagaacaatggagggagatatctcatcagttcaaggtgaagaaacattttccattcttcgacatggcataccaaggatttgctagtggtgatccagagagagatgccaaggcaattcgaatatttcttgaagatggacatcaaattggatgtgcacagtcatatgcgaaaaacatgggactttatggacaaagagcaggatgccttagtattctatgtgatgatgagatgcaagcagttgctgttaagagccagttacaacagattgctagacctttgtacagcaacccacccgttcatggtgcattaattgtttcaactattcttggtgatccggagttgaaaagtttatggctgaaagaggtcaagggtatggctgatcgtatcattggaatgcgaacagcactcaaagagaaccttgaaaagttgggttcaccaatgtcatgggaacatatcactaatcagattggaatgttctgctacagtggtatgacacctgaacaagtcgatcgcttgacaaaagagttccatatctacatgactcgtaacgggcggataagcatggctggagtaacaacaggaaatgttgcctatctggctaatgctattcatgaggttaccaagacaaagtgagagtgttggagacattcctatcatcattttcagtacctttttaccgaccgcaaaatgggtcaaatggtgaaataaaattgtagtccgatatgatgtgaaataaaatggctggtaagctagaaaagggcaagtttattttttgaggacaagacttttgctgtaccagtgaaaacattttttaggacaagactttacagttagaacgaacgttctaactgtgacagtgtcatgctttgtaaaggaagtgtacctttccaccgatgggcatttttgattgctcgagtgtcatcaggaagtccacatactgtattaaacaggcccaatttacacccacagacgtctttagatggttctaaattgagcctaatgggctgatggcctttgttagttcggcccacatagacacccgacagtttatgggctaaaattaggcttgtccaaaatttcgattccgaaaggaaaaagtttacctgagatcaatatcaaataaatataaataaaatcacatatttaaataaaaaaaaaaaaa

SEQ ID NO: 8410 - DNA, 3441 bp, Oryza sativa
  Clone ID: PAT_MRT4530_1491C.1
atggcgtgtcagccagtaagcaccagggtttacattattgtcggcaagcatgcggttaccggccttaccgcgtgggtacggttaaacaacactatagagtccaatgaggttctgttttctaaaacaagaagtgggcttgttaggataaacagcactgtagagtccaatgaggtttcgctttctaaaacaagaagtgggcttattaggggaaacaccaatgtgagatccaatgaaggttcatattctacaacacgaagtgagcttgctggggcaaatggcgttgtggattccaacgtgggagatttatgttctaaaacacgaagtgggcttgttagaagaaatgccactttggattccaatgagggatcatgttctaaaacacgaagtgggcttgctaggggagatggcattgtgggtttaaatcaaggttcatcctctaaaacaagaagtgggcttgttaggggaggtgacattatgaatttcagtgaaggttcatcctctaaaacacgaagtgggcttgttaggggaaacactactgtggctgccagtaatggttcatattctgcaactccaagcaggtttgttagaggaaacatcattgtgggttccaaagaggggtcatgttcaagaacaagaagtgggcttgtcagagaaagcatccagatggattacagtgacagttcatgctctagaactcgaagtgggcttgtcagaagaaagccctttatggttcaagtcaaggatgaagctgccatgaatgggctgtctgatgactgtttgaaagaggacagtccaggaaagaatgaaccaaatcacaagagtaatctggttgaaaatagtgataaaccagtcatgaaggggcctgatggatggtggaaagaaggcatgctaacaaagaatgggtcaaagtacatgagtgacccggttcaaaccaagggtgaagcatgcatcaatgggcttcccggtggacaatggaaagaaaacagtgcggaaaagaatgtatcaaatcacaagaatgagctggttcaaagaaaggatgatctaattgttgatgggcttcctgatggatggtggaaagaggacagaccaaggaagaatggatcaaatctgaagactgatccgcaacaataccctatgcctaatataattgcaaccagcaatattgttccacttgcatcttggttctattttgagtactacattgatccagtcagtggatatgaatttcgctctctgaaggatgtgcaccgttttcttaaatcaggggacatctataaatgcattacagcaacattgttgcaacatacaaggccaggtaccgccgacaaggccattcaatgtgaattgctaacttcagaaggtctcatgctgccgtgggaggaacagctcagtccatatagagaactcaacaacccaaaaaagatgcccgagttggagggcatgatagcatctcaaaaacatgcctacaaagttgatgctccaagggaaaagaaatcttttccgagaaaaagaaaacagccaagtgcaggagggaagcccaagaagcataaaatcgtccctgcaaaaatggttgccatgcctgtccgagcatcacctcgcttagcttcactgaagatcactcatgatttaaatactgagcctgaagatgaacttatcggtgtaaatcttgtcaatgaggtacagtctactaaagaaaatcctactgataagtcacgattgaaccaagcaggcatttccactgaaatgacgtctgttcaggaaagggctgacaatcagttgctgtcaagccaagcagacaccgggaatcacatacgtgttatggagggggacactacagattcgtcacagctgagacaagctgacactgtgaaccaaatactcacagatcaggaaaatgctgtcagtcaattacagtcgagccacacagattattttgttcaaatacgacctagacaagaatacgttaccaattactcacaatcacagttgagccgtgctgccactgtgaatcaaatagagactaatcaaaggaacatgtcaggtcagttgcagtctagccaagcagattctctggatcaaatacagacagagcaggaaagttctgccagtcggttacagtcaagccaagcagactctttcaatgaaatacatactatacaagaatacattactgaacagtcagagtcacaagtaagccatgcaaatcaaatacagattgatctaggaaacactgtcgatctgttgccgtcgagccaagcagacgccatatttcaaatggagactacacaagaatacattaccaaccagtctcagtcaagacaagcagatattgtggatcatatgcaggttaatcaggataacactgctaatcagttccatttgagacaagctgacacagtcaacagaatacaaactatgcaggagagcaccactgatcagccacagctcatccaagctttaactgtgaatcaaatacaggtcaatggggaaaacactgccaatcacgtccagtcaaggcaagcagatactgtgaatcatatacagcttaatcaggataacactgtcaatcagttccagttgagacgagctgacacagtcaacagaatacaaactatgcaggatagcaccgctgatcagccacatctcatccaagctttaactgtggatcaaatacatgccaatagggaaaacgttgtcaatcacttccagtcaaggcaagcagatactgtgaatcatatacaggttattcaggataacactgccaatcagttccagtttagacgagctgacacagtcaacaaaatacaaactatgcaggatagcaccactgatcagccacggttcatccaagcattaactgtgaatcaaatacaggccaatggggaaaatactgcaaattacttacagccaaattatgctgaaaataatatcatgcaagttggtttctctttaactcctgagccggaagaagcacctgccacaagcttttggagaaatgttgcaaatcaggagttaccggtttccatgcaaacagatggaaaacctgttgtgagctctgcgttaaatgttgaataccaaaatgtgccagccacagcacccgctcagccaacgcgagctccacatcctgaagcagcctcctatccgtctgggctggctgtgccatctctatttgggaattcctggtcagatccatgcattgagtttgccttcaagacccttagaggtgacattcctgttctggatgatacttcagctgttgaacaatacttccctcaacatgacttgaataaacctccatcaccagattattctgcttcaccaagttgttttagttcctcttttgacaatactagaaactttacacaagtcgaccatgccagcctcccagcaccgaatccgtcagataaactatacaatggtggttggttccctcccaagtga

SEQ ID NO: 8411 - DNA, 795 bp, Oryza sativa
  Clone ID: PAT_MRT4530_14920C.1
gcacgaggcctcgtgccgaattcggcacgaggcgcaatgccgttccttagccctctcgctggcgatgacgccgacgactactactacgcctacgactccagattccgccgaggcagcggcggcgggaagatcgccaagaaggaaaaggacaaggacaaggacaagggcttcctctccttcctcccctgcttcctcccctgctgtaatcgctccttcccgattcttgatttgcggattcttgattccggtggattcttggctcatcgctgcttggccgcgctggacggccagcccgcccagtaccaccccccctacgcgatcgagctggcgtgcgagacgcccacggccgcggtggcggagccgccgcgggaggaactgcgcaacatgcccggcgcggcgcgccgggctcacacgccgccgcggccccccctggcggcccccgtgaaggccgcgctgacgccgccgcaacccacggagctcctcaaggcggtccagcgcgcggcggccagggcggcgcgccacggcgcgaggtggcacgcgcgcaccggcgccgtctccgtccccgtcgaggtgttcgaccgcatgcgcgccaacgccagagcagccacggatgatgcttggtgagcgaggccgcgctggacggcgaggtcgccgagtaccagtccacctacgcgatgaagctggcgtgcgagaagaccaaggacggggtggcggagacggcgggggaggagatgtgcaagatggcgcgcgcggcgcggcgggccgacaagctgcggtggcgcgccgtggaggccg

SEQ ID NO: 8412 - DNA, 309 bp, Oryza sativa
  Clone ID: PAT_MRT4530_14921C.1
atgttgctgtcgcgctgttcgagccgaccatcgtgcctcctcgcagtgccctccacccgttgcgctgccatcgccatcgctcgatcctcccctgggactagagcatgcacgacggtggaggcctccgtggacgcggagaggcttggcgggcctcggcgagagcaggcggtagcggaacccaccggcgacctcatccacgacgccctcacctccctaggtcctttctccaagcaggaaaaccggctgaaaaccaccgctacacaactaacaactacggtggatcccaaccaggaaccatgcaagtattag

SEQ ID NO: 8413 - DNA, 3582 bp, Oryza sativa
  Clone ID: PAT_MRT4530_14923C.1
atggctggagctgccagcaagcaggaggccgctaccatgtcaggggtggctgctgagggccactgccacggtggtggaaccttccatcctgcagctggggcagagttctcgtcgttattttcagtctcttacactttggccatggttatgggtgtcatggactgcttggctgaggttcttgctacctcaattgcaagaaacacaagcgaaggtctgtccagttctggacatgatcccgttgacagtaatgcagagaatgatatatactatggagcagatgaagacaacatgatatctagctcaaagcaggaaaaaacaaactggtctgccaataaatttagccagtttccacaaagaaataagcatctgagatatcgcaccagggtttttgcagcagaatgtgttagccatgtacctgttgccgttggaacagaaccagctcattttgacctcctattggcaagaagtgcagtagctgaaggggttcatctgtcaaatgactggctaattcttaagctacaagagttggtttcactttcatatcagataagtactggacaatttgaaggcatgcagccaataggagtgaagcttctctgtttgattatggacaagtttggcatggctgtggatcctgaatttcctgggcatatattgttggagcaatttcaggctcagctcgtttctgctgttcgaacggccataagtactgcttctagtccacttctccttgaggctggccttgaacttgccacaaaggttatgacaagtagcgtaattgggggcgacagggtagctcttaatcgcttgtttttgctaatatgccgtccgctaaatgacatagaggacctattttatccatcttttgccgattgggttgtattaaaatgctatacttatcaattcttgaggatgaaggaaaatattcctgatgaacatcagcaattggcacctttgcttgcaaatagttcatctctcttaggaaagtattggattggagccctcaaggattatagctcgataagttttggtctgcattcaagaatcaatcacaagccgttccttgatgggatccagtcattcttggtgtcatcaaaggcaaaggagtatcttgatgaagtttgggcactaattcttcaagcaacagctcttgatgcagctcctttggagttcgaaatggatgattctgaagatacgcttggacagacatttatatctggacatagtatggtcaaactgaatttaactgaattcaagtttctttggggactatcggtccttgtgctttgtcatacacaaccatcaatgtcgaatagtgctataaaaatcaatcttgaccgtaataatgagaaaaagattggaggccttgttgtctgcgctggactagataatccaagaccatgtgatcaaatgttgcttgtgttatcgtccctcacttcacaagtgttttttagcatgaattttcttacagtggatacttgtcaggaactcctacaggctcttacttatgctgattgttcaagtgctcctgttgtatgcctgttctcccagataatcagactgtgccctgacaacttctttgaggtggaggagtttgtttttgttgcattagagttctactcatggtatcttgctactatacttcaaagtaggtgcggaagttctcaggaatgcttaagcaatagtttgatttctgaattatctgttgctactgagacaatggcatgccgaatgaaaaatgagcattggtggaaactgatgatgctactggtatccacgtcataccaatcatttcaacaagtcccctctaatctatgcttgtcaaatatcatctcctttctccaaaatactttgccaatcatgaagaaatatcttcaagaaagagctgaaccaggtgatgagtgtgccaactgcgaagttgccttgggagctttggttagtctggtggcatacttatgtacacaatgcagcaacaggatatcaatgctggataacaagatttctgattcctacaaactgttggcaaagatactatatttctgtttgggagaagctattgctcttgcaaaacttgttgatgagattggatatcatggtgaaaattgtacaagcaatgaacttatgtcaggtagcttcaggcattgcacacaagttgttcaggcttcactttgcagtacaaccatacaggtacaaatgttgggggtacatgttcttaaagtctctgcacaaagagagctagctgaaggctcacaaacagcaacacattcttttatggtgctatttgtggaattactggcagatgtgttttctgtgattcaaactgcattaaagatcagatggcattccctgacaactttattcctccagggatgttcgagcaaggactctgtcagtgtcattgatgaatgtctaaaattgcttttcctcttccattcgctagcacagtcaaagaaatgcccgcaagaggctacaatgcttctgctggatgccttactgatggttttctattcttctagtgccacgggttcacaggaactcactgaagtaaacaacatatccaagaagttgttctctcattttattcagattccatctgctgccatacatatcaaagatataatgttgtcagcagcacctacaaaaagacaactacttcaggacatgatccgagcttcagtcactcagggtcagacaatagtgcctgggcatatcagcgcaaattcagagcagaatgctcagggtggctttagtcaagaacctgggctcaatgccacagatgcagatgaagagaagaatgaaaaacaagttagtgatgatgattgggatgatgactgggataattttcagtctcttcctgcacatggtaccaacaatggtgcagactctgctacagctgcctcacctttacctgaacagggttctgttgcaagtcctcatgacgaacagatccctcaggtaaatattaatcaagaagttagtgatgtagatgtttcagatggtacaacagaaggcctaagttcttttgataaatatcttaaagaaccctccacttcacatttctcagatactgcacaacaggtcgagagcaaatctcaagagttctcctgtaaggatcatgaggaatccccaaaacatccaaaagttcattgcacaggatcatcagctcatgttactaaagaagagacggatgatgaatcacagcagattcacggtgaccaatttgtgagtagggaaagcaagaattatgacttgtacttatcgaatgagatcgctggttcagcaggtgaagaggaaaatgatacctctggagaaattagaagggccacgggtgatgcgctggatgaaaatatttcttccgtagatgattccaacttgaataatatttcagatggtacagaggataaatcaaataaggcttgtgacaaggtgttggttgccaatgaaaaatctgaaacggttatcacagactctggggaaaaggtgtctgcttcatctgatgaagtaaaatcagatttgtatcctgaaaatgtggataccaaaccagaatcatctggtggtgaaatcgcggagtcagggtcatga

SEQ ID NO: 8414 - DNA, 328 bp, Oryza sativa
  unsure (1)..(328): unsure at all n locations
  Clone ID: PAT_MRT4530_14924C.1
cattattcattatttgttttgatcactatctcgttgcatgcaacacagcaacggtgtgatcctactagctatgaggcaagccagctaagcctagtactggccggcggaaaaaagctgcactgggggggctcaacccggcacatcgacggcagttgcgccgagtactgcctcgccctggtaagcctaacgcgggtaatccccggttgttggtgttgntagnagtaatagcctttcttggaggacccctggccgtagtacccgtggtgagaagatgacctttggtggtggtagttttgggaagatgagaaaaataagatttgttaaaggg

SEQ ID NO: 8415 - DNA, 543 bp, Oryza sativa
  unsure (1)..(543): unsure at all n locations
  Clone ID: PAT_MRT4530_14925C.1
ggaacaacctctccgggcagatcccggcggcgtggggcgagctgaggtcgctgaagagcttctccgcctacgagaaccgcttctccggcgagttcccggcgaacttcggccggttctcgccgctcaacagcgtcgacatctccgagaacgccttctccgggccgttcccgaggcacctctgcgacggcaagaatctccagtaccttctcgccctccagaacggcttctccggcgagctccccgacgagtactcgtcgtgcgacagcttgcagaggtttcggatcaacaagaacaagctcaccggcagcctcccgcggggttgtggggtctccccgccgtgacgatcattgacgtgtcggataatgggttcaccggaagcatctcgccggcgatcggcgacgcgcagagcttgaaccagctgtggctgcagaacaaccatctcgacggcgagatcccgccggagatcgggcggctcgggcagcttcagaagctgtacctgtcgaacaactcgttcttcggcgagataccngcgagatcgggagc

SEQ ID NO: 8416 - DNA, 208 bp, Oryza sativa
  unsure (1)..(208): unsure at all n locations
  Clone ID: PAT_MRT4530_14926C.1
ggcaagcnagccccccctaccttgcntccaaagtaaccnccgccgccgcgcaagctaggtcaccgagcccgggcccaccctcccntcccctcccccacgcnggatgatcgcggccgggcccgcctcgatgggccgcgccaccgnnactccagcccacggggcccattcgcggtggccccgcgccgtnnggcttncnnttcgctttccg

SEQ ID NO: 8417 - DNA, 902 bp, Oryza sativa
  unsure (1)..(902): unsure at all n locations
  Clone ID: PAT_MRT4530_14927C.1
tttctttgngggggtngnnggggaanttccccgggncccgaaaactttnaaaaaaaanaganttccccccaaaacttccntttgggccggaaaaatttgaaaanaaacnaaagnatntgggntttggggggngggngaaaaaaacccgctnccttacccttttttggcggccntttgggnaccanncnggccaaagggggaaangaaaaangggaaaaaaagcccaagggggnnggccngggggccnncaaaaatttttttccnaccaaaacttngaaaaggggcctnggttcccccancttttgggcttcccctntccnaattttggggggnccctccccccaatggcccccaattgttttttcccccccccttggggttggtttccccttggggaaattttggggaacaagnccaaaacttggttttccttattnnggtnccaggcccccccctccccaagccggttttttattcaaaacaacaacaaanccctggggtttttccgggggtttccccaanccaaccctccttttattttccttggggggaaataaaaagggccaaaggttgcaaaggttcccnaatgnccccaaaactttttattccattgccctaattgggtttccanccaaaggggaaaaaacaancccccccanncggtcccnggcttggggtaanggcggttgccttgggttgccttgggttggggaaattgccanncaaaccccattgcccaaattgggggttctgccnaccaanaatttaattggctttnnggggggggggggccnttgggcttattccnggttattcccctnncnnngggaacnntttggcattgcccttgaattcccttgccnaattgccattgggttnttttnggggggggtggggnnttt

SEQ ID NO: 8418 - DNA, 1907 bp, Oryza sativa
  Clone ID: PAT_MRT4530_14928C.1
ggttccggtccggattcccgggtcgacccacgcgtccgaattcatctcgatcgatcgacaaagctatagctagcccagtcatggccgcctctcccgcaatggcgacactcctcctcctcctcctccatgctgtcctcgtcgcggcagccgatgccggcgccgccgataaggaggcctatgcggcaacaggatcaaccgctggcaaggagaccgctgcggcggccgacaaggagacctctgcagcggccggatcaaccgcgggcgccgtccctgaccccaacatcttcaacaaggaggccgtgtgccccaagacgacggacgagaaggcgtgccagcaactggtgaaggtcctgccgcccgagtttgcagagacgaaagacgccaagggcctcgccaagctgtgcatctccagcgtcgggttctcggcggagcagttcaccaaggacgccatcgccgccgtgcaggagtgcaagaagcccgacaagtgcctcgacagctgcgtccaggctagcaccgccgtgaccgacgccctgaagccctccggcgccggcgtcaacaccgtcaaggtccccgaggacgaatggctcctcgccatccacgccagcttctcgcagctgctccgtggccccgccggcggcgtgagccgcccgcctctctgcaagacgtgctgcgacgacggctcgtgcaaggacgccaagaagctcaacgtcgtctcggtgttctcgcgcatgtgggacttcctggatttcaccgatgcggtgctcgacgatttgtatcctttgacgaagacgacggggaccaaggccacgacgacagccggatcaaccgccgataaggtagcctatgcggcaaaaggatcaaccgaaggcaaggagaccgctccggcggccgaatcaactgtcgataaggagacctctccagcggccgaatcaaccgtcgacatggcgacctctgcggcagccggatcaaccgccgacaaaaacgcctacccggcggccgaatcaactgccgataaggagacctctccagcggccgaatcaaccgccgacacggcaacctctgcggcagccggaccaactgccgataaggagacctctccagccgccgaatcaaccgccgacacggcaacctctgcggcagccggatcaactgccgataaggagacctctctagcggccgaaccaaccgccgacacggcaacctctgcggtagccggatcaactgccgataaggagacctctccagcggccgaaccaaccgccgacacggcgacctctgcggcagccggatcaaccgctgataaggagacctctccagcggctgaatcaaccgtcgacacggcgacctctgcggcagccggatcaaccgccgataaggagacctctccagcagccgaatcaaccgtcgacaaggagacctctgcggtggccggatcaaccgccgataagaacacctatccagcggccggatcagccgccgagaaggagacctcttcggcagccggatcagctcctgtcgtcgacactgcgcctgcggccccgccgacaacttatgtttaattacaaacattcggtacttaatattttttaggatgctatacgaactttaaataactcttccaaaatttttactacaccaataaaaaatccttacaaaattttgactacagcaatgtttgtaaggagttaatcgaacaaggtctaagttgatactctgatgtgtctaatgtttcctaaacaaaatattggatgaaatttttcaatcaaccatagccgttaactaaaattttgtggcaaagcagcaaacaaaaattgaagaatttggtccaagtattcgccaaggctgtggcaaaagatgtttcagttgcccaaaaaagtttgtcatcaatgcaacatatttacgacttc

SEQ ID NO: 8419 - DNA, 534 bp, Oryza sativa
  Clone ID: PAT_MRT4530_14929C.1
atgtcaggctgtcacgtcatctctctcccttcctcctctctctatcacagtcttctcttctctgttctctgggcaagccggccgacggctggggaggaggtggctacgacgacacgggaggattgctcctccaccgcggcctggtcgccccatagcctcctcagcacagtctgccatggcatcggcctcgtcggaggcgagcgaggcgcgcgcatcccgctcaggttggtgctccgctgctgcagtctctcccgtgcctgggccgccgcgctctcctccgacgccttcatcgaccactacctccgtcttgctaaacgccggcgaggtcccaagctttgcatcctgccggaatcggcgttcgccgacacggacctattcggctggcatttttcgcagcaagctgcagctaactgccatgcagctgagcatgctgcttgctgctgcagccgcagcgctgccgtgggaatggcggccgaacatgccaacgtgtatggtgagaagtatttgggaacagggagagtcgttttggtctaa

SEQ ID NO: 8420 - DNA, 224 bp, Oryza sativa
  Clone ID: PAT_MRT4530_1492C.1
tttttggtttttggttcagtgccttttaaaatattaacttaaaatttgttcactgtttccccgtttgttacatatgataaaggataccaaagcgggacacacatactgaacaaaagcacggaggcaaaatatgaatagcacagggggctaactatgtaaatcacaaaccccagctgcggcggcaaaagatgcaaaggggtcagcgggggtgccggccccagaca

SEQ ID NO: 8421 - DNA, 448 bp, Oryza sativa
  unsure (1)..(448): unsure at all n locations
  Clone ID: PAT_MRT4530_14930C.1
tcgtttacgcgtgggtttaggcggcagcggtggtggtcgagaagcactatacgtacgtcatcctcagaggaggatctttagcgggatatgaggcacgagagctcgacaagcagggggttaagccaggggagctatggatacatgtcacaaggtggccgtggatccttatgagcgctctgctctgaccaagggatacctatttcctcagaatgctataagactgccaggatttcatgtgtgtgctgccagaggcggagagaggctatcgtccgaatggtactcagagaaaggcatagagttgatcctgagcactagaattgtcaaagctgaacttgcctccaagactntgactagtgcaactgctgcaacctctacatgtgatatattgatcattgcgactggctcctcaatcatcaatctatcagattttggcactcaaggagctgat

SEQ ID NO: 8422 - DNA, 953 bp, Oryza sativa
  Clone ID: PAT_MRT4530_14931C.1
atgggccaagtataccctcagaaccattcaccaatcaagaggagtcagttcacatctcatgctggttttttcctgtgctgtagaacacaagacatgctaaagagcaagctcattcttgaggatgattttgggtggaatttaccttcaatgggctcaaattcagatcagagcaatgctaataataagggcaacctgaagtatataggaggtgttgacattagcttctcgaaagaagacccttccacggcgtgtgctgcactggtagttttagatgctggtaccttagaagttgtccacgaagagttcgatgttgttcggctgcaagtgccatatattccaggatttcttgctttcagagaggtactcatggttgatggaaatggattacttcatccacgaggttttggtttagcttgtcatcttggtgtccttgcagacctgccgaccattggagttggaaaaaatgtattaatattactgccattgcaactactcctatggaagttctctcatctagttgttttccgaccatttcaagtacttgatggttttctgatgttctgatcctctgagagaagactaagtcctcagtgttttgaatgccccagctgcaccatgtggatggccttaaccaatctgaattgagaagacaattagaagcaaaagaaaactgcaacaaggagttaattttattgactggacagtctgggacaacatggggagctgtaggagattctatattggacctctgaatgcatccttcacttcatttctgtcatatatttcctgataatgaaaaggtttctattgttggaactaaactattaacttatcccaggcaatgcgctcctgccctggtttgtcgaagccgatctacatctcagttgggcatcgcatttcacttgactcagccattgggatagtgaagttctgtagtaattatcgcattcccg

SEQ ID NO: 8423 - DNA, 795 bp, Oryza sativa
  Clone ID: PAT_MRT4530_14932C.1
atggaggcggcggtgcgcctgatccacaccccgcaggacgcgctcaagggcgccggggagtacatcaaccacgccttggggccggccgccgccgtgcacagcctcaagccgccgctcctcgcggcctccgccgtcgccgatgacctccccggatacctcaacgtgctgtcccgcttcgaggaggcgctccacttcctctccgacaactgcggcatcgcctcccagtggctcactgacatcgtagagtacctcgaggaccgtagcctcgccgccgccctcgccttttcacacctcacaactgccgccgccaccgcctactcctctcccgcctcgtccccgcggcctacaaatcgtgaaggaggaggatgtacatgcaggacaatagtcgtggaaggagcggccatcggtgcggggccagttggcgtcctcagcgaggtggcatcgcagctcctccttcctctcccgacgcttttcccccgtggcagtagccggacagtaggtcccagcggatcggattgggtctctgagctcggcgtgcggctcgagagagatggaaggccggcgaactatgtagttcggagaggagacgggagtccaagtccgagaagacgcgacggcgcaggcagaacaagagatggatgtaggggagagcatgctgtggtcgatgaggaggccggcgaggaaggcgtcgacggaggagacggtggcggtggtggcggcggagagcgtggccgcgtcggccttcctctacggcgccgctttcggtggagcgatttggggaagggttggagatag

SEQ ID NO: 8424 - DNA, 489 bp, Oryza sativa
  Clone ID: PAT_MRT4530_14933C.1
ggaatggataataccccacgattttcaggaggaggagatgattgtgagttgatgcagcagaaacaagaatgggccaaaacacaagacatgctaaagagcaagctcattcttgaggatgattttgggtggaatttaccttcaatgggctcaaattcagatcagagcaatgctaataataagggcaacctgaagtatataggaggtgttgacattagcttctcgaaagaagacccttccacggcgtgtgctgcactggtagttttagatgctggtaccttagaagttgtccacgaagagttcgatgttgttcggctgcaagtgccatatattccaggatttcttgctttcagagaggctccaattcttctaggactcttggaaaaaatgaagacaaacaaccagcatttctaccctcaggtactcatggttgatggaaatggattacttcatccacgaggttttggtttagcttgtcatcttggtgtcctt

SEQ ID NO: 8425 - DNA, 765 bp, Oryza sativa
  Clone ID: PAT_MRT4530_14934C.1
atgccagatggttatgcctcaaatatcaggagatgtgttgatgaaaatggttggaagatgtatcctgttgagaggtacctacgtacccttaaaggctatgtgaggaacaaagcgtgcccagaaggatcaatagcagagggatatatatcggaggagtgccttactttctgtgctcggttctttgaagatgttagtacaaaggtgaataggccagaacgtcaagaaaatagccaagtcagtgcaccacctgctggtctaagtatttttgggagcatgctgtacagtaagaacaaatttcatatcgagactgcatcttattcagacttgcatagaatgaggcactacataatatccaactgtgatgaggccatgccatgggtaaatgagcatatagaggaattgaaaaaaaccaacaggggaaatgttgataaaaggcacaaggaacaatttgtatcatggtttgagcgtaaaatgaacattcttcatgcagatggaaaaatagatcaagatatatattgtctatctcgtggtccagatcatcgagttcgtgtagctaacaggtgctccatcaatggatttctgttccgcacaaccaatgtggagaaaaacctaaccacacaaaacagtggtgttgttgttcagggcgaaggcatggactggtatggagtgattaaaaagatcatcaccctcaattttcccaatgacaaagaagtcttgttgtttgagtgcgactggtttgatgttccgggagcaaccacgaactaa

SEQ ID NO: 8426 - DNA, 327 bp, Oryza sativa
  Clone ID: PAT_MRT4530_14935C.1
acccaaccctagggtgaaccagaaaaatgggggggggggggggggatataaaaagtttttttttgaggggggtatttaaaagctgggaaaaaaaaaaaaaaaacgggttgcaggggaaaaaatgaagccgggcgaaattaacaaaaaaacaaacttaaataaattaaagggaaaagacggggggcaataagggggggaaaaacccaaaaaaagggggatgaatcaaccgcccaactcgcagggggaaaacgtttatggcccgctcggtaaagaaatctttaaacccccgggggggggggtcatcaatttgtggcccccgaggggttt

SEQ ID NO: 8427 - DNA, 666 bp, Oryza sativa
  Clone ID: PAT_MRT4530_14936C.1
atggaggacggctgcagcaaggttgtgagcggtggtgggagcgggagctgcggcggcggcgccaagaagccgttccacttcgcgcggtcgctgacataccaccaccaccaggggcaccgggtgctgccgccggcggcgaagtggaggcggcaccagctcgccgacgagccgcgagcgcggcccaaggacgtggtgctgtacacgacgtcgctgcgcggggtgcggcgcacgttcgcggactgctcctcggtgcgcgccatcctgcgggggttccgcgtcgccgtcgacgagcgcgacgtgtccatggacgccgcgttccgccgcgagctgcggtccctgctcgacgcgcgcggccgcgccttctcgctcccgcagctgctggtcggcggccggctcgtgggcggcgccgacgaggtcaagcagctccacgagagcggccagctgcggcgcctcctcgacggcgccgccggccaggacccggcctacgtctgcgacggctgcggcggcgtccgcttcgtcccctgcaccgcctgcggcggcggccgcaaggtgttcgtcgaggaggaggatcgcgtgcagcgctgcggcgattgcaacgagaacggattgatgactctacaattcaaaacaatgcgttatggaaatgatccaactgtactaacttaa

SEQ ID NO: 8428 - DNA, 250 bp, Oryza sativa
  Clone ID: PAT_MRT4530_14937C.1
acaggggggcagaatggcaatattgccacagatcaatttcatccctctaaggatgatgttaatctcatgaaaagtttgaacttttgaggcctaccggttttcaatctcatggcccaggatcattcccatatggtggagggacgagtttaaccacagaaggctgttccattatttacatacagatcttatacaatctagccttctgcagcaaagtgcatcaactccgttatggacaatgctttacgcacta

SEQ ID NO: 8429 - DNA, 492 bp, Oryza sativa
  Clone ID: PAT_MRT4530_14938C.1
atgggaagaacatacgatcagttcgtggaaaccccaccgcagcgtaggcgaaaacccgccagcaaggccgcgatttgcacaaatttagtcaccaaaacaggacaagaggggagaaaaaaccaccgtcttcagcatggggcggacgcggcgcgacacgcaaggcgcgacgcggggtgcgaaagggcagtgaatacaccaaaacgcagtaagaaaaaaacttacagcacgagaaagcagggcggcgagcccgagcggaagaggtgggcagggaaaggagggcaaagggaggcggacaacacggccgtcccaaacgagccaaaaggaaaagcaccgcgaggcccccacaccacaaggtacggaggggaggaacacaaagaactgtcaatccattcgacgacgaagcaggcgttatgcgcgcacgatgtcgcgggccggagcgagtacaaggaaaaaagaataggaaaaagcatgtctgcgcaaaaaacgccatga

SEQ ID NO: 8430 - DNA, 351 bp, Oryza sativa
  Clone ID: PAT_MRT4530_14939C.1
gggttggggttttttttttttttttttttttttttttttttggggaaacaaccccccattttacaaaaagtccccaagttttccacaaacaacccggatttatccctttcactttaaaggaaatagggccccccataacaagatattcttttcctaaacccctctattgggggcccctatgtatcatttacatatgtttattgcccaatactttttaaaagaaaaagggaaaccccttttttttttgtggcttgggcccacctaaattaacccatccaaactccccctgttgattggcatacacaaccaacttgccccccaaagcattatttcccactattactggtgacc

SEQ ID NO: 8431 - DNA, 459 bp, Oryza sativa
  Clone ID: PAT_MRT4530_1493C.1
cggaatcgcatttcgaccacgcgtacgcctacgcgtacagccacgcgtccggtgagggatcagcttagcatagtggcatcccctttctgacaccagttacgtttaaattaggaaccagccgaaggatgcgccaacattgttgccaacacgctcaggctggttgtgcaacagtctaactaccaggccatttgtagcgttcaggctattgtgcatcatctactgctgcatgaggtcggtgttgtctactatgatcagactcaagctcaagctcacgctgtgctggccttaaactcgccatccatatgtggtatctatactaactactacattgatacgaggagcatttccaccgtaggtggcgtctggtactgaattgtcatactttaatggttcaaatgtttgaaatcaagtcatgcatcatcatgcttgacagatgaaacttgatgtcatataaatcta

SEQ ID NO: 8432 - DNA, 453 bp, Oryza sativa
  Clone ID: PAT_MRT4530_14940C.1
atggcgacggagacccaggagcggcactggagcggtgacggaggcgtgcgggtgagggccggagcggcggcggcggcggcggagatcgagaccgccgtggaaggtgaagaactctctatcctccttcatttggctccatttttgttatatttcgttggtggaaagtggagtttttttaatattttgacaagggaattcgccaatccgaaagatgacgatgaagagttatgtttcgagatgaatgaggcagagaattttataatcgaagacatgtcgcgtgaaagaatggttgtcgatgtttccaccgatagtgatgatttcgatggtagttttgatttagaggatatgctacgccatgttaaaccagaggtgctaccggccaggtcacgaggcttggagaattgccaggcattagagaaggcacgcaagctcgttcttcccgatgaagcgaag

SEQ ID NO: 8433 - DNA, 212 bp, Oryza sativa
  Clone ID: PAT_MRT4530_14941C.1
ggcatacatcgactcctacctgttcatgctcatcggatccacaagcctgtgcaacaccactcctgtcaacagctcgcgaatcttaatttacaggatactgatattttttaaattttgatgatttgcctgttctttcatgcttataatattatttatattcaatatatatatctgaataattacactacttcactaccttatagctactctct

SEQ ID NO: 8434 - DNA, 3480 bp, Oryza sativa
  Clone ID: PAT_MRT4530_14942C.1
atgggaggaaaatatctttggaagcctctgcttcgtttctctggcgaatcccaccgtttttcccctctctcgcgtagctgcgctcaggaccgaaggggcgacggcgtgcgcccgcgccagatccgccgcctccgcgccagatccgccgcctctgcgccggcgaggccggttcccgcgcgggtggagatgtcagatagtagggaccctgtgtgggagcacggggagaatatcccacctggatggcgctgtaagtattgccatacaaagaggggcggtggtggggcaacaagactaaagcaacacttggctgcaagagggaagggggttacatattgcaattcagtgcctccggatgtccgtgagttcttctgccgtgagttggacaggataaaagatgcaggtgaccagcgtaagagtgatagcggaagaagggttgaagcagcaagggtcaactattatgacctaacaggtgatgccgacgaggaggaacaaatggaagcagccattgcagcctcacgacaagacgaaaactttaggagggatgttgaggagcgtggtggcacttatgagcatggcggtgggagtggatccgctcagccggaggcacggaaaggtagaagtaacccaattaccaatatgctacgaagggctacgtctcatagggagtcacctgctgtgagagattacaacctagcatctgccaaggcccctgtgcagccacgcattgacacaggattcttcacaaagaaagggaagcaagctaggcaagccattggtgagtcatgggcaaggttcttctttaccgccggcattcctggtagaaacgccgataatccatactttgtgagcgccgttcgggagacacaaaagtggggtgaaagtgtaccttctccaactggtaacgagatagatggaaaatatcttgattctacagagaaggatgcgaagaagcaatttgataggttcaagaaggattgggatgagtacggtgttactataatgtgtgattcttggacaggtccgacgagtatgtcggtcatcaattttctgatatactgcaatggaataatgtttttccacaagtccattgatgcaaccgggcaaagccaggatgctaactttgtgctgaaggagataaggaaggtggtacgcgaaataggctcggagcatgttgttcaaattatcactgacaatggctctaactacaagaaggcgtgcagactactacggcaagaatacaagacaattgtgtggcaaccttgtgtggcacacacagttaacttgatgcttaaggaggttgggaaaatgccagaccacgaaatggtgattgagagtgctaggaaaatttgcagatggctatacaatcataacaagttgcatgctatgatggtcttagctataggtggtgaactggttaagtggaatgctacaaggttcggaacaaactacatgtttctccagagtttccttaggaagcgagatcttttcatgcaatggatggcttcctctgtcttcatgcaaagcaaatttagtgggactttggaaggtagatatgcacatgcatgtctatctagtctgtcttggtgggagaacttagaggcagtagtgaattctgtccaacctatgtactcattccttcggtttgctgacgaggacaagaaccccaatttgagtgaggtacttttgagatatcagttgctcaaaatggagtacgacagtctttttgcgaatcaaagggacaagtttgaagcatacatggagatcgtgaacagaaggatgcacgacctaaccaatgagaatctcatcaatgccgctgccgcattgaaccctaggacgcactacgcgtattctccaagtgctactgtcttccaagacctccgacaggcattcgagtggatgatggatatcgatacggctgccgccgctttgctggaggttgagatgtaccgacgtaagacgggtgaatttgggagggtactagcaagaaggatggccatagatgggaaaacttcacctgcacaatggtggtctatgttcgcctcagacacgccgaatttgaagaagcttgcgttgcgtttggttggtcaatgttgctcctccagtggatgtgaaaggaattggagcacattcgcattcgtacatacgaaggtccgtaatagacttacccacaagaagctcaacaagctagtgtacgtgaactacaaccttcgccttcgaattcagcaagcaaatgcccaaattagggtggaggacgatgatccccttcaaagattagcggacctctcattctatgaaactaacaatcatatcagtgcctggatggacaatgctcgctctaatgcttgccccgaactagatgaagattcagctgagagtgacgctcccctgcctagtcaacttgtgtctgacctagtcaacttggatgacctgcgaaggaccacgggagcttctagtattgctgagtgggctgatacgaatgtaggtgacactcatattgggaaaaggaagactcgaaagccgccaaaagcacgtccatctaaaaaggtaaagggcaagggtccacgatcgactagtgttgatagcgatgaagagacccaaggaagcccagagtaccaagagtccaatgatagtagctcaagaactgaaacagatgacggcgacgacgatggtcaaggaggccaaggcactactaatatgcctcctaggggtcacacccaacaatcagatcaccacagccccgttcaattcactggtgagggcgacttcactcatgctactcaggaccaggatcatggtgctccaagctctcaacgaactaccattgcaccgggagtccgacaacagcaacaattcagtgacatacaacaggatagctctagctcattcagtgcctctagctttgaaagtggctatccaacttccaacatatcgcggttaccgtcctcttaccgcggttaccgtaccaaaccgtgcggttaccgtgtccataccgtggattttgaattcaaaaatttggaaacgaaatttgtgcggtttttcgtggtaaccgcacggttaccgcgaattgtcacattggcaactttgggtgtgtttgaggagaaggggattgggaagatacgcaaaatgagtggactttctcttgtgaagtgcccaagatgtgggaatgcagtagtggagtgcaaatcctggaggcaaggtggtcgggtgtttttcaaatgcgagaagaatgaacaatatgttccagatgcttgcacgtttttcaagtggtatgatagttaccaaagaatggtagaaggaatggaattagatttcaatgaagaagttgcaaccccagttgcaatagcagcagcaggtgaagctgacagggttgatgaagggaagatggataaactaactaagtggatgcaacttcttgtgttgatcaacatagggcaaggcatattagttctgatgggagtgtttgttttgcttatgaaatga

SEQ ID NO: 8435 - DNA, 2169 bp, Oryza sativa
  Clone ID: PAT_MRT4530_14943C.1
atggggggaaaatatccctggaagctctgcttcgtttctcttgcgattcctaccgtttttcccatctcgcgtagctgcgctcaggtccgaaggggcgacggcgtgcgcccgcgccagatccgccacctcgccggcgaggccgcttcccgcgcggcaagcggcggtaaccgcttgggtcgaagggcaagagggtggagatggcagatagtagggaccctgtgtgggagcacggggagaatatccgacctggatggcgctgtgatgccgacaaggaggaacaaatggaagcagccattgcagcctcacgacaagaggaaaactttaggagggatgttgaggaccgcggtggcacttatgagcatggcggtgggagtggatccgctcagccccaggcatagaaagccacgcattgacataggattcttaacgaagaaggggaagcaagctaggcaagccattggtgagtcatgggcaaggttcttctttaccgccggcattcctgatagaaatgccgataattcatactttgtgagcgctgttcgggagacacgaaagtggggtgaaagtgtacttctccaactggtccgacgggagataaggaaggtggtatgcgaaataggccctgagcatattattcaaattatcactgacaatgggtctaactacaagaaggcatgcagagtactacggcaagaatacaagacaattgtgtggcaaccttgtgtggcacacacagttaacttgatgcttaaggaggttgggaaaatgctagaccacgaaatggtgattgagagtgctaaggaaatttgcatatggctatacaatcataacaagttgcatgctatgatggtctcagctataggtggtgacctggttaagtggaatgctacaaggttcggaacaaactacatgtttctccaaagtttccttaggaagcgagatcttttcatgcaatggatggcttcctctgtgttcatgcaaagcaaattcagtgggacttcggaagctgccgcattgaaccctaggacgcactacgcatattctccaagtgctactgtcttccaagacctccgacaggcattcgagtggatgacagacatcgatacggctgccgccgctttgctggaggttgagatgtaccgacgtaagacgggcgaatttgggagggcactagcaagaaaaatggccatagatgggaaaacttcacctgcacaatggtggtctatgttcgcatcagacacgccgaaattgaagaagcttgcgttgtgtttggttggtcaatgttgctccttcagtggatgtgaaaggaattggagcacattcgcattcgtacatacgaaggtccgtaatagacttacccacaagaagctcaacaagctagcgtatgtgaactacaaccttcgccttcgaattcagcaagcaaatgcccaaattagggtggaggacgatgatccccttcaaagattagcagacctcttattctatgaaactaataatcatatcaacgaatggatggacaatgctcgctctaatgcttgccccgaactagatgaagattcaactgagagtgacgctcccctgcctagtcaacttgtggctgacctagtgaacttggatgacctgcgaaggaccacgggagcttctagtattgctgagtgggctgataagaatgtagatgacggcgacgacgatggtcaaggaggccaaggcactactaatgtgcctcctaggggtcacacccaacagtcagatcaccacagccctattcaattcactggtaagggcgacttcactcgtgctactcaggaccgggatcatggtgctccaagctctcaacgaactaccattgcaccaggagcccgacaacagcaacaattcagtgtcatacaacaggatagctctagctcattcagtacctctagctttgtaagtggctatctaacatatgtgtacaaccgtacccaatcttctgattatcctgctactacatgggtgtatgaatggcaagagcctcagtggtatgctcaattgtacgctcagtggcaaacaacatcatcatggacaggtcaaagttgggaggaatacaaggcggggttgctacattcacatggcttgatgctcatgtccacagaggagtacaatatggcatataatcggtggaatgcgtag

SEQ ID NO: 8436 - DNA, 560 bp, Oryza sativa
  Clone ID: PAT_MRT4530_14944C.1
atggcgttcaaagcattcttcattattttagtggtttttgttagcagccttgcatctcctgcagtagcaagagatggacctacgatcaacccaacgatgggtaccaggggcgggcccactattgattcaaggaggcttccggctgcggcgtgcgcggctgcgtcggcggcaggaggcgccgaggcgtgcaggcggcgcgtcgacggctgcggccgtgcggcgttggggctcggccaggcgtgcaggccgccagtccaccaggccaccacacaggaatttagagaatttagagagggtgttttcttcgatgaactatataaaaacaagaagcaagatgagcaacaatctacatttattggaagagaattttttgtacaagttaaaggatgaggacatcatcactcatttttaaaatatcaagcattgaaaagttcttctctaaattgtaagttttttttatcattataccactttctatcctttacatgttatatatgttggcactttcatatgtcgaacaattagtacttatatatgttaaagaaattggacctaatgat

SEQ ID NO: 8437 - DNA, 2673 bp, Oryza sativa
  Clone ID: PAT_MRT4530_14945C.1
ctcttcctggtttctgtcgcgttcttctatttctttcctctctctctcacagctgcgcattgcttcgaaggggcgacgaggactgccgcgccagatccgccgcctccgcgccggcgtggctgatttccgcgcggtatgcagcggtaaccgtgtggtaggaggcggttaccgactggctcgcccaccaacagtgcctccggatgtccgtgatttcttcaagcgtgaattggagaggataaaacaaacaggtgacaagcgtcagaatgatagcaatagaagggttgaagcggcaggggtcaactattatgacctaacaggtgatgccgacgaggaggaacaaatggaagcagccatggcagcctcacgacaagaggaaaacttcaggagccacgtggaggagcgtggtggcacttatgagcatggtggtgggagtggatccgctcagcccgaggcacggaaaggtagaagtaacccaattaccaatatgctacgaagggctacatctcatagggagtcacctgctgtaagagattacaatctagcatctgccaagtcccctgtgcagacacgcattgacacaggattcttcacaaagaaggggaagcaagctaggcaggccattggtgagtcatgggcaaggttcttctttaccgccggcattcctggtagaaatgccgataatctatactttgtcagcgccgttcgggagacacaaaagtggggtgaaagtgttccttctccaactggtagggagatagatggcaaatatcttgattctacagagaaggatgtgaagaagatattcgataggttcaagaatgactgggatgagtacggtgttactataatgtgtgattcttggactggcccgacgggtatgtctgtaatcaattttttgatatattgcaatggaataatgtttttccacaagtccattgatgcgacgggccaaagccaggatgctaacttcgtgctgaaggagataaggaaggtggtacgcgaagtaggccctgatcatgttgttcaaattatcactgacaatgggtctaactataagaaggcgtgcagactacttcggcaagaataccaaagaattgtgtggcaaccttgtgtggcacacacagtcaacttgatgcttaaggatgttgggaaaatgccaaaccacgaaatggtgattgcaagtggtagaaaaatttgcagatggctatacaatcataacaagttgcatgctatgatggtcacagctataggtggtgaactggttaagtggaatgttacaaggttcgggacgaactacatgttcctccagagtttccttaggaagcgagatcttttcatgcaatggatggcttcctctgacttcatgcaaagcaaattcagcgggacaacggaaggtagatatgcacacgcatgtctatctagcatatcttggtgggagaacttagaggcagtagtgaattctgtccaacctatgtactcattccttcggtttgctgacgaggacaagaaccccaatttgagtgaggtacttctgagatatcagttgctcaaaatggagtacggcagtatttttgcgaatcaaagggacaagtttgaagcatacatggagattgttaacagaaggatgcacgacctaaccaatgaaactctgatcaatgccactgccgcattgaaccctaggacgcactatgcgtactatccaagtgccactgtcttccaagacctccgacaggcattcgagtggatgacggacatcgatacagccgccgccgctttgctggaggttgagatgtatcgacgtaagacgggcgaatttggaagggcactagcaagaaagatggccatagatgggaaaacgtctcctgcacaatggtggtctatgttcgcctcagacacgccgaatttgaagaagcttgcgttgcgtttggttggtcaatgttgctcttcaagtggatgtgaacggaattggagcacattcgctttcgtacataccaaggttcgtaatagacttacccacaagaagctcaacaagctagtttatgtgaactacaaccttcgccttcgaattcggcgagcaaatgcccaagttaggacggaggacggactaatgttgatagcgatgaagagactcaaggaagcccagactaccaagagtctaatgatagtagttcaagaactgaaaccgatgacggagacgacgatggtcaaggaggccaaggaactactgatgtgcctcctaggggtcacacccaacagttagatcaccacagccccattcaattcactggtgaggctgactttactcatgctactcaggaccacgatcatggtgctccaagctctcaacgaactaccattgcatcgagaggccaacaacagcaacaacatgttgacatacaacaggatagctccagctcattcagtgcctctagcattgaaagtggctatccaacgtatgtgtataaccgtccgcaagcttctgattatcctgcgcctacatgggtgtatgaatggcaagagcctcagtggattcacatatcgcggtaaccgtttacttaccgcggtaaccgactgaaaccgtgtggtaacctcgatcataccgtgtgatttgaattcaaaaatttggatgcggaatttgtgcggtttttggcggtaaccgcgcggttaccgcgg

SEQ ID NO: 8438 - DNA, 3018 bp, Oryza sativa
  Clone ID: PAT_MRT4530_14946C.1
atgggaggaaaatatctttggaagcctctgcttcgtttctctggcgaatcctaccgtttttcccctctctcgcgtagctgcgctcaggaccgaaggggcgacggcgtgcgcccgcgccaaatccgccgccttcgcgccggcgaggccggttcccgcgcggtaagcggcggtaaccgcgcggtacgcgacggtaaccgcctgggtcgacgggcaagaggtaatccctccgttttgaaggttttcgcgcgggtggagatgtcagatagtagggaccctgtgtgggagcacggggagaatatcccacctggatggcgctgtaagtattgccatacaaagaggggcggtggtggggcaacaagactaaagcaacacttggctgcaagagggaagggggttacatattgcaattcagtgcctccggatgtccgtgagttcttctgccgtgagttggacaggataaaagatgcaggtgaccagcgtaagagtgatagcggaagaagggttgaagcagcaagggtcaactattatgacctaacaggtgatgccgacgaggaggaacaaatggaagcagccattgcagtctcacgacaagacgaaaactttaggaaggatgttgaggagcgtggtggcacttatgagcatgccggtgggagtggatccgctcagccggaggcacggaaaggtagaagtaacccaattaccaatatgctacgaagggctacgtctcatagggagtcacctgctgtgagagattacaacctagcatctgccaaggcccctgtgcagccacgcattgacacaggattcttcacaaagaaggggaagcaagctaggcaagccattggtgagtcatgggcaaggttcttctttaccgccggcattcctggtagaaacgccgataatccatactttgtgagcgccgttcgggagacacaaaagtggggtgaaagtgtaccttctccaactggtaacgagatagatggaaaatatcttgattctacagagaaggatgtgaagaagcaatttgataggttcaagaaggattgggatgagtacggtgttactataatgtgtgattcttggacaggtccgacgagtatgtcggtcatcaattttctgatatactgcaatggaataatgtttttccacaagtccattgatgcgaccgggcaaagccaggatgctaactttgtgctgaaggagataaggaaggtagtacgcgaaataggctcggagcatgttgttcaaattatcacttacaatggctctaactacaagaaggcgtgcagactactacggcaagaatacaagacaattgtgtggcaaccttgtgtggcacacacagttaacttgatgcttaaggaggttgggaaaatgccagaccacgaaatggtgattgagagtgctaggaaaatttgcagatggctatacaatcataacaagttgcatgctatgatggtcttagctataggtggtgaactggttaagtggaatgctacaaggttcggaacaaactacatgtttctccagagtttccttagaagcgagatcttttcatgcaatggatggcttcctctgtcttcatgcaaagcaaatttagtgggactttggaaggacaagaaccccaatttgagtgaggtacttttgagatatcagttgctcaaaatggagtacgacagtctttttgcgaatcaaagggacaagtttgaagcatacatggagatcgtgaacagaaggatgcacaacctaaccaatgagactctcatcaatgccgctgccgcattgaaccctaggacgcactacgcgtattctccaagtgctactgtcttccaagacctccgacaggcattcgagtggatgacggatatcgatacggctgccgccgctttgctggaggttgagatgtaccgacgtaagacgggtgaatttgggagggcactagcaagaaggatggccatagatgggaaaacttcacctgcacaatggtggtctatgttcgcctcagacacgccgaatttgaagaagcttgcgttgcgtttggttggtcaatgttgctcctccagtggatgtgaaaggaattggagcacattcgcattcgtacatacgaaggtccgtaatagacttacccacaagaagctcaacaagctagtgtacgtgaattacaaccttcgccttcgaattcagcaagcaaatgcccaaattagggtggaggacgatgatccccttcaaagattagcggacctctcattctatgaaactaacaatcatatcagtgcctggatggacaatgctcgctctaatgcttgccccgaactagatgaagattcagctgagagtgacgctcccctgcctagtcaacttgtgtctgacctagtcaacttggatgacctgcgaaggaccacgggagcttctagtattgctgagtgggctgatacgaatgtaggtgacactcatattgggaaaaggaagactcgaaagccgccaaaagcacgtccatctaaaaaggtaaagggcaagggtccacgatcgactagtgttgatagcgatgaagagacccaaggaagcccagagtaccaagagtccaatgatagtagctcaagaactgaaacagatgacggcgacgacgatggtgagggcgacttcactcatgctactcaggaccaggatcatggtgctccaagctctcaacgaactaccattgcaccgggagtccgacaacagcaacaattcagtgacatacaacaggatagctctagctcattcagtgcctctagctttgaaagtggctatccaacgtatgtgtacaaccgtccccaagcttctgattatcctgctactacatgggtgtatgaatggcaagaacctcagtgttccaacatatcgcggttaccgtcgtcttaccgcggttaccgtaccaaaccgtgcggttaccgtgtccataccgtggattttgaattcaaaaatttggaaacgaaatttgtgcggtttttcgcggtaactgcacggttaccgcggtaa

SEQ ID NO: 8439 - DNA, 3257 bp, Oryza sativa
  Clone ID: PAT_MRT4530_14947C.1
atgggaggaaaatatctttggaagcctctgcttcgtttctctggcgaatcctaccgtttttcccctctctcgcgtagctgcgctcaggaccgaaggggcgacggcgtgcgcccgcgccagatccgccgcctccacgccggcgaggccggttccctcgcggtaagcggcggtaaccgcgcggtacgagatggtaaccgcctgggtcgacgggcaagaggtaatccctccgttttgaaggttttcgcgcgggtggagatgtcagatagtagggaccctgtgtgggagcacggggagaatatcccacctggatggcgttgtaagtattgccatacaaagaggggcggtggtggggcaacaagactaaagcaacacttggctgcaagagggaagggggttacatattgcaattcagtgcctccggatgtccgtgagttcttctgccgtgagttggacaggataaaagatgcaggtgaccagcgtaagagtgatagcggaagaagggttgaagcagtaagggtcaactattatgacctaacaggtgatgccgacgaggaggaacaaatggaagcagccattgcagcctcacgacaagacgaaaactttaggagggatgttgaggagcgtggtggcacttatgagcatggcggtgggagtggatccgctcagccggaggcacggaaaggtagaagtaacccaattaccaatatgctacgaagggctacgtctcatagggagtcacctgctgtgagagattacaacctagcatctgccaaggcccctgtgcagccacgcattgacataggattcttcacaaagaaggggaagcaagctaggcaagccattggtgagtcatgggcaaggttcttctttaccgccggcattcctggtagaaacgccgataatccatactttgtgagcgccgttcgggagacacaaaagtggggtgaaagtgtaccttctccaactggtaacgagatagatggaaaatatcttgattctaaagagaaggatgtgaagaagcaatttgataggttcaagaaggattgggatgagtacggtgttactataatgtgtgattcttggacaggtccgacgagtatgtcggtcatcaattttctgatatactacaatggaataatgtttttccacaagtccattgatgcgaccgggcaaagccaggatgctaactttgtgctgaaggagataaggaaggtggtacgcgaaataggctcggagcatgttgttcaaattatcactgacaatggctctaactacaagaaggcgtgcagactactacggcaagaatacaagacaattgtgtggcaaccttgtgtggcacacacagttaacttgatgcttaaggaggttgggaaaatgccagaccacgaaatggtgattgagagtgctaggaaaatttgcagatggctatacaatcataacaagttgcatgctatgatggtcttagctataggtggtgaactggttaagtggaatgctacaaggttcggaacaaactacatgtttctccagagtttccttaggaagcgagatcttttcatgcaatggatggcttcctctgtcttcatgcaaagcaaatttagtgggactttggaaggtagatatgcacatgcatgtctatctagtctgtcttggtgggagaacttagaggcagtagtgaattttgtccaacctatgtactcattccttcggtttgctgacgaggacaagaaccccaatttgagtgaggtacttttgagatatcagttgctcaaaatggagtacgacagtctttttgcgaatcaaagggacaagtttgaagcatacatggaaatcgtgaacagaaggatgcacgacctaaccaacgagactctcatcaatgccgctgccgcattgaaccctaggacgcactacgcgtattctccaagtgctactgtcttccaagacctccgacaggcattcgagtggatgacggatatcgatacggctgccgccgctttgctggaggttgagatgtaccgacgtaagacgggtgaatttgggagggcactagcaagaaggatggccatagatgggaaaacttcacctgcacaatggtggtctatgttcgcctcagacacgccgaatttgaagaagcttgcgttgcgtttggttggtcaatgttgctcctccagtggatgtgaaaggaattggagcacattcgcattcgtacatacgaaggtccgtaatagacttacccacaagaagctcaacaagctagtgtacgtgaactacaaccttcgccttcgaattcagcaagcaaatgcccaaattagggtggaggacgatgatccccttcaaagattagcggacctctcattctatgaaactaacaatcatatcagtgcctggatggacaatgctcgctctaatgcttgccccgaactagatgaagattcagctgagagtgacgctcccctgcctagtcaacttgtgtctgacctagtcaacttggatgacctgcgaaggaccacgggagcttctagtattgctgagtgggctgatacgaatgtaggtgacactcatattgggaaaaggaagactcgaaagccgccaaaagcacgtccatctaaaaaggtaaagggcaagggtccacgatcgactagtgttgatagcgatgaagagacccaagaaagcccagagtaccaagagtccaatgatagtagctcaagaactgaaacagatgacggcgacgacgatggtcaaggaggccaaggcactactaatgtgcctcctaggggtcacacccaacaatcagatcaccacagccccgttcaattcactggtgagggcgacttcactcatgctactcaggaccaggatcatggtgctccaagctctcaacgaactaccattgcaccgggagtccgacaacagcaacaattcagtgacatacaacaggatagctctagctcattcagtgcctctagctttgaaagtggctatccaacgtatgtgtacaaccgtccccaagcttctgattatcctgctactacatgggtgtatgaatggcaagagcctcagtgttccaacatatcgcggttaccgtcctcttaccgcggttaccgtaccaaaccgtgcggttaccgtgtccataccgtggattttgaattcaaaaatttggaaacgaaatttgtgcggtttttcgcggtaactatttcgcacggttaccgcagtccaaaccattttcaatcaatcaaaagcttgaaaacagatcataa

SEQ ID NO: 8440 - DNA, 456 bp, Oryza sativa
  Clone ID: PAT_MRT4530_14948C.1
atggcgatgcagcgaagaattgctcaaggtagcgaggacatgtcccaaggtagttcctttcgtgctcccgggcgccaactctctcgttttcttcttggtcccagtggacttcctcttgtgaagtgcccaagatgtgggaatgcagtagtggagtgcaaatcctggaggcaaggtggtcgagtgtttttcaaatgcgagaagaatgaacaatatgttccagatgcttgcacgtttttcaagtggtatgatagttaccaaagaatggtggaaggaatggaattagatttcaatgaagaagttgcaaccccagttgcaatagcagcagcaggtgaggctgacaaggttgatgaagggaagatggataaactaactaagtggatgcaacttcttgtgttgatcaacatagggcaaggcatattagttctgatgggagtgtttgttttgcttatgaaatga

SEQ ID NO: 8441 - DNA, 3613 bp, Oryza sativa
  Clone ID: PAT_MRT4530_14949C.1
cgtgcctctcgtgccaagccagcctccatcactgccggccacaccactcgcgccgtgccggcctccgctgccatcggttgcgcctctttgcgcagccacggtcgccacaactgccgctgctgccgccggccagccacctgctgtcgccaccgtcgccacgagctccacgcctgctgtcgccgccgcaccgacctctcccgctgcgagtgccccccgttgccacggcagccagcagctgctgctcgtcggctagccacctgctgtcaccgccgtccagccactatcaccaccgtggccgtgagctccgcgccgttgtcgccgacgccgtcgccgcgagctccgcaatgccgccaccggcttgagctcgccccgcaccagatacgccctggggggggatccgcctctagcacgaccggatccggcccgctgttgccgtcctcgccgccgcctccagccccgcgccatctccatccccgccgccgacggtccccatcacccgatgcggcttgctatccccgtcgtcgttgccatccctgccgccgtcgctttccccttcgccagccgccaccccgccagatccgatcggagcggcgcggatctggcggtcaccgtcgccgccgcccaaggcggctccccaggtcacgaatcctaccgtttttcccctctctcgcgtagttgcgctcaggaccgaaggggcgacggcgtgcgcccgcgccagatccgccgcctccgcgccggcgaggccggttcccgcgcggtaagcggcggtaaccgcgcggtacgagacggtaaccgcctgggtcgacgggcaagaggtaatccctccgttttgaaggttttcgcgcgggtggagatgtcagatagtagggaccctgtgtgggagcacggggagaatatcccacctggatggcgctgtaagtattgccatacaaagaggggcggtggtggggcaacaagattaaagcaacacttggctgcaagaaggaagggggttacatattgcaattcagtgcctccggatgtccgtgagttcttctgccgtgagttggacaggataaaagatgcaggtgaccagcgtaagagtgatagcggaagaagggttgaagcagcaagggtcaactattatgacctaacaggtgatgccgacgaggaggaacaaatggaagcagccattgtagcctcacgacaagacgaaaactttaggagggatgttgaggagcgtggtggcacttatgagcatggcggtgggagtggatccgctcagccggaggcacggaaaggtagaagtaacccaattaccaatatgctacgaagggctacgtctcatagggagtcacctgctgtgagagattacaacctagcatctgccaaggcccctgtgcagccacgcattgacacaggattcttcacaaagaaggggaagcaagctaggcaagccattggtgagtcatgggcaaggttcttctttaccgccggcattcctggtagaaacgccgataatccatactttgtgagcgccgttcgggagacacaaaagtggggtgaaagtgtaccttctccaactggtaacgagatagatggaaaatatcttgattctacagagaaggatgtgaagaagcaatttgataggttcaagaaggattgggatgagtacggtgttactataattccattgatgcgaccggggcaaagccaggatgctaactttgtgctgaaggagataaggaaggtggtacgcgaaataggctcggagcatgttgttcaaattatcactgacaatggctctaactacaagaaggcgtgcagactactacggcaagaatacaagacaattgtgtggcaaccttgtgtggcacacacagttaacttgatgcttaaggaggttgggaaaatgccagaccacgaaatggtgattgagagtgctaggaaaatttgcagatggctatacaatcataacaagttgcatgctatgatggtcttagctataggtggtgaactggttaagtggaatgctacaaggttcggaacaaactacatgtttctccagagtttccttaggaagcgagatcttttcatgcaatggatggcttcctctgtcttcatgcaaagcaaatttagtgggactttggaaggtagatatgcacatgcatgtctatctagtctgtcttggtgggagaacttagaggcagtagtgaattttgtccaacctatgtactcattccttcggtttgctgacgaggacaagaaccccaatttgagtgaggtacttttgagatatcagttgctcaaaatggagtacgacagtctttttgcgaatcaaagggacaagtttgaagcatacatggaaatcgtgaacagaaggatgcacgacctaaccaatgagactctcatcaatgccgctgccgcattgaaccctaggacgcactacgcgtattctccaagtgctactgtcttccaagacctccgacaggcattcgagtggatgacggatatcgatacggctgccgccgctttgctggaggttgagatgtaccgacgtaagacgggtgaatttgggagggcactagcaagaaggatggccatagatgggaaaacttcacctgcacaatggtggtctatgtttgccttagacacgccgaatttgaagaagcttgcgttgcgtttggttggtcaatgttgctcctccagtggatgtgaaaggaattggagcacattcgcattcgtacatacgaaggtccgtaatagacttacccacaagaagctcaacaagctagtgtacgtgaactacaaccttcgccttcgaattcagcaagcaaatgcccaaattagggtggaggacgatgatccccttcaaagattagcggacctctcattctatgaaactaacaatcatatcagtgcctggatggacaatgctcgctctaatgcttgccccgaactagatgaagattcagctgagagtgacgctcccctgcctagtgacactcatattgggaaaaggaagactcgaaagccgccaaaagcacgtccatctaaaaaggtaaagggcaagggtccacgatcgactagtgttgatagcgatgaagagacccaaggaagcccagagtaccaagagtccaatgatagtagctcaagaactgaaacagatgacgacgacgacgatggtcaaggaggccaaggcactactaatgtgcctcctaggggtcacacccaacaatcagatcaccacagccccgttcaattcactggtgagggcgacttcactcatgctactcaggaccaggatcatggtgctccaagctctcaacgaactaccattgcaccgggagtccgacaacagcaacaattcagtgacatacaacaggatagctctagctcattcagtgcctctagctttgaaagtggctatccaacgtatgtgtacaaccgtccccaagcttctgattatcctgctactacatgggtgtatgaatggcaagagcctcagtgttccaacatatcgcggttaccgtcctcttaccgcggttaccgtaccaaaccgtgcggttaccgtgtccataccgtggattttgaattcaaaaatttggaaacgaaatttgtgcggtttttcacg

SEQ ID NO: 8442 - DNA, 1902 bp, Oryza sativa
  Clone ID: PAT_MRT4530_1494C.1
atgtattttagagtcattttgggacgtgacacgaaacctgtcgacaaccggacggtggtgttcgccgtattttttgaggcagggctacggtttccctacaacgtgttgttgccggagatccttcgcctcttccaggtggaacttccgcagctgagcccatcggcgcttgttcggatcgctatcttcgactgggcgtgccggacttttgggtttgagcccaacgccgagctctttggcgccatatttttcgccaccgtgaactcgaagacggtgattaccccggctggaacgaaaaaaaccgtgttcgggagcgtgaacttcaatgttcgccccgagcggtccgatctctggctggtgaacgctgctatgtcgaagtgggaccgccattggatggcgaggtggttctaccacaccatccccttcaaggctggttctgaatcagcgaaatccctccggtgtcggcgtagggcgattacgccgaatcggagacccaatattgctgtgaacggcgccatggaggcgcggttcgttctactgcggaaggtttgctcccgccttagctgtcgtgacttggtggaggaattttgtatgcttcgcatttttcccctctcccagtcatggcaagtcgcggttgaacaaggcaaagaagtcgacggtttgccgaacctgatacttcctgagggggtgaacatgttgaccctcgatcaggccgaagccgaagcccgcaggatgatcggcgatgtttcggttgtcgagtatagtcagctgttaacgcgtcaagcggctgggcgggcgaaccgggtttacaatggcgaactgcctccccgggcgaatccccaaaaggccaatgacgaggcagggccttcgcgaaagcggatgcgtggacaagtgaagcttgcccccaagaagcgaagggttcctgcttcgtctgactccgacgccgacgacgaggatgatgccgaagaatgtgatggcgaggaggaaggagaggaagaggaggaggtggaggctgtggctgataaggccgcgggtgaggcggtcgaaaccgcgccgacaccccagggtacactcctaccccaagtcctggtaacaacgaaaccgggatcctcgcggctcactgctcaacggagcgaaccgtgcgagctcgacttgatgggttcaaaagccgtcttcgggccaaaggatgacgaactgggccacaaaaatttggagacggaggcccttgccaactcccttaaggaggcgaaggctgaaaacaagcggctccaatcggaactggagaaagggaaagaagccagggccgaagttgatcgcttgaaggccgaactggagaaggagaaagcccacaccgccgtgctcatagattattacaacctcaccgagccgaagatggaggctcttcggcaggaggttcacaaggctgaagcaagtgctgcagaggagtcgcggcggttttcacgggagatggggaaaaccaccgagtcctcgcggacagcgtgccaaacgcttcgcctcacccttactgacatgggcacgaaagtgcggggtgtcccctccgaagatgcatcagccttcgacttctccgaatggacccaacaggctggtggttcggtttccgactgcgccaccgcatacggcgattgctgtgcacgccagttcggctgcgagcacatcgccgagttccccaagtacgcgaagggggattgggaaatcagtgcgcaagacatttcgcccgcgcttcgtgcatggcgaaaacaattttggcagaaggacggccgctccgccgctaaggcgcgccttttggcgcagctggcgaaagcagaggcggcggacctttgtgaagatgaaggcatggcggccggagggggtggaggcgatgcccgggaccacccagaggtgtga

SEQ ID NO: 8443 - DNA, 144 bp, Oryza sativa
  Clone ID: PAT_MRT4530_14950C.1
atgtggcttgagatgccgaactgtgcaagggctgtgcacagtaggctgggggcctggcggtctgaccggcgctatatgcgcgttctgaccggccaggtgcggcggtctgaccggccacatagggccggtctgaccggccggcag

SEQ ID NO: 8444 - DNA, 3261 bp, Oryza sativa
  Clone ID: PAT_MRT4530_14951C.1
atgggaggaaaatatctttggaagcctctgcttcgtttctctggcgaatcctaccgtttttcccctctctcgcgtagctgcgctcaggaccgaaggggcgacggcgtgcgcccgcgccagatccgccgcctccgcgccggcgaggccggttcccgcgcggtaagcggcggtaaccgcgcggtacgcgacggtaaccgcctgggtcgacgggcaagaggtaatccctccgttttgaaggttttcgcgcggttaggagcggtaaccgtgcggttttgtatggttaccgtcggcttcgtaatctatgagacgatatacgtatgtgcgtgtacatataattacgtcgtattattgcataatgggagggtggagatgtcagatagtagggaccctgtgtgggagcacggggagaatatcccacctggatggcgctgtaagtattgccatacaaagaggggcggtggtggggcaacaagactaaagcaacacttggctgcaagagggaagggggttacatattgcaattcagtgcctccggatgtccgtgagttcttctgccgtgagttggacaggataaaagatgcaggtgaccagcgtaagagtgatagcggaagaagggttgaagcagcaagggtcaactattatgacctaacaggtgatgccgacgaggaggaacaaatggaagcagccattgcagcctcacgacaagacgaaaactttaggagggatgttgaggagcgtggtggcacttatgagcatggcggtgggagtggatccgctcagccggaggcacggaaaggtagaagtaacccaatcaccaatatgctacgaagggctacgtctcatagggagtcacctgctgtgagagattacaacctagcatctgccaaggcccctgtgcagccacgcattgacacaggattcttcacaaagaaggggaagcaagctaggcaagccattggtgagtcatgggcaaggttcttctttaccgccggcattcctggtagaaacgccgataatccatactttgtgagcgccgttcgggagacacaaaagtggggtgaaagtgtaccttctccaactggtaacgagatagatggaaaatatcttgattctacagagaaggatgtgaagaagcaatttgataggttcaagaaggattgggatgagtacggtgttactataatgtgtgattcttggacaggtccgacgagtatgtcggtcatcaattttctgatatactgcaatggaataatgtttttccacaagtccattgatgcgaccgggcaaagccaggatgctaactttgtgctgaaggagataaggaaggtggtacgcgaaataggctcggagcatgttgttcaaattatcactgacaatggctctaactacaagaaggcgtgcagactactacggcaagaatacaagacaattgtgtggcaaccttgtgtggcacacacagttaacttgatgcttaaggaggttggaaaaatgccagaccacgaaatggtgattgagagtgctaggaaaatttgcagatggctatacaatcataacaagttgcatgctatgatggtcttagctataggtggtgaactggttaagtggaatgctacaaggttcggaacaaactacatgtttctccagagtttccttaggaagcgagatcttttcatgcaatggatggcttcctctgtcttcatgcaaagcaaatttagtgggactttggaaggtagatatgcacatgcatgtctatctagtctgtcttggtgggagaacttagaggcagtagtgaattctgtccaacctatgtactcattccttcggtttgctgacgaggacaagaaccccaatttgagtgaggtacttttgagatatcagttgctcaaaatggagtacgacactctttttgcgaatcaaagggacaagtttgaagcatacatggagatcgtgaacagaaggatgcacgacctaaccaatgagactctcatcaatgccgctgccgcattgaaccctaggacgcactacgcgtattctccaagtgctactgtcttccaagacctccgacaggcattcgagtggatgacggatatcgatacggctgccgccgctttgctggaggttgagatgtaccgacgtaagacgggtgaatttgggagggcactagcaagaaggatggccatagatgggaaaacttcacctgcacaatggtggtctatgttcgcctcagacacgccgaatttgaagaagcttgcgttgcgtttggttggtcaatgttgctcctccagtggatgtgaaaggaattggagcacattcgcattcgtacatacgaaggtccgtaatagacttacccacaagaagctcaacaagctagtgtacgtgaactacaaccttcgccttcgaattcagcaagcaaatgcccaaattagggtggaggacgatgatccccttcaaagattagcggacctctcattctatgaaactaacaatcatatcagtgcctggatggacaatgctcgctctaatgcttgccccgaactagatgaagattcagctgagagtgacgctcccctgcctagtcaacttgtgtctgacctagtcaacttggatgacctgcgaaggaccacgggagcttctagtattgctgagtgggctgatacgaatgtaggtgacactcatattgggaaaaggaagactcgaaagccgccaaaagcacgtccatctaaaaaggtaaagggcaagggtccacgatcgactagtgttgatagcgatgaagagacccaaggaagcccagagtaccaagagtccaatgatagtagctcaagaactgaaacagatgacggcgacgatgatggtcaaggaggccaaggcactactaatgtgcctcctaggggtcacacccaacaatcagatcaccacagccccgttcaattcactggtgagggcgacttcactcatgctactcaggaccaggatcatggtgctccaagctctcaacgaactaccattgcaccgggagtccgacaacagcaacaattcagtgacatacaacaggatagctctagctcattcagtgcctctagctttgaaagtggctatccaacgtatgtgtacaaccgtccccaagcttctgattatcctgctactacatgggtgtatgaatggcaagagcctcagtgttccaacatatcgcggttaccgtcctcttaccgcggttaccgtaccaaaccgtgcggttaccgtgtccataccgtggatttttaa

SEQ ID NO: 8445 - DNA, 870 bp, Oryza sativa
  Clone ID: PAT_MRT4530_14952C.1
atggacgcgtgtgtgcctggcttgcctcccccacgcccccgcgtgctgcctgccccggtcgcgcccggggagagctacgcgagatgggccgtgcgtgcacgcgggggtcgcgcgcggcagcagcaaaagcctgcaacgacacgtccctctcgcgccccggccgcgggcgcgcgcctcgcctgcagatgggctggatcgatcgatcgatcggcaccggctaaactccagagccgtcgctgttcacgcacgcgcggctgctccgagtcgacgccgtcgcggtcctcgctgcccacagaggcgggcgcgcactcctcgcgctaccggtttggcggacgcgcggagagagagcgagcatggccggcggacgcacgcgcgaacgcgctaacgatctcatgggacagcgcaagtgtgtgcaacgccgctccggcccccgggtcccccgggccccggtcgactgcagggcagcgcgaggcggacgcgtggaccgatctttacagcgggttcggccgtgtgatcgtgcgtgatcggtcgtgctccgaaagcgatcgagcgcgcgagccgggccgctgtcaccgcgccgacgcgcgcgagcggcggccggtgtgggcgggcggcgttgcgggctgcgccgatccacagctcggtcacggtgggagctcatcgccggagagggaggtggccaggtgggggaaggaagggggtcttgctggagaagggttccacattgttggggagcacgccgtcatcactgcagaagagattgagggggaagagagaaaggatattgacctggtcaagcgcggtgctcgctcccattcaatcgtgcgcgggttgggggggaggaggaggaggaggcaatcacttgacacg

SEQ ID NO: 8446 - DNA, 390 bp, Oryza sativa
  Clone ID: PAT_MRT4530_14953C.1
atgacggcgtgctccccaacaatgtggaacccttctccagcaagacccccttccttcccccacctggccacctccctctccggcgatgagctcccacctcgcgatctcgacaacttccggttcctgatcgcctctggctctgggggcgcgcgggtgtcgcgactcaaaccgacgctaagctacggcctacgggtcgaccggggcccgggggacccgggggccggagcggcgttgcacacacttgcgctgtcccatgagatcgttagcgcgttcgcgcgtgcgtccgccggccatctgaaggcgaaggcgccggcgctgtacccgaggaccgcgacggcgtcgactcggagcagccgcgcgtgcgtgaacagcgacggctctggagtttag

SEQ ID NO: 8447 - DNA, 756 bp, Oryza sativa
  Clone ID: PAT_MRT4530_14954C.1
atgccttatattatgaaatatctaaaagcggagcagcttctcggcgcgggcgacgccccgcgtgcagagcccctccccagcgctcctgccgccaactacctgcccttatcctgcgtcgtcatcaccaccggacctccccgtgtccccgtggcgcctcctcgtccatcgctggcgcggcgggcaagatccctcccctcctcgtccgactactaccgcgagattcggccgcacgccatccgtcgacagttcatgccattggttggctcttgggtggcatggagtggtgagtttgtggccgtttcttgcggcatggtgaggtggggggagaaagagagactgcacatgtccatggcgtggtcccgcaactcagaggcgagggaggatgacgagatgagttctttgactcatgggaggcccatgctcgaggtgtggacctccgcccactgctcccgccggcgacgccctccccttctcttggtccgccgtgtcgccggccattggacctccccgtggcgcctggagagagaagaggggagagagatgaagagagggaagatgaggattgaggaggaagaagaggagggtcttcttcggctagggagcaacgacatcgtgtacgtagttgatggccacgatgaggccaagaacatgctttgctcctcctatgcgtatgagattgccgccgacgcctcgcgcgtgctcccggacaagttcaaggagtgcgacgatcgagcagctggcagccatagggaatga

SEQ ID NO: 8448 - DNA, 650 bp, Oryza sativa
  unsure (1)..(650): unsure at all n locations
  Clone ID: PAT_MRT4530_14955C.1
aaggggatcgcccgtgtcaaaaggtgtgtcaacagcgtgggctgcgctcgtctgtcccaaaagtgaacctgctgcacnaccacctgtctgggtctgtgtctgtgncggaaccccggaaccaaaggccacaatcaaaaagctgtcantacagccactggtgtcgcctgccccccacggggtntgttgtgaccctgggtgtaccacgggaagagtgttttaacgccactgctccaatagcccacagaccccactgggtctgggtgttggtgacancacagacacgggaaattagtccttcgggctgtccccccntgtgtccgcactttgatgtgagcgtcctgatgtgaggatggctggagaatgtgtgtgatgactaggtgcaatgatntagtgtgcgaaactggtgancaaccccaaagtgttgatgggtgagcctggancctgtgcagagtgcaagggtgtggccgatggctgtgatctgccctgtgtgctggcgaagatgagctgaccccgtgcgtgactgggtgccctgaaacaccanctggaattgtgtggctgccaatgttgctgccccaaatgggctgggatgtggtttcatatttgcttcggaagtgtttcgnatttgttttgaaaaaaaaaaaaaaaaaaaa

SEQ ID NO: 8449 - DNA, 502 bp, Oryza sativa
  Clone ID: PAT_MRT4530_14956C.1
tgaaaatttcaggagaaggtttaagctgatgatgaacaagaaacgaatatactgtataattaggtgcacatgataaaaggtgatgaggtcagaaagtagaggtagatggtaacagctatggtgtgcttatatgagtacttttggtttaattgctgcttagagccgaaagagatcaaaggacttaattccactaccctcaaaacccgggcactgcccccaagatggttctctaaagaactatattatctttgtcaattaaataatagctaaagattatagtttgggtgtgttaattgaccccctaccagttctatatttgaatctaatcatttcacagtatgcactaaagaactgattgatttttgtgtggtctacaagtccaccccctgagagctttgtattgattgattcaccatgttactaattgaaagttttattggagtaattgataactgcaaaagtagtaaagctccttatttgccaacttgttgatggaaacact

SEQ ID NO: 8450 - DNA, 484 bp, Oryza sativa
  Clone ID: PAT_MRT4530_14957C.1
atgctgaattttgacgaggagaagaggagacacgtgggagggccacgcgggggagagccattgatgggggagccggtggtcaagcgagtttatccccgcgaggcagcgaacgtgaagcgacctggtctccctctctcccatatgcccatcaacgccatcatgcgctgccgatctcctgtcgctggccgtcgtgcatgcattgaaccaagcgaggaacggtcgaacgaaggggccgaggggaggggaggggaggggggcgaggcgaggccgccaccgattgggagtcacactcatcacaggtcacagctcctactatcccatccatttccggcggatgaaaggggggagaaaatttgtcgcggaggccgtgcagatgctggtgcctggtgctacgcggacacttggattcatgcatcttctgtgccgccgtgcgtgtgtgttctcgtgggctgtcaacgtgggaactgggaagctcattatcctc

SEQ ID NO: 8451 - DNA, 976 bp, Oryza sativa
  Clone ID: PAT_MRT4530_14958C.1
ggcacgaggcgatcttctcaaagccatcaacggcgttggggtcgccgaatccgatcccggtggtggtcatgtcgtcggagaatgagccccagaggatcagcagatgcttgacagccggtgccgaggatttcatccttaagcctctcaagatgaacgatgtccagcgcctccggaaatgctccggcgccaccaggccgaagtccgccgtcgccggagacgatgaccggtgctgcaacacggccaagaaggcggcggcggcggcggcagccacaccggagcagcagcagcagcagcagagatcgccgcatgttttttggtttttgcaggtgatgaatgcatccagcttcgaggtgtcgcactacttccagctcatcttcaagctcatcctgctcgcctacgccgtgctgtgcctcagccagctcctgcacagatggtccaatggcagcagcctcctctccctgtggtgcgcatgaattcaagaaattaaatcaaatcgacgatccagaaggctggattgattaatttcccattatcgatgaaaaaaattgaaaaaaaaagagagatggatgaagactcagtggcatagcgtggatttatccgaaactgaaacctcttcatcaagcaagagtgcagctaaggtggactaattggatgcatgatgatctccatcccagctaagcatgggggttcttaattaattcagctataatataattttcaacagccatgcatgcagcagcagctaagatgtgatctttctaggggtagatttgttacttatttgttcttaaattctcaagaggattctaaccaggttattaattattttcagaggtttttaagtggtactatactactactgctacttagattattttgctgagagagaaaagagtagcagtacagtagcaccacaatttgctcatttgtataaagcggccccgcatgatttgagtgggcatctggtgtcgttttt

SEQ ID NO: 8452 - DNA, 339 bp, Oryza sativa
  Clone ID: PAT_MRT4530_14959C.1
ggaccccatcacgggtagtacattttattaactcataatgggctcaaaaagctctgtttgatttacaagggagtaacatgacatgataccatacataacgggttaggctggcatgcaacttgcttttgtgtctttaaaatcttcctaggaaaattttcatgagtacaccaaagtccaatataggagtttttgaagtatttgattttttggcatgaccctataaaagcctaattacatagccatttttgcctgaaaagctgccaactcgtcattttaaattttgctgttttgggcaaaaggccgagttggttgttttacacccactggaacaataggggc

SEQ ID NO: 8453 - DNA, 547 bp, Oryza sativa
  Clone ID: PAT_MRT4530_1495C.1
ggcggagggccttacacctcttggtggttctgggcatcgcctccaccccctccggccgtcgcgccttcctctaaacaaagggaactcggcgatgtgctcgcagccgaactgctgcaggaggcccatggtaaaggccgctgacacgcgcgcacagcagtcgccgtacgcggtggcgcagtccgaaaccgatccaccggcctgctgggtctactccgagaagtcgaaggctgaggcatcctcggtagggaccccgcgcaccttcgcgcccatgtcggtaagggcgaggcggagtgtttggcaagccgttctcgcagattcggtggtcttcgccatctcccgcgaaaaccgccgcgactcctccgcggcgctcgcttcggccctgctagccttctggcgaagagactgcatcttcggctcagtaaggttgctcgacgaccgaaacatcgccgatcatcctgcgggcttcggcttcggcctggtcaaagggaagtatcaggttcggcaaaccgttgacctcttcgccttgttcaaccgcgacttgccatga

SEQ ID NO: 8454 - DNA, 432 bp, Oryza sativa
  unsure (1)..(432): unsure at all n locations
  Clone ID: PAT_MRT4530_14960C.1
tnggcncctgggtcccgatttgggcacgaagctggtgccgaattcgggcncgaggaaaaggtgtgagcgaacnccagctgtttcgcgtgcatgggtggataatggagcgattttaagctgtgttggggttagctctttgcaacgcatttgggacactttgttgactggcaaagctaccgtagtatgatttgcttacaaagcgcgagagcatggtggatcggaatcatgggatccgtcatgccgcccctatgacaaggtatatatcctggcaaaatggcgtgttggtgtttttattcgcccttggaacaatttaggactttatagggaacgcttgccttgaaggaacccggaaccacgtagctatacccccatattcaaacaccgatgataaaaaaaaaaaaaaaaaaaaaaaaaaaaaaaaaaaaaaaaaaa

SEQ ID NO: 8455 - DNA, 227 bp, Oryza sativa
  Clone ID: PAT_MRT4530_14961C.1
ttctcacgtaggcacaaacgttgcaagctaggggttgtttaaaccacgaaacctcgggaaccaaacggatataggatagatcaagagaagcaacaggtggcccaaagcgttaaagcagcgcgccgaggaagacctacaacacaaattcctacagccgctaggtgggccgctacaccaccgtgctacagtgacctaagaaggctcaacagacggtcaccaggatgaaa

SEQ ID NO: 8456 - DNA, 461 bp, Oryza sativa
  Clone ID: PAT_MRT4530_14962C.1
gaaactctggatgaccaagtacagtacaaccccggtcacactcataaccgtgtcaggtatgctacgtgaacacgctctgacctatgtgacattgtgggcgatggaattcacctgaacggatccactgcttcgccaaacggattggctctgagggctgagcatatgcagtccctgccaagaacccccagatgcatgtggactgctcgtgctgctcactcagagagagcgatccgtcacgtgccggccggaggacggacctagatcagccccctgagtggccttccgcgggcgtacaacagccgactcacaactgtgccggacaaagagatttcctctgtctaattaaaacacagcattgcgaaggtcctaggagatgctgacacattgcgatttgtgcccagggctatgaatgtcaaagtgactgaactcaatcaagcgcgtgcatacggtgtgagtaacta

SEQ ID NO: 8457 - DNA, 318 bp, Oryza sativa
  Clone ID: PAT_MRT4530_14963C.1
cagacaatggtatggccatgcaggtcccatgaatatattctttttgctaccagctagagggatctgatgtacaccagttccatcagatactcacctgcgctgttcaggttttcctagtcaatcggcttatttgctatgttatgaggagtggtcaaactgcctatggtgccgttcatatgatgttttcttctgtttgcaagagttcctggttgcccaagcttgttggtagaggaagtaatgctcaaattcatctcaattgtagctgtttctgagattggtatttcaattgttccatattagattgtcatcaaattgata

SEQ ID NO: 8458 - DNA, 888 bp, Oryza sativa
  Clone ID: PAT_MRT4530_14964C.1
atggagggcggcacgaacgcgcggcggcggcgtctggtggagaggggagccgatcgcctcgccttcatcaccggccaggcgcagaccctcccctccgatccgctcccagattcaccacttaattctgttgacgcagccacccctcaaatatctgaaaggaatgcaagtgagggtggcattagtggtgataaattcagcaatataactcggctgcacaaatcacaacctagtgatgtagtacctgaaagtcaactgtctgccaaagcccgtcaggaaattcatgatggtgacctacttcgagaattcaagacaagcagcacagttcctgaaattcagccagtaaatgaaacgcccatgcagaggcatggtgaggaaacacttggcaagaggattaatcatgatagaacagcaactgtgactaggaaggagatggaaacgagacccaaatctgttcctccaaaccagtctaaccaagcagaaaatgcagcttggtctgttgaaactctgaaggagcacttgaatttcacaccgcatgagattacacaggctatatcagctacagagtataaccgttttttagcctctgtcgctgttgcctttctggcggttctttcaaactggggcctggacattggtggtactatcacaagagtattagttggaacaagaccacttctgtttcttattataacgaacgtaaccattgtcttcactttgttgatggagaacaaggacccaaacgtcaggggaagatcagctggcagcaaccttggttctgctgatagcttagggcaaatgctggagatcggattgctgctacagaaatccctgggcgctctcctgatggactgcagcatttgtgctgtcatcctgatctgtttcctttga

SEQ ID NO: 8459 - DNA, 545 bp, Oryza sativa
  Clone ID: PAT_MRT4530_14965C.1
aaacctcgccgattgtcaaccactaaaccaaacaacataagctaacacggagcatttatgaagtggaacaggcttcgagctttgggagaacgcctcgccatgcatcagcaatatctttagctaactttgcttggcctttggcaaattcatggaatgcgaatccaatatcagctgttttctgctcttggaaacgtgcaagctcttcattcattactgcaactatgtgctcaaacctctttgtagcctcctcactgtctgctgtcaactctcggacctcagcttctagttcagaaaatttatcagggttcacgaacttcaatttttcgagattaacccctttatattccttctgctgaaataaatcatgatgctgcctgaaagcattggctcgatccaccatagttgcttttattgactgcacagcacgtacataatctttcaaaggctcttcaaagttaaagagaaggttgtctgcctctctttgcagctttactgataacatctctgactttgatccaacttctgaaaaaactttttccaaggag

SEQ ID NO: 8460 - DNA, 1356 bp, Oryza sativa
  Clone ID: PAT_MRT4530_14966C.1
atggcgcagccgcagccgcagtcgcagcggcagcgcgtctacgaagcctggaaggggaataataggttcttctttggtggtcggctaatatttggacctgatgctaaatccctgcttttttctgttgcactgatttttgtcccggttgcggtcttctgtgcgtttgtagcacggaatcttcgtcatcaatttcctgcatacaatgcagggtacgcaattcttgccgtagcaatagtgttggcaatctatgtgctttcgttacttttcatcaccgcagctcaggatcctggtattgtacctcgtgcatctcatccaccagaagaagagtttcactatgacaatttatctcttgcggacacacctggcagactagtcttccctcgtgtaaaagatgttatgcgcaattaccgatactttttcctatttgtttcttcggcgagtatcctatgcatttatgtatttgctatgtcagcattgtacataaagattctcatggatggagactatcccacagtgtggaaggctttgaaacactcccctgcttctcttgcattactaatatattgtttcatctgtctttggtttgttggtggactcacaggatttcatacatatctcatcagcacaaaccagaccacatatgaaaatttccggtacagagcagatggcagaccaaatgcctatgatcgaggatgtatgaataactttctagaagtcttctatactaaggttccaccttccaaacacaagttcagggaacctatacaagaggaagcgcgagctccaccagctaaccgtgctgtggagagagaagaagagccggttggtgctcggacaaaagtggaagatgaccttgacataggtggtgatctcttgaagatctcacaacgacataattatgatggcattgatattgaaatgggaggtggagacagaaatagtaggaatgaggctgtctcaaactccaaattgatatcaaagacggatgcacaagctcctacagtggaagatgagttgtcgttcctcatgcacactcttaccctcatatcgtctggaggatgtcgatttcatctagaatgcaaccccattttgtacccttacaaacaatacaattttcttgatagggcaatcatcacttcgttccattttgagaccactctagtgggacaattctgttcacataccgtactatttctccaatatgctgtgctgttgaattcggattgtcagcaacaggctcatctggtggtcaatgcagaggacattggcatcatcaccgacatgttgccatcgcaaccagattcagagctgccttttgaatgctggtcgtgccgttgttctactggaatcctgtaa

SEQ ID NO: 8461 - DNA, 156 bp, Oryza sativa
  Clone ID: PAT_MRT4530_14967C.1
atggcaacggggtgggacgggaccgagttgggcaagaacggccccggccccgctccccgcatttgccccccgccccgcattgcttgtcgggtgaagaaccccacccgccctaggccctgcaagggactcgccaggcaggccaccgacactggctag

SEQ ID NO: 8462 - DNA, 1416 bp, Oryza sativa
  Clone ID: PAT_MRT4530_14968C.1
atgaagaggaagtacataatgatgccgattattattcaaggccccaagcaaccttgtaacgacatcgacgtgtacctaagaccactggtcgaagatcttaaacagttgtggaagaaggaaggtgtccccgtgtgggacgaggacaaacaggaggagtttaacctacgagcgctgctgttcgtaaccatcaacgattggcctgcacttagcaacctatccggacagtccaacaaggggtacaaggcttgcactcactcaaaccacccggtacggaagaaaggcaagcacttcgaacataaggccgaccaccgtacgaatcctaaacatcgcagcgggaaaacagtgtttgctatggttaaagatcttaaagtagtgttcggaaaggggcctggaagccagcatatagagagcgaagatggtgtataccgaaagtcgaaagatacactggaagcacgtaatgatctgaagcatatggaacaacgcggcgaccttcacccggaaccaaaggagaaaggaagccattacttgagtccagccagctacactcttagcaaggcagagaaggaaaacaatgtcgatactggattcatcgaccctcggaaagtaaacgtcgcaatgctcgaccaatatccacaagaaacagaggacaatctcgtccatctcctgaaggcgcagcattacaagacgttcatactgttgccatacaacacagaattccactgggtgcttttactcatcgacctggaggcctgcaccgtcaacggcgcaaagcaaaagcagggaactaacttgtgcggctattacgtgtgcgagtattgccactgccttacagaccaaatcatcaccacaagagagctcgatgaggggaatgacgcgtcgaacgtcatcgttgccggcctggtcgagactgggctgggttttcacccgccaatcaccacctgcgagtccacagctggcgctccgatgctccaccaccatcaaacttctgctggcacgtggaaccactgcatcagcgccccctgccggccagccttccagtcaacaccgccgccgccagctgctgctgaccgccattcggcaatcgccatccagatcaggccgagttggggcggatctgggggcctccgccgccgtggccgccaaaccccgcaccgccacgtccactaccaggtgccgccgtcgccacgttcactccccgccgccagagacccctccgcaagatccgaccgcgcccggcccggatatggacaccgccgccgccgccgctccgaggagcgcccctggccgcccagcgcgtggaggccggtggcgaggcgggggaggagaagggagaaggaggaaggcgccggcggcgtcgcctcccaagtcacccggggaaaggtgacgcgagaggaggaagagtttccgattggttga

SEQ ID NO: 8463 - DNA, 595 bp, Oryza sativa
  Clone ID: PAT_MRT4530_14969C.1
ttgtcgacgagtgatgctcgtagaccggatgagtagagtattggggtacgttggaacgagggtgagatcatagtcgatggactcgacgagatctcccggcgacttggctccgcgtactccggcttcgtaaactttggtgggtgtgtcggagatggaattcgattcccgaaacccctcctagggggtcccttttataccatggatcttcttgaccctcaagaactcttgcgagtaggacttcggaattacttgactcgtagagatatttcgttccatccgaaacggtttccacgtgatatttatgggtacaatccgtatatgttaagatataccttatcgagatattccataagtcgtaggataggaggtataccttatccgtaaccatcataccactgcctctttctcttttccactcaccgtagtaccaaaacaccatatattgccaagacgcaactgataaatggcctcctctcgcggccatgccggccggcggggccaagctttcaaatggccacccgggcctggctgaccccatcagccgcagattttccaaacatcgaacccatttcacagcaacaatttcacaaagcag

SEQ ID NO: 8464 - DNA, 156 bp, Oryza sativa
  Clone ID: PAT_MRT4530_1496C.1
atggtggtgctggaggtagtcaaaggatactatgtcggggatgagatggaactggagatggatgtggaggtgggagggtgccgtggggagatccgagaggacgccgtgggcggggaatgctgccccaagggtgagactgacgacgccttgcgctag

SEQ ID NO: 8465 - DNA, 996 bp, Oryza sativa
  Clone ID: PAT_MRT4530_14970C.1
aaatgtaaattttttttgaacaactcgcaaaagacggtgcaaagtttattgatagagcagaaaaaaaattacaagattacaaccctggaaagtcgtaaccaggaaaagaaaaaaagtataccaccacccacacaccggcaacgccaacacacaggtccaggagaaggctagcaccgaaccggccgccgctaagcatgaccgaccgccgctaggccaacaacaaaacacagccgagatcgcggcgctccgatgctccaccaccatcaaacttctgctggcacgtggaaccactgcatcagcgccccctgccggccagccttcgtgcgtcgtagaccgcaccgcacccaccggcagctcctccttgtcgcaccgtgcccgcctcctccaccaccagcagcacctcgccgtgtcgtaacaggcctacggcaccgccggccacgcctcaccgtgctaagccgacctccaccgccactggtcgcgccacctcgcgccgtgccggcctccgctacccccggcctccatagccgcggacgccacaagtaccgccgccgccagctgctgctgaccgccattcggcaatcgccatccagatcaggccgagttggggcggatctgggggcctccgccgccgtggccgccaaaccccgcaccgccacgtccactaccaggtgccgccgtcgccacgttcactccccgccgccagagacccctccgcaagatccgaccgcgcccggcccggatatggacaccgccgccgccgccgctccgaggagcgcccctggccgcccagcgcgtggagggtgagagaaggcccccccgccgctgtccttgcggccgcacggctttgccagtgcccgctcagccggtggcgaggcgggggaggagaagggagaaggaggaaggcgccggcggcgtcgcctcccaagtcacccggggaaaggtgacgcgagaggaggaagagtttccgattggttgagaggaagtgactgaagcaga

SEQ ID NO: 8466 - DNA, 270 bp, Oryza sativa
  Clone ID: PAT_MRT4530_14971C.1
atggtcacaaccatgttcgtgaagcaggctgagcacgaatccgcggcaactcgcgcacagcagtcactcaagctgacgttcccgctcggcagccctcttgttcgccccctccaagtcggcgcggagagatttgttttcccccacaagggatttgttctccgcgctcgccttcttcagggcatccgccacgacctgacgttcgtcttctttgtggtggaggtcctcttcggccttccgaaggtgaagccggtacccatccagcctctatag

SEQ ID NO: 8467 - DNA, 316 bp, Oryza sativa
  Clone ID: PAT_MRT4530_14972C.1
gcgagatgagttgatgtatagtttgtacctcatgcttcaaaattttgatactaactggctaagtaatcatcctagaaaagccaaatggcagaaacttgctagtgatctgaacacttcatgtgaaaaaaaaaatagtaaaattgggcttgttaaacttggtaggctttagctctgtggtttcatggaagcgaagaactggcaaacctgggccggccggtggtgaatcgtgggttgttcccacctgcacaatgttttgatcttttttttttttgaacatatggaagatggatgaatataaggcgtacatttggtgggg

SEQ ID NO: 8468 - DNA, 1171 bp, Oryza sativa
  Clone ID: PAT_MRT4530_14973C.1
atggatgtgagcaggaggaagaagtgggtggcgtgggtggcggcggtcaccatcttcgtcgtgctcatgctcgtcaccccggccatcccgcagaacgaggagtaccacgacttcgccgaccagcgccgccgcttccgtggcggcggtcaccatcttcatcgtgctcatgctcgtcaccccggccatcccgcagaacgaggagtaccacgacttcgtcgaccagcgccgcctcttcctcgggatccccaatacgctgaatgtgatttcaaacatccccttcttttttgtgggtgtggtgtgactgctgttgcttttggttcatcctattatcatctcaaaccgaatgatgccacactagtttgggacagattgccgatgacaattgctttcacatctgtcatggccattttcattattgagagggttgatgatagggcaggaacaaagtccctagcacctcttgttattgctggtgcactaagcatcatgttctttgacgatcttcgcccatatgcagtaattcagtttgttccatgcattgcaatacctgtgatggctattgtaattccaccaatgtatacacattcgagctattggctgtgggcagcaggattttacctccttgctaaggtagaagaggccgcagataaacctatatataaatggacccatcaaattgttagcggtcatactcttaagcatctagctgctgcaatggtgcctgtgttcttggcactcatgctggccaaaaggactgttgaaccagaaagggtaagtttattccagcggtggaaggtcaagttggttgcagtgagagagactcgattcaacaaggacaggaatacagtcgactacaactatattgcagtttccactacacctgaaccatagatgtattgttattatttttcatgactttaatttctgtacacatgtaagagaaatggcaccggccagcatagaaactagatcgatcagtgtacattacaatacgagacgcgtcatcgctgctaatcagaacgtgatggtgtcatggtgatgttgtatgataacccttcataaataaatcttgtgcatattattcttgctcaaaaaaaaaaaaaaaaaaaatttcgctctctaatggtctctattcaatacatatctttggctggccaggtgttctcgatct

SEQ ID NO: 8469 - DNA, 627 bp, Oryza sativa
  unsure (1)..(627): unsure at all n locations
  Clone ID: PAT_MRT4530_14974C.1
ccggccgggacgaccgattgctcaattgaacgctgcccaattcgcccaacatgttcgtcgcacgacaaagggcagccttcgtggctcgacagctgcagcgaacagcacgaacctacgcctccgacgcccacgcccaccacaaggccgccgaagtcaacgagtccttcagcaccggatctctcttcgctgtcgccggtttcttcggctccgttctcgtttaccagtttgttcccgccgagggcgagcaatctgcaatcctcaacttcatcaacaagtacacttcgcgcagcaaggactgggaggaaatcaacgctcttcacaccaaggccatggagcaggctggctacgaccgaaaccttttcgagaacggcggcaacaagcaccngattcgtcgatgttgcataccccgaggcaatttcctcgtacgccaaccgaaaccacattgctggtcaccttcccaacatggattacgttgttgagcactaccgacaacagcaccttaaggaggaggagcgaaaagcgaccaagttggcacagaagcaggaataagggatgtacactagacgtgaatcgatacatgaattcatttttcattgaggcaaaaaaaaaaaaaaaaaacccgcggcc

SEQ ID NO: 8470 - DNA, 623 bp, Oryza sativa
  Clone ID: PAT_MRT4530_14975C.1
atgggtgacgaccacgacgacggccgcgccttcccctgctcgcccgagaccaccccacgtcgaggccgcccgcgaccgccaccgccaccgccaccgcgtccgaccttcgccgccgcctccgctcgccgggggtgtcattcttcccagaccgtccccatcgaggccgccgccgccaccgccgtcgcccagcgggaggagtcgattccttccagaacttgtgagacttatacgttccttgggggagtccccgaggccgctagagagctagaggcgcatggtcgcttcaatcagctcgtcacgcagatgcaggtggatattgctgcacgcgacgccgccggattcgtagaggtggatcacggcgccggcgccggatctggtatactcagatgggccgtcggcagcgtattcgccgtgttctgggtggcccttatcatcggcctcgttgggggtgagaaggatccagttccagccgtacgagcagtgactcggtctccgcatgatattacccatctgggcctatatctggcgggacttattaccgtgttggatcagtatggtctatcagtacctgttattaggacctgacagtagctgttggggattttttcaaaaaaaaaaaaaaa

SEQ ID NO: 8471 - DNA, 685 bp, Oryza sativa
  Clone ID: PAT_MRT4530_14976C.1
ccggcaccggcccccccccgcctcgcttcgcggccatttcgcttcacgcgggaaactaaaggcccccccctttttttaaaaaacacagcccattatccatacagcaaattagcaaattttttttttttttttactgcaggaacataccccccttgatataaaagtcttgaaaacaagttcacacacaaccagaggtactctgcccactagttatatcacttccatcatctgacatcacggtaacagttacatagttgaaatgcagcatggatcatcacacaaattccttggaacattcgtgaacaaaggcaataaggaacaagagttctggagcatgctgggtcaacttaacctgctgtctcggtcttctccagcgtgttgtagttgagtaacttctcgatgaggtcaacatgggtcatgagcattcgccggcagcagtaacggaccaaacccaatgcatccagagcatccccctctgtgtagtcagcctggaggagatccaggtacagatcccacttgttcccaatcaccttcccgcaggtgaagcaccgcaccgggatgatcatctccgatgcgctcccgccgccgccgccgccgccgccggagaagagtgggagaaggggagagtcggagagggtttttgcgcgtttcgaaagggaggaagcccggccgggcagcctctcgt

SEQ ID NO: 8472 - DNA, 443 bp, Oryza sativa
  Clone ID: PAT_MRT4530_14977C.1
gcacgaggtatgaaaagtaagttcgagtgcttcttacttccattgctctttgcaatgcaaaagttctgcattggtttgcttttctcgcctcaaaaatggttgaaagtagcatacgatagacttttagtgtatgatattccagtaaagattgaatggctgttgtgccttgctgttggattaggggaaagcattcgaatattttccgcatactcatgtagtcattttggtcgtatgtgcgttacttataggatatatataaaaatataccccctccgtcccagaataacttaatctagtacctgtccagatttatagtactaggatatgtcgcatccagtattagattaacttaattctgggatggaggtagtacctacctcatgaaatgccttcttgggtttctggtcatacactgaaagcatttatattcacaggaggtcgcc

SEQ ID NO: 8473 - DNA, 1641 bp, Oryza sativa
  Clone ID: PAT_MRT4530_14978C.1
cgacagcgtgcgtgtgtgcgcggatggcgtgccacgaggtgggcgcgccgcggcggaggtggtgagacgggcgggctcgcgcgcgatggttgtgtgatcggcgcggcgcggctgctcctcggtggtcggtccgtgcgtctttctttttcttctttggctggcggcggcggcggcggcggcggacaggggtggtggtggtggccgccacggggaggcagggagggggcgcgaagatgagctgcttcccgtgcttcggcggcggaaagaagaagagcctgagtgccgacacggcgcggttcgacgacgcggatgcggcgcccgcgtcgcagatgacgccgcccgcgcccgcggccgcgcccatgacgccgcccaggcccgatcaggcccccaagccatccgaggacgcctcggcggggctcgccatcgccgggcaggcgttcgcgttccgcgagctcgccgcggccaccgaccacttcacgccgtacaacctcatcggagaaggcggcttcttccgggtctacaagggtcaactggagaagactgggcagaccgtggtcatcaagcagctggacaggcatggcttccaaggcaacaatgagttcctggacgaggtctcgaagctcagccggctccaccacgacaacctcgtcgacatcatcggctactgcgccgacggcgaccagcggctcctcgtctacgagttcatgtccgccggcaacttggaagaacacttgttcgatttgccggcggacaagaagccgatggactggtgcacgaggatgaaggtggcgtacggcgcagcgcaggggctggagtacctgcacgagaaggcgagcccgccggtggtgtacggcgacttcaaggcgtccaacgtcctgctcgacgacgccctcacgccgaagctgtccgacttcgggctcgcgcagctcggccaggtgggcggcaacgcgccggctccgatgatgggctcgttcggctgctgcgcgccggagtacgaccgcagcggccaggccaccatgaagtccgacgtctacagcttcggcgtcgtgctggtgcagctcatctccggcaggagagccatcgaccccgacaagcccacggaggagcagaacgtggtcgcctgggcaatgccgatgtttaaagaccagaagagatatcacgagctggtggatccactcatcaagagcgagtacgcagcaaaggcattgaaccaggtggtcgccatggccgcgatgtgcttgcaggaggaagactccgtgcggccgttgatggccgacgttgtcatgacgctgggcttcctgacctcactgccaccggatccaccagctgccagcgtcccagccccagctccatctgcctcccctgcaccaaaatcagatcactctgatagctcgtcgtcgtcttcctcggacgacgacgacgacgacaacgacaacgaagaagaggaaggggaggaagaggaggaagaagatgcagaggagcaataataagggaaactttgtcaaatgatattattgtggaagcgagaagaagatcaaatgttaaacgcttaatttgaaggatcaggtgattaaaccagaggatggtttgatgtgggaaggagttgtatacctgagtgtattttttttgacgacggtttct

SEQ ID NO: 8474 - DNA, 478 bp, Oryza sativa
  Clone ID: PAT_MRT4530_14979C.1
aaagttcatatagatatgaatgtcagaaacagaattcaaatccagacagtctggttccagagtttctgcttttaatcattatgctatgctgtgtctccaaataataacagtaatggtcatatttaattaatttattctaacatttatcgagcatatgtactatgtgctaggtactgtagacttggagatgaaaatggtctctatggtttataattgagggacagaaaatgtaaacattaaacaaataattttgcaaattataagtgatacaaagggtaagtttcagattgtataagagcaccctgaaagtgttattaggaaaagttagtctcatctggaggaaccagaacgggtttatttcagaaagtaaattgctgggagttcccgctgtggcacagtcagttaatgatccagcttatctctgtggaggcgtgggttgaatccctggcctggcacagtggtttaaggatctggctca

SEQ ID NO: 8475 - DNA, 2736 bp, Oryza sativa
  Clone ID: PAT_MRT4530_1497C.1
atgggccgtttggcgatcgccggcctgatgggccggaaaggcttcctcggccctcgcgggggcgaacttgtcaaggcgaagtcatcctccttcggcagacagtcttcgccttgcacccttcgtctgagacgcctctggcctagcgctactcttcgccttgcgctgctctcgctccatagccttcgccatgggtttcggcaggtttcgtcgaagggcctgatgccatccgccaacaagcccctcacgggcaagggtgagactggagcttcggccaagaccgtgcaaaccatgtggaatttaccgtttcgcctacccttgcgacacgtggcgctttattactggtggcgtctttcgacccctcaggcgtttcgccgaatctcttttttcgccaccgcaaacgcaccgttcgccatggctccacgtaagccaaaccctacttcggtgaaagggccggatcccggccgagtcgatgacgacagcaccgcctttctgggggtctctcttgtggacgacgtcgagctagcgaagctggtcagctccggagggttggttgaggggcaggctttcgccctagggaaaaccgtggtgccgaaacctgtcgacaaccggacggtggtgttcgccgtattttttgaggcagggctacggtttccctgcaacgtgttgttgccggagatccttcgcctctttgaggtggaacttccacagctgagcccgttagcgcttgttcagatcgctatcttcgactgggcgtgccggacttccgagtttgagcccaacgccgagctctttggcgccatatttttcgccaccgtgaactcgaagaaggtaatcaccctggctggaacgaaaaaaaccgtgttcgggagcgtgaacttcaacgttcgccccgagcggtccgatctctggccggtgaacgctgctatgtcgaagtgggaccgccattggatggcgaggtggttctaccacaccatccctttcgaggctggttctgaatcagcgaaagccctccggtgccggcgtagggtgattgcgccgaaccggagacccaagatcgctgtggacggcgccatggaggcgcggttcgttctactgcggaaggtttgctcccgccttagctgccgtgacttggtggaggaattttgtatgcttcgcatttttcccctctcccagtcatggcaagtcgcggttgaacaaggcgaagaagtcaacggtttgccgaacctgatactccctgaggggcgaacacttgcccccaagaagcgaagggttcctgcttcgtctgactccgacaccgacaacgaggatgatgccgaagaacgtgacggcgaggaggaaggagaggaagaggaggaggtggaggctgtggctgataaggccgcgggtgaggcggtcgaagaccgcgccgacacccccgggtacactcctaccccaagtcctagtcacaacgaaaccggggatttggaaggggcgaaggccctagttgcgttctcttcgggcgcgtcggcgaagggaggtcctgtcaagaaggtggctaaaaagaaagggctcgtcaatgtcgctcgcgtttttagcaacgacgagtcctccgacgggactccgacttcacccgctggtcgcagcctggatctttcggccgcccccattcctccacttggcgccgctagagtggacggtagtaccgccgctggggcttcggcttctgcggaaaggattgtgatggccgcggcgaaagtattcggcagtcctccgcatcagccggttgcctcgccgctgatggaggcgaagggaaagagagcggttgctgagatgtccgcttcggaatattcgctctcggtaccccgcttcgcccctggcgacttcgagacgcgagcggacctccttccttttgtggaaggggtaagcaatcttgtactgcctgccagcgccccgagcttgttcaccgaactgaatgagttcgacgaggggtgctctgctataaaaagcctggctgttcggatcctcgcggctcagtgctcaacagagcgaaccgtgcgagctcgacttgatgggttcaaaagccgtcttcgggccaaggacgacgaactaggccgcaaaaatttggacatggaggcccttggcaacacccttagggaggcgaaggccgaaagcaagcggcttcaatcggaactagagaaagggaaggaagctagggccgaagtcgatcgcttaaaggccgaactggagaaagagaaggcccacaccgccatgctcatagattattataacctcaccgagccgaagatggaggctctttggcaggaggttcggaaggccgaagcaagcgccgcagaggagtcgcggcggttttcgcgggagatggtgaaaaccaccgagtccgcgcggacagcgtgccaaacgcttcgccttgcccttactgatatgggcgcgaaggtgcgggatgtcccctccgaagatgccttagcctttgacttctccgaatggacccaacaggctggtggttcggtttcggactgcgccaccgcatacggcgattgctgtgcacgcgtgtcagcggcctttaccatgggcctcctgcagcagttcttagattttcatagggggtggaggcgatgcccaggatcacccagaggtgtgaggccctccgcccttctcttagattttcatagttttcttttggtgttcgctagatgtggcgaaccattgtatattcggcaaactgccgctaaaccttaa

SEQ ID NO: 8476 - DNA, 430 bp, Oryza sativa
  Clone ID: PAT_MRT4530_14980C.1
gacattcgttcgtaattcatatataaatatttgctgaagctagctttgtcacaacaatgttggtaataacaatacaattcaaactacagcgtatacaaaatatatatgctagatagctgcagcggctagcgtacgtatacatatgcatggctactactccccggatggccggatggatatgctacgatgatatatatagctagctgcagagaaaacattatttgctgccaaaagaataacccggccgctacacaagttgcttgctacctgctgccacccttagttacaagggtttagtagtacaactattgagcaccagtcgaacaacctaagcctctcagagagattatttctttgagatcataatagcctcagacgagattatttcacgaataatgctcgatatatatatcggatcgtcgtctagtaa

SEQ ID NO: 8477 - DNA, 459 bp, Oryza sativa
  Clone ID: PAT_MRT4530_14981C.1
tagtggatccccgggctgcaggctcctctcctccatgaaagctagggaaattaactaagggcagtggtgcaccacaagttggtgaagctgccagcatgatctgatgatgatgatgatccacctctctcatctgtgttcttgattaattacggatcaatcgatcaggtcatgctgtagtttcatctgctggttgggagcacagcaaaaaaaaaccctaactttgtagccggatttgcatggattaatctgctaggtagctcatcagattctttgagagtttgccttgctcttctgcagatgaagacgtaatctttgaacagatgggattctcaactctcaaggtgaggtagtcatcaatccaatccatatacctgctcaaattcagttttaattaaagactagctgcttctatggagttaattagggatccttttttatagatctctcttgatctgtttc

SEQ ID NO: 8478 - DNA, 188 bp, Oryza sativa
  Clone ID: PAT_MRT4530_14982C.1
ggaacaaaacccatatttttaggggggcttccagttgaacaaaacccagagctacaataaaaccaagtaaacttttgggaaaaaagggaccaagggatcatgcaaagtaaacataatttattatgggtacaaatatttttactccacaaaaactcccaaggggactcttaattgagcaccaaataaat

SEQ ID NO: 8479 - DNA, 266 bp, Oryza sativa
  Clone ID: PAT_MRT4530_14983C.1
ctttttcttctctttgcataaaaacatgttatgttatatacatattgattaatgttagtgcttggcgatgtattcaatggataattctaataccatcacctacaacgcgacggcgctcgacaccgacggtgacgccgccgacgccaatacgatgcgctctgaagaactggtctacattctccacaatcatgccgtcgcctggggcactaactatcacctggcgttcgtcatgcggtgcttcatagacgagattgttgtttgcaatt

SEQ ID NO: 8480 - DNA, 1262 bp, Oryza sativa
  Clone ID: PAT_MRT4530_14984C.1
tcatacatttaactcagcctcagcagctaatggttcaaaaactgattccacctcacccttgtccacgtcttccagagttgctggcttccactttggattaccttcaacaaaatcatttcgaaccgatgacctcaaggcaattcgatattcaactttcataacaccagccaacttcgatagatagtgttcattattcctatatgctgatgcaacttgagaaaaatgtttttgagttaaacatagagaaaatggagccccttttttgagtcctgccaaggcctcgttggcccattctgccactgcagcatcatcactttgactacacttcttaagctcttccacagattcagcaactgatttgtcaggaccaaaggaagaaatgatatatggtaaaaacttatctagctggggccctgactctggctcgttcttgaactttgtcagcaatgactcaacatctctgtgaggatcatctgtgaagttagcactcaagagggattccctgagaggtcccaggttcgctgaaggtacataatgagttccaagaccaaagaaaagggcatcagcaggtgatgatatccttttccctgtcatcccaaggtaagatccttcatctagagctctctcccccatgtaagcaaagccaacgtccgggaacaagccaataccattttctggcatagccaggagcgtcctctcagtaataatgcggtagcggccatgccctgataatccaattccaaatcccattgtcacaccatccatcaggcatatataaggttttgtatactcatgaatcttacaaatcaaagagtactctgctgtgaagaccttttgcacaagtggtgtgctcttgtccttttgaatttctgctgcaacacccttaatatccatcccagctgagaaggcacggggtgaactgctttccacaagaacacacttgacacttggatttgtttcccattcatcaagaaatgccttgtatcgaaggtccatttcgaggttcatggcgttgagggccttggggcggtcgagggtgatgacggcgacgccgttgggggtgacgcggcccttcacgaactcctccgcggcggcggcggccatggcggcgaagcggcggaaggtgagggtcggggctagggttttggaggcggatgcggcggtggaggaggggcactggaggaaggaagtggtggagatcgatccggggccgggcgggtggatgcgggagaggagagctcgcatcccggccggagagcaac

SEQ ID NO: 8481 - DNA, 603 bp, Oryza sativa
  Clone ID: PAT_MRT4530_14985C.1
cccgcgtccgccgcccggccccggatcgatctccaccacttccttcctccagtgcccctcctccaccgccgcatccgcctccaaaaccctagccccgaccctcaccttccgccgcttcgccgccatggccgccgccgccgcggaggagttcgtgaagggccgcgtcacccccaacggcgtcgccgtcatcaccctcgaccgccccaaggtcctcaacgccatgaacctcgaaatggaccttcgatacaaggcatttcttgatgaatgggaaacaaatccaagtgtcaagtgtgttcttgtggaaagcagttcaccccgtgccttctcagctggtgatcacctctctgtttttattcgttgaaaaagctgggccttgtacattgaacatgctgttttgcgcctttttatttccggagcattggagatgtttgcaaataagattcatgaccaatgcagggatggatattaagggtgttgcagcagaaattcaaaaggacaagagcacaccacttgtgcaaaaggtggggatgggaagagacttgctaatgattgcacaatgccagagataatagagggcttggcaggggagggctgtttggttgg

SEQ ID NO: 8482 - DNA, 1827 bp, Oryza sativa
  Clone ID: PAT_MRT4530_14986C.1
ttaacacaagaacacaagaagaaaaggggagaatgctgccatcgccgccgtcacagggacacatggacatcggtccgccgccagcttccctcccgctggatccggcgaaggggaggacaccgccgccgggtcgccaccgcctcccctcccctcccgccgtatctggcacaccgggccgccgccgcctcctcccccgctggatccggcggaggggagggcgccaccgccgccgagacaccgggccgccaccgcctcccctcccctcccattggatccaggacgtcgggccactgccacctcccctcccactggatcggtggaggcgagggcgccgtccctgcccgccgcctcccctcccgctagatcgaccgccggtggtaggggagggcgctgccgccaccgcctgtgatgagggaggacgccgtcgccgccgtcggtggtgagggaggacgccgtcgccgccgccggtggtgggggattagtcgcaaatactgtaatcatgatattatttattggctcaataatcatcatttttatccttgttatttcttattgcaacataacagggaaattgaagagggtattccggtaccaataatattacatgtttgctgtgaagatcatacatttaactcagcctcagcagctaatggttcaaaaactgattccacctcacccttgtccacgtcttccagagttgctggcttccactttggattctggtccttgtcaactaagacagcacgtacaccttcaacaaaatcatttcgaaccgatgacctcaaggcaattcgatattcaactttcataacaccagccaacttcgatagatagtgttcattattcctatatgctgatgcaacttgagaaaaatgtttttgagttaaacatagagaaaatggagccccttttttgagtcctgccaaggcctcgttggcccattctgccactgcagcatcatcactttgactacacttcttaagctcttccacagattcagcaactgatttgtcaggaccaaaggaagaaatgatatatggtaaaaacttatctagctggggccctgactctggctcgttcttgaactttgtcagcaatgactcaacatctctgtgaggatcatctgtgaagttagcactcaagagggattccctgagaggtcccaggttcgctgaaggtacataatgagttccaagaccaaagaaaagggcatcagcaggtgatgatatccttttccctgtcatcccaaggtaagatccaacagcaccacctcctggagctttggcaccaatgtaagcaaagccaacgtccgggaacaagccaataccattttctggcatagccaggagcgtcctctctattattctcctctggcattgtgcaatctttagcaagtctcttcacatccccaccagctgagaaggcacggggtgaactgctttccacaagaacacacttgacacttggatttgtttcccattcatcaagaaatgccttgtatcgaaggtccatttcgaggttcatggcgttgagggccttggggcggtcgagggtgatgacggcgacgccgttgggggtgacgcggcccttcacgaactcctccgcggcggcggcggccatggcggcgaagcggcggaaggtgagggtcggggctagggttttggaggcggatgcggcggtggaggaggggcactggaggaaggaagtggtggagatcgatccggggccgggcgggtggatgcgggagaggagagctcgcatagtgacgtgagagcaacccatacgcgtgggcggacgcgtgggcggacgcgtgggcggacgcgtggg

SEQ ID NO: 8483 - DNA, 570 bp, Oryza sativa
  Clone ID: PAT_MRT4530_14987C.1
cattgacgctagactcgcaaaagcacaagaaatcctagaagagttgttgaaaccagtggatgaatcgcaagattactacaagagacagcaactccgagaacttgctttgttgaactcaccacttagagaggaaagcccacatcctggtagtgcttctccattcagtaatggtggcatgaaacggatgaaacaatgactggatgcttgttcctcctcctccttgaccctccaagagaaatcaatcaatccatgccttcacaacttaaatttttcatgagcaaagctttcatgatggtttggcattcgcgcggcaatctgttactgctagaattttgatctccatgtgacattttaactcataactgacagatgatggatgagtagcgaggcgaaatcctcccctatggttgtataattagaacatttgatttatttattactggtagtgctgagatactgatagtgtgaagaattcttagttactgtgagctagagtaccagggatttgtctgccttgggtgacttgtctgagcaacatgtttgcaagctgctatcgaagcatttgtcaag

SEQ ID NO: 8484 - DNA, 541 bp, Oryza sativa
  Clone ID: PAT_MRT4530_14988C.1
cttctctgtggaacggatcggacgataacttatgcacgatcaaggtgagagtgaacattgaaaatcctagtcgtgctgagtcatacagcccgcgtgccggaaggatctcaagcgtatataggcacaagttaccgatgctgatcctcatacatatgagcgcttccagagtgaacctagtccagactgctattctctcgcctgtctggaacgtcaatgctcataggctggtctatattattcacgggcgatctcaagtcaagtcgttcggaacttttgaaagactgtgttcgatggtgtctcttcggacaagacaattatggatcattgcgcaacattatgctgtattgaagaaagcagagcgtgacagatgcctatatatcgcaatcaagacagacgctaacgccttcgtcagtcaccttgcacggaaaaactcagtattccgtgccttgccagttgatgtagtcgctaatgcgtgtcgcatctcaagggagcaagcccgaatccttaagaacaacggggagaagagacggtgccttcactc

SEQ ID NO: 8485 - DNA, 519 bp, Oryza sativa
  Clone ID: PAT_MRT4530_14989C.1
atggctctcgcctactccttcttccgccaggagatgtatgaagaagcagtcacactttatgctgaacttgcagaggctgcgcttacaagctctttgatctcgaaggagcctccagtgattgaaccagtcaggttacacagtgggaccgaagaaaacaaggaagccttgaggaagtctcgaggcgaggatgatgaagattttcaaatcacagagtaccaggcacaacgaggcaatactgttgcaatgcacaaattagggcttctgtattactatggcctacgaggagttagacgtgattatgggaaagcatatcattggttttcaaaggctgtggagaaaggcgatacacgggcaatggagcttctcggagagatctatgctagaggtgctggagttgaaaggaactacactgaagcatacaagtggttgacacttgcagcaaagcagcaacaatactcagctacaatggactgggttatctctatgtcaaaggttatggggttgagaagaaaaacttga

SEQ ID NO: 8486 - DNA, 239 bp, Oryza sativa
  Clone ID: PAT_MRT4530_1498C.1
gttggcttgagctataacatctttgcttcatatatatttttttttttggaaatacccaagagaaacttttgggtgggatgcccaccatagtaaaaccactttatgcctcctttggaatggatgaattttaaaggaattttgaaggaattgaattagattctatgaaattcattcgttcccaaggagccccttatgctgaaatggagctgaggagctgataaaaaaaaaaaaaaaaaaaa

SEQ ID NO: 8487 - DNA, 236 bp, Oryza sativa
  unsure (1)..(236): unsure at all n locations
  Clone ID: PAT_MRT4530_14990C.1
cggacgcgtgggcttttcctcctcggttcggttccgtggttcgtctagggtttagtgggttgagatggcggcgccggatgtcgagtaccgctgcttcgtcggcngcctnncctgggccaccgactaccgctctcttgatttcgtcttttccacctactttgatatcctctactctaatatcattatcttcaggtatactttgtttgtcacgtggttttcatttttttcaccatttt

SEQ ID NO: 8488 - DNA, 203 bp, Oryza sativa
  Clone ID: PAT_MRT4530_14991C.1
ataggatcaacaactaatttccaaattcaagtgtcaagcgtgggatataatcatcatgcacgtacagggttccatagatttactacactgccagttgattgaacagcgggcattatcacatggcattcagaggaaggctatgttagatcacagatgaatctgctaacacccagcttggtgttgcatacatagactggatttgg

SEQ ID NO: 8489 - DNA, 3049 bp, Oryza sativa
  Clone ID: PAT_MRT4530_14992C.1
cgtcgatctgcaggcgctgctcgggttcaagcagggcatcaccagcgatccaaatggagccttgagcaattggaacgccagcatccacttctgtagttggaacggtgtcaactgcagccaggcgaggccttggcgcgtcacggggctcaacctcactagaaaaagtctatcaggccagatctcatcttctcttggaaacttaacgttcctacgaaagcttcttctccgtgataataacttttatggtcccatacctcttctaaatgatcttcaacacctagaagtccttaatctgagtcaaaacagtttgaacggaattattccagatggacttgcaaattgctccagcctgaccgccttagtcctctctagcaacaatctaacgggtaggattcctcctaccatatggaattcccttaccaagctagaatacttggaccttgcagctaacaatatcactgggatcatcccagcatctgttcaaaacctcacccacttaaactttatcaggcttataaacaattatttagagggcagcattcctaacaggatttggcaattgccaaatctatctattcttcttataggtaataacacgctatcaggtgaaatcccatcgaccctaaacctgtcccgtatcgagttgctaagtttggagttgaatatgctaggcaaggcattgccaaagaactttggcgatgccttccctaggctccaacaggccaccttggattataacaattttgaaggtcagattccaacttcgctaggcaatgcttcaggactgtggtatatagatttgtcatcgaattatttcactgggcaaattcctacgtcttttggaaggctttcagagttgtctagactaaaccttgcgtacaacaagcttgaagcaaatggaaaccaaggatgggaattcttgcattcattgacaaactgcactgctctaacaacgctctcagtagctgaaaataatctgcagggatccctaccacattcggtaggtaatctatcaatcaatcttcaaaatttaatattttcggtaaataacatatcaggggtagtccccccaagtattggcaactttcctaacttaatcagactatccctcggtaaaaataatttcagtggtgaaattggagaatggattggaaatctgaaaaatctacaaggtctatttctccgtgagaacaacttgatcggaccaattactccctccatcggaaaccttactcagttgacaatgctctcgctgcaaaataataaattcgaaggcatcattccacccaacattggacatctttcgcaactctcaatattgaacctgagctacaataacctccaaggtagcatacctgaagaggttggtaatcttcaagaactggtcgtttttttggcccttaacaacaacaatctaactggtgccatccctcaatctctgggtaacattacctatttagaccaggtctatcttgagctgaatcaacttggaggaaacattcctgatgaaattggtaatcttacacaactcatctacctaaaacttacatcaaacaagcttactgggaaaatacctgatgctttggagatgtgccaaaacttagtgaccatccaaatggaccaaaacttcttcacaggaaccattccaatttcttttggcaacctaaaaggcttgagcatactaaatctttcccataactgcttatcgggcaccatcccagcagtattgggggatctacctctactcagcaagctggacctttcttgtaataatctccaaggagaaataccaaggaatggattattcagaaatgctacatttgtttatcttgaaggcaatagggcactatgcggaggtgtgatggatctccacatgccatcgtgccaccaagtttctcacagaacagaaaggaagagcaattgggccagattgttgattccaatatttggtttcttgtcactcacagtactgatatgccttatataccttgtgaagaagacaccaagaagaacatatctatcgttgctttcttttggaaagcagttccctagggtttcttacaaggatctagcccaagctacagggaacttctcacagtcaaacttaattggaagaggaagctacggttcagtatatagagcgaagttaagtctggttaaaataaaagttgcaattaaagtttttgacctagagatgagatgcgcagacaaaaggttcgtatcagaatgtgagatcttaagaagcattcgacatcgcaaccttcttcctgtcctaactgcatgttcaacaatagactatagcggaaatgctttcaaagctctgatttatgattacatgcctaatgggaacttggacatgtggttgcataaaaaaaacaccagtgttgcttcaaaatgtttgagcttatctcaaagagtaaatatagctgttgacattgctaatgcattatcctatttacaccacgaatgtgaaaggtctattgtccattgtgatttgaagccaacgaatatccttcttgacaatgatatgaatgcatgtttgggagacttcggcatttcaagcctcattcttgaatctagattcacctcacttggacattacagtccaaatagctctattggattgaagggaaccatcgggtatatagctccagagtatgcgcaatgtggccatgcatcgacctgtggggatgtttatagttttggaatagtacttctagagatgctgataggtaaaagaccaacagaccctatgtttgagaacgagctcaacattgtcaactttgtggagaagaacttcccagagcagataccacagataattgatgctcgactccaagaagaatacaagggcttcaatcaagcagtgaccaagaaagaaaattgtttctatgtatgcttgttgtctgtagtgcaagtggctctttcctgcactcctctgatcccaaaagaacgaatgaacatgagagaaatagctatcaagttgcttgcaattagaacatcctatgctgaagcgaccaagcgggaggatttgctttgcaggaaagag

SEQ ID NO: 8490 - DNA, 297 bp, Oryza sativa
  Clone ID: PAT_MRT4530_14993C.1
tccatcgtttatgaggagattgtcaatactcaggtcctagcttacagtggacagcctgagaagaatttgatgaacttttggtcaatggtcgaaaatagcaccggagagttcttgttgttagatctgctgtatgacctgatagtcgtgcttgttacacaacctgctagggcctggacacaggacattctgacaccacactgtataccggacgcgatgcctgctgaccttattacctagtggtgacaagacgccgtcttcggctatttggaggccctgcttgcgccacattgctgattg

SEQ ID NO: 8491 - DNA, 140 bp, Oryza sativa
  Clone ID: PAT_MRT4530_14994C.1
tgttgggaaattaaactgggagggtatatttcacaaatagggaaagacgcatggacaccacacggctactatgctcgcttcccatgctagcgcaggggcccatcaccgggagcaaccgtatatccatatacaaaatataa

SEQ ID NO: 8492 - DNA, 312 bp, Oryza sativa
  Clone ID: PAT_MRT4530_14995C.1
atgacggtgaaggcccgcgtgacctcttcttgtgcagatgtggaagcatcccagctgacgagtaggacactgttgacgctgcgacttgccgacaggactaaacccgacgatgagccccacaatgccaatgaattgctactacctgacaaaatattgttggtggtcaccatcgtccacatcgttgcatcttctgttgcacacagttacataaatctggttattgaaatccacttcaatcaccaatgtgttcgtgagcttacaccaaggaatttcatgaactcagtaactaaaaggacgaaatgcatggtataa

SEQ ID NO: 8493 - DNA, 294 bp, Oryza sativa
  Clone ID: PAT_MRT4530_14996C.1
aaaggtagaaaaagtggggattaaaaggaaacaaaggggccattggtttttgcccccaaaaatttaaaaaaattccccccttttttttttttcaaagggtacaaaggggggttaaacaaccttttttaaaaaaccgttttcctttaaaaaattttttggacaaaaaacctcttccaaaaaagggggtgtttaaacccaaaagaaatagggggcccccggggtttttggttgtgcccaaaacctttgggggggtttggtgcccctcgaaacccccccttggggggcttttggggg

SEQ ID NO: 8494 - DNA, 458 bp, Oryza sativa
  Clone ID: PAT_MRT4530_14997C.1
agcaggcacgcgtgcaggagccggtatgcaatagagcggtcgacctacgcgttcggtggttacggacgctgtcgtggatgctggggctacagaggatgtgatggcggtggatacgggcgccgagagggaaactacataggcaaggcgagctacagtgagggtcacatcagcggcgaagaacactacagactgaatcgatggatagagtactgctggaattgcgagagcaactggacaaaatgactgctggagtccatgatggcaagatattcatacctataggtgacgaaaacaggtcatgatggagtccagcaattagttgctccagtggctctctagagtccagaagacctctatgcatggatgcaatggtaggcgttcttcgtccgtgaagtgaccatgaattgagctccgtctgcatatgaggcgtgaacacggttgccgtatctatcggaatg

SEQ ID NO: 8495 - DNA, 1834 bp, Oryza sativa
  Clone ID: PAT_MRT4530_14998C.1
cccccgggctgtcaggaattcggcacgaggagccgctcgcgcgcgctcactcgatcgaccagtcgcgcgcgcgacgagagggagagcgacgcggcgccgaaccggctagctctcgtaggcacaaaagcccaaacacgttgcttctgcagtagctagtgtgccgtgcccgtgatcggagatggcaggctcgttgtctgccgcgctgtgcctcactctcttctgcttgctgggggcatgcattgcgcccggggcgcgtgctaacggccggcacagccggcgggacctcgacatcaacctcggcaacggcaacggcgggggcatcagcatcggcataggaggaagtggtggtggtggtggtggtggctccagtggtggctccagcggcggcggcggcgatctgcggccgtgcgacttcgagaacgagcggctgtacaaggcgtacaaggtgatccagaagttcaggaggacggtgacgtgcgacccgcagaacatcatctcctcctggagcggcgccgacctgtgcagcacctacaaggggttcttctgcgagcggccgcccaacatcaccgaccggaccatcgcctccgtcgacttcaacggctacaacctgcaggcgtcgtcgctgaaggagttcgtggacgccctcccggacctggcgctgttccacgccaacagcaacaacttcggcggcgccgtgccggacctcagccggctgcagtacttctacgagctcgacctgagcaacaacaagctgtcgcccgccacgttcccgacggacgtgctcaagctgaagaacgccaccttcgtcgacatccgcttcaacagcttctacggcgagctccccggcggcgtcttctgctcgttcccgcaggtgcaggccatcttcgtcaacaacaaccagttctccggcagcctgcccgacaacatcggcgactcgccggtgaactacctctccctcgccaacaacaacttcacgggggagatccccaagtcgatcgcgcgcatggccaacacgctcttcgaggtgctgttcctcaacaacaagctcagcggctgcctcccctacgagctcggcctgctcgccaaggccaccgtcatcgacgccggcaccaaccagctcaccggcccgatcccggcgtcgttcgcgtgcctgcgcaaggtggagcagctcaacctggcggacaacctcctctacggcgaggtgcccaacgcgctgtgcgagctcgccttctcgtggtcgggccgcctcaggaacctcacgctctccaacaactacttcacgtcgctcggctcctgctgctgggacctgatcaaggaggggaagctcaacgtcgaccgcaactgcatcccgtacgcgcccaaccagcggtcgcacgacgagtgcgccgccttcttccaccggaccaagacctccgcgtgcccctgcaacacctacgtgccgtgtggccacaacaagcactccgccgccggcgccggcagcgagcaggacacggcggcggcggaggaggacaagtacaggacttactcggcgctgcatccatgagcgcgagaaggaagggcaaaagcactgtgcttctcgtgaacgtgacacgattattgattgattcggttgctcttggctggttgtgttaattgatgtgttgtgtctacttttttgttacttttgtttcctttctcatccactgttacgtacggccaacttagtttcacatatatctgcatgtttaggtaaggtaatggagattttattttgatgaaccacagaagcttgtaataattcagatcaccatgaaagatcagctttaaatttccctgcaaaaaaaaaaaaaaaaaa

SEQ ID NO: 8496 - DNA, 1704 bp, Oryza sativa
  Clone ID: PAT_MRT4530_14999C.1
ctagttcgacttaactagcagctctgagaccatgtcgagtgagcttctctcactgacatcgatcgtcgatacttcctccaggttttgcatagccgtcataccagcctgtgcttgcaaaccatctcccaggaggaacaccaatttctttagctcattcacggatacaggcaactgtttcacgcgggttctcctcacatctatggtctgcaactcatggagttctccaatgtcttcttggagctcggtgacaccggtccctctaaggcccaggtatctcagtagaaacaaactccggatcttttggacatgctcgtttcccaagctcttacaatcttccagatccaacaccctcaaaagcttgaatccaacgacgtcagagagaagcctcgaattcccgagaaaagcaagtgatctaattttccctttttgagcggaagcaagtgctctgtttatggattgtacatccatggtgcctgagcctgacggctgggtgctgtcttttgggatactgctgaagtcgttttttatggttagacgccgaatgacaccacgctgcatggatcctagctctgcatcagatgtgaccatattctctcgactggacaaggacacaatgaaatcatgaaccagaccatgaactttgcagcccactgcgaatccactaccatcttccagatcaatattgttgctagtcttgtcctcaataaactcccgcataatcaattgcctgatggtaagctcgttaaaataactctcccctgtttcccagatgctaccttcatctctttcatcaataaaaccttcagctgcccacctccgtatcaaccgacctttcgagatggtacaatttttgagacccccaagcataacgaccaaatcagtgtgatgcctgtaagataatctggatactttgtcgatttgcgccgttgttattattctgcttccatttttgttgtcagcgaaagcacatttgatagccttccatgccgttgtagtccaaatatcatcaattacaatgaagcacatataaccgcccctcaccccacccccacccaccccggcagaccaccagcagtccagcaccacccacggacccaccccacaaacccaaatcttcggtaagatttcattgttagaactcttatttctgaggaaattcctgaagttatcaatgacttggtgctcatcgccgcctgatttgatgtacagttcagtatggttgatctgacaggcaatacccctatccccgagaatgaaaagcaccttcagctgctggtcggaatccaccaccagcttatccatcaaattcaagacaaggtcccttctcagccggactttccgttcacagtgatggatcaagtcttcctccatcgcatagagcatgtgaggattatcaccgatgggtgattggctgctcagacgttcttccacgttgtctatccggacaatgaattcttctatccgttccagttgatctgctctaacgcgcccatggagatggatgcacagatcaatccaatcctccacgtcgtaggccacctccaggatttgccgcatccactccatggcttgggcgtcccccacatgatggatcaccttcaacaagcgatcagagttaattctgatgatcttcctctccaagggtctcacatcgatgtcctcgctcgacacagtggcgagcttccgtataagggagttcatcat

SEQ ID NO: 8497 - DNA, 2094 bp, Oryza sativa
  Clone ID: PAT_MRT4530_1499C.1
atggccctccgtaagccaaacccctcttcggcgaaagggccagatcccggccgagtcgacgacgacagcaccgcctttctggggatttctcttgtgcacgacgtcgagctggagaagctggtcagctccggagcgttggtcgaggggcaggctttcgccccagggaaaaccgtggtgccgaaacttgtcgacaatcggacggtggtgttcgccgtattttttgaggcagggctacggtttccctgcaacgtgttattgccggagatccttcgcctcttccaggtggaacttccgcagctgagcccgtcggcgcttgttcggatcgctatcttcgactgggcgtgccggacttccgggtttgagcccaacgccgagctctttggcgccatatttttcaccaccgtgaactcgaagacggtgatcaccccggctggaacgaaaaaaaccgtgttcgggagcgtgaacttcaacgtttgccccgagcggtctgatctctggccggtgaacgctgctatgtcgaagtgggtccgccattggatggcgaggtggttctaccacaccatccccttcgaggctggttctgaatcagcgaaagctctccagtgccggcgtagggcaattgcgccgaaccggagacccaagatcgctgtggacgacgccatggaggcgcggttcgttctactgcggaaggtttgctcccgccttagctgctgtgacttggtggaggaattttgcatgcttcacatttttcccctctcccagtcatggcaagtcacggttgaacaaggcgaagaagtcgacgtgttgaccctcgaccaggccgaagccgaagcccgcaggatgatcggcgatgtttcggtcgtcgagtatagtcagctgttaacgcgtcaagcggctgggcgggcgaaccgggtttacaatggcgaactgcctccccgggcgaatccccaaaaggccgacgacgaggcagggccttcgcgaaagcggatgtgtggacaagtgaagcttgcccccaagaagcgaagggttcctgcttcgtctgactctgacgccgacgacgaggatgatgccgaagaacgtgacggcgaggaggaaggagaggaagaggaggaggtggaggctgtggctgataaggccatgggtgaggtggtcgaagaccgcgccgacacccctgggtacactcctaccccaagtcctggtcacaacgaaaccagggtggagtcgaacagctccccccttcgtcggaaggatttggaaggggcgaaggccttagttgcgttctcttcgggagtggcggcgaagggaggccctgtcaaaaaggtggctaaaaagaaagggctcgttgatgtcgctcgcgtttttagcgacgacgagtcctccgacgggactccgacttcgcccgctggtcgcagccaggatctttcggccgcccccattcctccacttggcgccgctggagtggacggtagtaccgccgttggggcttcggcttctgcggaaagaattgcgatggccgcggcgaaagtattcggcagtcctccgcatcagccggtagcctcgccgctgatggaggcgaagggaaagggagcggtcgctgaaacgtccgcttcggaatattcgctctcggtaccccgcttcgcccctggcgacttcgcgacgcgagcggacctccttccttttgtggagggggtaagcaatcttgtactgcccgccagcgccccgagcttgttcaccgaactgaatgagttcgacgaggggtgctctgctataaaaagcctggctgttcggatcctcgcggctcagtgctcaacagagcaaaccgtgcgagctcgacttgatgggttcaaaagccgtcttcgggccaaggatgacgaactaggccgcaagaatttggagatggaggcccttgccaacacccttaaggaggcgaaggccgaaaacaagcggattcaatcggaactagagaaaggaaaggaagctagggccgaagtcgattgcttaaaggccgaactggagaaagagaaggcccacaccgccgtgctcatagatgtggcgaaccattgtatattcggcaaactgccgctaaacctttaa

SEQ ID NO: 8498 - DNA, 426 bp, Oryza sativa
  Clone ID: PAT_MRT4530_149C.1
atggcggcggtcggcacgggaggcgacgagaacggcgttccgacgacgcccgaccacggcagagccgcggccgaggggcggtgggatgcagcgaatgcggtggaggcggtggcacggcggaaaggggaaaacggagcggtggccgagctagcccgcgcggcggagaagctggcgatgttggcggcgcgaagcggcgacggctatggtggcggtggtgtgcggctggagttggcgatggtggaggaagagatggtgcgcgtggcggcggtgcttcggaggcggggaggggaaatggagcggatgccggggtgcggtaggacgatgcaaagctataggtggccgcggcgcagtgcgggggcgacggaagcggtgacggcgcgcggctggatggtcgccggcgtgcggcggcgcacgagagtggcgtag

SEQ ID NO: 8499 - DNA, 232 bp, Oryza sativa
  unsure (1)..(232): unsure at all n locations
  Clone ID: PAT_MRT4530_14C.1
aaatatatgggtcttggtggtacgtagcatgtgacagatgcaggaggnctgcaaggccatatggaaaaacatatcnctgtggaggtggagattgcccagcaactgtgccagcatcaccaaggttcaagcttggtcttatagctggngatgacacagctgntacanagtttgntctgnttggtcgtatggcatagaggntaataggcaaatcagtagagagtttcntggatca

SEQ ID NO: 8500 - DNA, 753 bp, Oryza sativa
  Clone ID: PAT_MRT4530_15000C.1
atggtggagcaacttcatcttcattgtcttctgcaccggcaaacccaattgcagctacttcgcaagcttttctacttcaccaaccacgacgtatacaagagcctcgacatctcggcatacgtcaccaaatatgatgccgtcacatctacttcatcggccctgacgtctccgccgttgctaagggatgactacgtcctcgccgccggcacctgcgaagggagttgctccgcggggaagcaccccatggccgtcgtctctggctccggctgccgtcgcgagttcttgcagtgcgtcgtccgggtgaacaacttcccgaccaagctccggccatgggacctctcctggctctgcaagccgtttgggccacttaggatgtaccatttggtgatgcgtaatacggcggcagccaacgcaccggcgacggcgacgaagctgacggaggcgaagacggcgccggcggtgctcttctcggccgcggcgggcacgagtgcgggcatgaactcgctgctggacagggccatcccggtgcctgcgtcggcggggctcggcgccgcggccgacgagtcaacgagcgacaaggccaaggacatcggcgggaccggcggcgcggccattgtcatcggcggcggtgggggccctggcgagcgggcgctggcccggctcccctccctcccttcgctggcgctggcaccgacctccacctccctccccgtgcgccgatgcagacgccgccgccgcatcctccgccgctag

SEQ ID NO: 8501 - DNA, 4059 bp, Oryza sativa
  Clone ID: PAT_MRT4530_15001C.1
atgagatggggaatgagcccagacagaaggttagcagcttttgcattctcaaagatcttcgcaagtgcatcacttactaaattgaatagcaggggagagagggggtcaccctatctaagccctctgaataaaagcagtctgagtatgagaaatctcattgttagctacaacagtggatgtggggcttgtgtaatccttatagccaagtataatccaaagacagatgaagtgactgaattcaatgtaaactcatgcctaacacttctttacagtatacatttctgttcaattattaccactgagggtctggggaataccaaagatggcttccattctatacagaaaagaatgtccgggtttcatgcctcccagtgtggtttttgcacccctggcatgtgcatgtctattttctcctctcttgtcaatgctgacaaatccaagaagcctgcaccaccaaaagggttctcaaagctatctatatcagaagcagaaaggtctttctcgggtaacatgtgtcgatgcaccggttaccgaccgattgttgatgcctgtaaaagttttgaatcggatgttgacctagaggatttgggccttaatatattctggaaaaagggtgacaaacacccagatcctaccaaattgccaagctacactcttggtggtgggatctgtaccttcccagacttccttaaatctgagatcaaatcttcgctagacttcaatgatgctagtatttcaggccccagggagggatggtattgtcccaaaagtatcaaacagtactataagttagtaaattctggcttatttagtgaaagctctgtgaaagtggtggttgggaacacaagtactggtgtttataaggatcaggacctttatgacaagtatattgacattgcaggcattccagaactttctgctattgtaaggaaagataagggcattgaaattggagcagctacgtcaatttccaggaccattgagatacttaaccaagaaagtgaattaacatcctctccaaatgggagtgtggttttcagaaaacttgctgagcacatgagcaaagtggcttcgccatttgttcgtaacacagcaagcattggaggaaacataattttggcacacaaatacccttttcgctcagacattgcaaccatacttcttggtgctgccgcaactgtcaatcttcaggtttcttcgaaaacactacatgttaatttggagcagttccttgagcaacctcctctggatcacagtactttacttctgagcatatttattccacattgggcttcagactgtaagaaagagcatactttggtatttgaaacttatagagcagctccacgtcctcttggcaatgctgtttcatatgttaattctgctttcctaggacatgtttccttggataaatcatcaggtgacaatatattgagtaacctgcacttggcttttggtgcctatggaactaaacatgctattagagcaaggaaggttgaggaatacctgacaggaaaaatactttctgcatctgttgtgcttgaagcaattcgattgctgagagaaacaattgtaccggtggaaggaacaactcatcctgaatacagagtcagtgtggctgttggatttctcttcagtttcttatctccactttgtaaaggtgtgatagagtctggaaaaactctcagtatttctgaagatttggtagatactgataatgtccataacaagccattgtcttcacgacgagaaacactttctgatgatgaatatacacctgttggagatccaatcaagaagtataaagttgaggttcaagcatccggggaggcaatatatgtagatgatattcctgctccaaagaattgcctatatggagaatttatttacagcacacaacctcttgctaatgtgaagagtattaaattcaaaccttctttggcatcgaagaagatcattacagttgtttctgccaaggatattccaactggagggcgaaatattggatcaacattctggtttggggatgaagaaccactatttggtgatccaattgctgagtttgctggacaagttctcggtgttgtgattgcagaaacacagccatatgctgacatggcagcaaaacaggcagttgttgaatataccacagatggtttaaaggcaccaatcttaacagtggaacaagctgtgcaaagcaatagctatttccaggttccccctgaaagggctcccaagcaagttggtgatttttccaacggaatggcagaagctgatcacaagatcatgtcggaagaatttgtaattggagtgaccaattttcctcaagctataagtaaggctcatctaaggcaacatagtataacatcttctcattactacttctacatggaaacacagacagcactagcaattccagatgaagataacaccatgacagtatacagttcatcacaattctctgaacttgcacagaatgtcatttccaagtgcctcggcattccattcaacaatgtacgtgtcattacaagaagggctggaggtggctttggtggaaagagaagggtatttttttacccagcctctacatccaaccagatatatacggccattgaaatagggaacttagcctcacaaacaacccaatctaaaattcgctccataggagatttgaactcaggaccttggggtactactcagattgcaacagcagctgcactctgtgcacacatgctacgtcgtccagtgcgcatgtatctcaatcgcaatactgacatgatcatggttgggggtcgccacccgatgaaagctcgttactccgttggtttcaagcctgatgggaaaattacagccttgcacctggatttactaataaatgctgggatatctgctgatgcaagccccataatccctggcactattatatcaggtctgaagaagtacaactggggtgctctttcatttgatgtcaagctctgcaaaacaaacaacacatccaaatcagtgatgcgagctcctggagaaacacaagggtctttgattgctgaagccatcattgaacatgtcgctgcagtactctcccttgacgccaacactgtcaggcagaagaatttccactcctatgatagccttgttttgttctacccggaaagcgcaggcgaatcgtctacgtacacattacattctatttttgacagattagcttcaacttctagctacctaaaacgtgctgaatccatcaagaagtttaacagttgcaataagtggcgaaagcggggcatttcttctgtgcccctcattctgaaggtaagagtgagaccagcacctggaagagtttctgtactcagtgatggctccattgttatcgaggttggtgggatcgaacttgggcaaggactttggacaaaagtacagcagatggcggtttatgctttgggacaattgtggcctaacgggtgtgaaggtcttcttgacagaatccgtgttcttcagtctgatacattgaacttaattcaaggtggcgttactgctggcagcactacatctgaatctagttgtgcagcaacccttcaggcgtgcaacatgctggttgagagattaaagccagtcttggataggctgcagttgcagtcaggcatagtatcatgggatacattgatttcgcaggcctctcaggaaaatgttaatttgtcagcaagtgcatactgggtgcctgaccaagactcgaagttttacttgaactatggagctggtacaagtgagattgaaggttcctttatacaaggaattggtttcttcatctatgaagaacaccaaacaaacagtgatggcttggttattagcaacagcacctgggactacaagatcccaagtgtggacaccatcccgaagcaattcaacttagaggtgctcaacactggataccatagaaccgtgtgctttcttcaaaagcttgatgtccctgctccaatgacgctggtgaaggaactgtgcggcttggatattgtggagaagtacttggaagatctatctagccatggagttggaaattgcaactag

SEQ ID NO: 8502 - DNA, 296 bp, Oryza sativa
  Clone ID: PAT_MRT4530_15002C.1
tttatcagggtgctagctaataagttatctggacgttgcatcggcttacaaagattacatccgattggtttctactggattatattgtataattatattgattatcatcagccgattgtctttatatcattatctacattggacatatagccgatagctcagaaccctatcactatcggctggatcaaactgactggcacgcccgcacctcatcaacctttggacctgcactggagctaagcagatctcccaggcctgtgtgtgttttttgcatcaacactatctccacttgtact

SEQ ID NO: 8503 - DNA, 4483 bp, Oryza sativa
  Clone ID: PAT_MRT4530_15003C.1
atgatgatgatgaagaagaaggtggtggcgccggtggagcgggtggtgttcgcgctgaacggtgagcgtcaggaggtggccgccgccgacgtggacccgtcgacgacgctgctggagttcatccgcaccaggacgccgttcaagggccccaagctcggctgcggagaaggtggatgtggggcttgtgtaatccttatagccaagtataatccaaagacagatgaagtgactgaattcaatgcaagctcatgcctaacacttctttacagtatacatttctgttcaattatcaccaccgagggtctggggaatactaaagatggcttccatgctattcagaaaagaatgtccgggtttcatgcctcccagtgtggtttttgcacccctggcatgtgcatgtctattttctcctctcttgtcaatgctgacaaatccaagaagcctgatccaccaaaaggattctcaaagctatctgtatcagaagcagaaaggtctttctcaggcaacatgtgtcgatgcactggttaccgaccaattgttgatgcctgcaaaagttttgcatcagatgttgacctagaggatttgggccttaatatattctggaaaaagggtgacaaacacccagatcctaccaaattgccaagctacactcttggtggtgggatctgtaccttcccagacttccttaaatctgagatcaaatcttcgatagacttcaatgatgctagtatttcaagccccagggagggatggtattgtcccaaaaatatcaaacagtactataagttagtaaattctggcttatttagtgaaagctctgtgaaagtggtggttgggaacacaagtactggtgtttataaggatcaggacctttatgacaagtatattgacattgcaggcattccagaactttctgctattgtaaggaaagataagggcattgaaattggagcagctacgtcaatttccaggaccattgagatacttaaccaagaaagtgaatcaacatcctctccaaatgggagtgtggttttcagaaaacttgctgagcacatgagcaaagtggcttcgccatttgttcgtaacacagcaagcattggaggaaacataattttggcacacaaatacccttttcgctcagacattgcaaccatacttcttggtgctgccgcaactgtcaatcttcaggtttcttcgaaaacactacatgttactttggagcagttccttgagcaacctcctctgggtcacaatactttacttctgagcatatttattccacattgggcttcagactgtaagaaagagcatactttggtatttgaaacttatagagcagctccacgtcctcttggcaatgctgtttcatatgttaattctgctttcctaggacatgtttccttggataaatcatcaggtgacaatatattgagtaacctgcacttggcttttggtgcctatggaactgaacatgctattagagcaaggaaggttgaggaatacctgacaggaaaaatactttctgcatctgttgtgcttgaagcaattcgattgctgagagaaacaattgtaccagtggaaggaacaactcatcctgaatacagagtcagtgtggctgttggatttctcttcagtttcttgtctccactttgtaaaggtgtgatagagcctggaaaaactctgagtatttctgaagatttggtacatactgataatgtccataacatgccattgtcttcacgacgagaaacactttctggtgatgaatataaacctgttggagatccaatcaagaagtataaagttgagcttcaagcatccggggaggcaatatatgtagatgatattcctgctccaaagaattgcctatatggagaatttatttacagcacacaacctcttgctaatgtgaagagtattaaattcaaaccttctttggcatcaaagaagatccttacagttgtttctgccaaggatattccaactggagggcgaaatattggatcaacattcttgtttggggatgaagaaccactatttggtgatccaattgctgaatttgctggacaagctctcggtgttgtgattgcagaaacacagcgatatgctgacatggcagcaaaacaagcagttgttgaatataccacagatggtttaaaggcaccaatcttaacagtggaacaagctgtgcaaaacaatagctatttccaggttccccctgaaagggctcccaagcaagttggtgatttttccaagggaatggcagaagctgatcacaagatcatgtcagaagaagtcaaacttgcttctcagtactacttctacatggaaacacagacagcactagcaattccagatgaagataacaccatgacagtatacagttcatcacaattccctgaacttgcacagaatgtcatttccaagtgcctcggcattccattcaacaatgtacgtgtcattacaagaagggctggaggtggctttggtggaaaggcagtcagatcactccatattgcaacagcagctgcactctgtgcacacacgctacgtcgtcccgtgcgcatgtatctcaatcgcaatactgacatgatcatggttgggggtcgccacccgatgaaagctcgttactccgttggtttcaagtctgatgggaaaattacagccttgcacctggatttactaataaatgctgggatatctgctgatgcaagccccgtaatccctggcactattatatcaggtctgaagaagtacaactggggtgctctttcatttgacgtcaagctctgcaaaacaaacaacacatccaaatcagtgatgcgagctcctggagatacacaagggtctttcattgctgaagccatcattgaacatgttgctgcaatactctcccttgatgccaacactgtcaggcaaaagaatttccacacctatgatagccttgttttgttctacccagacagcgcaggagaatcttctacatacacgcttcattccatttttgatagattagcttcgacttcaagatacctgcaacgtgttgaatccatcaagaagtttaacagtaccaataagtggcgaaagcggggcatttcttctgtgcccctcatttttaaggtagaaccgagaccggcaccaggaagagtttctgtgctcaatgatggctccattgttgttgaggttggaggagtcgaacttgggcaaggactgtggacgaaagtacagcagatgacagcttttgctttgggacagttgtggcctaaggggtgtgaaggtcttcttgacagaatccgtgttcttcaatctgatacattgaacttaattcaaggtggccttactgctggcagcactacgtctgaatctagttgtgcagcaacccttcaggcgtgcaacatgctgattgagagattaaagccggtcatggagaggctgcaattacagtcagacacagtctcatgggatacattgatttcccaggcctctcaggaaaatattaatttgtcagcgagcgcgtactgggtacctgagcaagactcgaacttttatttgaactatggagctggtacaagtgaggttgaggttgatcttcttactggagcaattaccataataaggagtgatcttatctacgactgtggcaaaagcttgaatcctgctgtagacttggggcagattgaaggttcatttatacaaggaattggtttcttcatctatgaagaacaccagacgaacagtgacggtctggttattagcaacagcacctgggactacaagattccaagcgtcgacaccatcccgaagcaattcaacgcagaggtgctgaacactggatatcataagcaccgtgtgctttcttcaaaagcttctggtgaacctgccgtggttcttggagcatctgtccattgtgcggtgagagaagcaatccgagcagcaaggatagagtttgcaggcaacaatggatctggaagttcattactcacatttcagcttgatgtccctgcaccaatgacggtggtgaaggaactgtgtggcttggatattgtggagaagtacttggaagatttatctaaccgtggagctgcaagtggcaactagagcattatctgcaattctgaaattcagtaactttcagttattgaaaggagtggtatgatctgatctttcggtggggcttgataaaacagtaaaattcaaatgtttgccatatattcagtgtttttcttcaaaacattttatgaataatgagttgtgcttattgaacctgaatggaggtgtgtacctgtggtgcaaaagacgttcaagtttatcgagaatttgatggaactgaaccaccaacttttttgtaacatgacaactattgatgatataaaagtttttccttgattgatagtttgatcaagcccaatatgtgccaaaactcatgaaatatgtacgctctccttccattcagaataatatgacagtactctttaacttccgc

SEQ ID NO: 8504 - DNA, 412 bp, Oryza sativa
  unsure (1)..(412): unsure at all n locations
  Clone ID: PAT_MRT4530_15004C.1
cggacgcgtgggtggagctggtacaagtgaggttgaggttgatcttcttactggagcaattaccataataaggagtgatcttatgtacgactgtggcaaaagcttgaatcctgctgtagacttggggcagattgaaggttcatttatacaaggaattggtttcttcatctatgaagaacaccagacgaacagtgacggtctggttattagcaacagcacctgggactacaagattccaagcgtcgacaccatcccgaagcaattcaacgcaaaggtgctgaacactggatatcataagcaccgtgtgctttcttcaaaagctnttggtgaacctgccggggttcttggagcatctgtccattgggcggtgagagaagcaatccgaagagcaaggatagagtttgcaagcaac

SEQ ID NO: 8505 - DNA, 3479 bp, Oryza sativa
  Clone ID: PAT_MRT4530_15005C.1
gtggatgtggggcttgtgtaatccttatagccaagtataatccaaagacagatgaagtgactgaattcaatgtaaactcatgcctaacacttctttacagtatacatttctgttcaattattaccactgagggtctggggaataccaaagatggcttccattctatacagaaaagaatgtccgggtttcatgcctcccagtgtggtttttgcacccctggcatgtgcatgtctattttctcctctcttgtcaatgctgacaaatccaagaagcctgcaccaccaaaagggttctcaaagctatctatatcagaagcagaaaggtctttctcgggtaacatgtgtcgatgcaccggttaccgaccgattgttgatgcctgtaaaagttttgaatcggatgttgacctagaggatttgggccttaatatattctggaaaaagggtgacaaacacccagatcctaccaaattgccaagctacactcttggtggtgggatctgtaccttcccagacttccttaaatctgagatcaaatcttcgctagacttcaatgatgctagtatttcaggccccagggagggatggtattgtcccaaaagtatcaaacagtactataagttagtaaattctggcttatttagtgaaagctctgtgaaagtggtggttgggaacacaagtactggtgtttataaggatcaggacctttatgacaagtatattgacattgcaggcattccagaactttctgctattgtaaggaaagataagggcattgaaattggagcagctacgtcaatttccaggaccattgagatacttaaccaagaaagtgaattaacatcctctccaaatgggagtgtggttttcagaaaacttgctgagcacatgagcaaagtggcttcgccatttgttcgtaacacagcaagcattggaggaaacataattttggcacacaaatacccttttcgctcagacattgcaaccatacttcttggtgctgccgcaactgtcaatcttcaggtttcttcgaaaacactacatgttaatttggagcagttccttgagcaacctcctctggatcacagtactttacttctgagcatatttattccacattgggcttcagactgtaagaaagagcatactttggtatttgaaacttatagagcagctccacgtcctcttggcaatgctgtttcatatgttaattctgctttcctaggacatgtttccttggataaatcatcaggtgacaatatattgagtaacctgcacttggcttttggtgcctatggaactaaacatgctattagagcaaggaaggttgaggaatacctgacaggaaaaatactttctgcatctgttgtgcttgaagcaattcgattgctgagagaaacaattgtaccggtggaaggaacaactcatcctgaatacagagtcagtgtggctgttggatttctcttcagtttcttatctccactttgtaaaggtgtgatagagtctggaaaaactctcagtatttctgaagatttggtagatactgataatgtccataacaagccattgtcttcacgacgagaaacactttctgatgatgaatatacacctgttggagatccaatcaagaagtataaagttgaggttcaagcatccggggaggcaatatatgtagatgatattcctgctccaaagaattgcctatatggagaatttatttacagcacacaacctcttgctaatgtgaagagtattaaattcaaaccttctttggcatcgaagaagatcattacagttgtttctgccaaggatattccaactggagggcgaaatattggatcaacattctggtttggggatgaagaaccactatttggtgatccaattgctgagtttgctggacaagttctcggtgttgtgattgcagaaacacagccatatgctgacatggcagcaaaacaggcagttgttgaatataccacagatggtttaaaggcaccaatcttaacagtggaacaagctgtgcaaagcaatagctatttccaggttccccctgaaagggctcccaagcaagttggtgatttttccaacggaatggcagaagctgatcacaagatcatgtcggaagaagtcaaactttcttctcagtactacttctacatggaaacacagacagcactagcaattccagatgaagataacaccatgacagtatacagttcatcacaattctctgaacttgcacagaatgtcatttccaagtgcctcggcattccattcaacaatgtacgtgtcattacaagaagggctggaggtggctttggtggaaagagaagggtatttttttacccagcctctacatccaaccagatatatacggccattgaaatagggaacttagcctcacaaacaacccaatctaaaattcgctccataggagatttgaactcaggaccttggggtactactcagattgcaacagcagctgcactctgtgcacacatgctacgtcgtccagtgcgcatgtatctcaatcgcaatactgacatgatcatggttgggggtcgccacccgatgaaagctcgttactccgttggtttcaagcctgatgggaaaattacagccttgcacctggatttactaataaatgctgggatatctgctgatgcaagccccataatccctggcactattatatcaggtctgaagaagtacaactggggtgctctttcatttgatgtcaagctctgcaaaacaaacaacacatccaaatcagtgatgcgagctcctggagaaacacaagggtctttgattgctgaagccatcattgaacatgtcgctgcagtactctcccttgacgccaacactgtcaggcagaagaatttccactcctatgatagccttgttttgttctacccggaaagcgcaggcgaatcgtctacgtacacattacattctatttttgacagattagcttcaacttctagctacctaaaacgtgctgaatccatcaagaagtttaacagttgcaataagtggcgaaagcggggcatttcttctgtgcccctcattctgaaggtaagagtgagaccagcacctggaagagtttctgtactcagtgatggctccattgttatcgaggttggtgggatcgaacttgggcaaggactttggacaaaagtacagcagatggcggtttatgctttgggacaattgtggcctaacgggtgtgaaggtcttcttgacagaatccgtgttcttcagtctgatacattgaacttaattcaaggtggcgttactgctggcagcactacatctgaatctagttgtgcagcaacccttcaggcgtgcaacatgctggttgagagattaaagccagtcttggataggctgcagttgcagtcaggcatagtatcatgggatacattgatttcgcaggtgattccagttttctataatgtcagtttatgcacagtaaagtag

SEQ ID NO: 8506 - DNA, 385 bp, Oryza sativa
  Clone ID: PAT_MRT4530_15006C.1
atggacgaagtcggggctagatggacatctctagggcaaatgaaggctacacgggctgcggctcggtagtcgagatgtcatggcacagggccggtgtcctgctgctaggggctcaatcttacctacctgtctcgggattccggccgtaggcgaggttgggtcggtgcttttgtcacggctaggatgggtaaaggggttatgtcacatcctttacgacgggttccacggccatggaatgcggagtaaagatgtgtcttgtgggttggcctgattggcttgggacgagctggggcccaggtcgggttgcaagttcggtctgaatcatcgtaggccttgggttaaggcaggttcgtgtgggaagacatggcaggaggattagatggta

SEQ ID NO: 8507 - DNA, 272 bp, Oryza sativa
  Clone ID: PAT_MRT4530_15008C.1
cgaactctacacaaactccttgccttctatttggtgtcattcccatagatagcagcaagctattcaaacactataaccaaagcgaactcaattcatgacaacatcacggactaagaacacctaacactcgatcgatggatatagctcttctcaactcgagagagccacttgacactataacaactccactcgatgataaaatgatcttcacacggatagctaatgataactggactccttacgccccaccatttagaacctccatattcccg

SEQ ID NO: 8508 - DNA, 1740 bp, Oryza sativa
  Clone ID: PAT_MRT4530_15009C.1
atggctcctcgcaagcccactaaagccgggtcaactggcgaagaccctagcggccttggcgaagggtggtcgtgtttccttggcaaatcgctcgtcaaggaggccgacttagccgagttggtatcctccgatgctcttgtggagggccaaggatcatgtgggggcgaagccgttgtcccttcgccctgtaatgggcgaacggttgtcttcgctgcctacttcgccgccgggcttcatctcccgtgtgacgatttcttgtcgtctgtgctcgcgacatacgaggttaggcttccccagcttagtccatcagcgttcctgaagctcgcggttttcgcttggatgtgtcgaacctgtgggtccgctcctaccgccgagctattcgccgttctatttatggcatgcgccacgaccaaggacgtgcagacgccgaccgggccgaggaaaactgtcttcggctgcgtgaacttcatgctgcgtctggagtgctcaaatgcttggccggtgcccgcgtcgatggccaacgccagaccgacgaccgaggtgaaccgagttcatgttggcgaattgccaagtcagtcgaacccctccagggccagggatgacgaagtcggcacttcgaagaaacgcaagcgtgcagtcgcgaaaggtggccaggttcgaactcgccgcggcgcgaagggtgcggttgaaagtgacggggaggaggaggaagaagaagatggggaggctggatctgaggatgatgggttccatggctacacccctagttcgactcctgtgaaatctggggcaggttctcatatttcacctacgcgcccgcaagatatcgttgtggcgaacaccctcctggcgatttctagtactgcggcgaaaccggggatgaccgccaggaggaagaaaaagaaagggaaggttgtgcaagtcgcccgcggcttttcgaacagcgaagggtccgacgggacgcctacttcgccgattctgcagcacggacctcctcgtggtaggcgcatgtccccgccacctgctagcgatgccgaagcggcgatgggtgggagtgcctcagcactagccgctaagggcctcgccgcacacttaaacgcgaagaaatctgccttacagaggctagacgggtaccgccttcgccttcgaaaaaccaaagaagatcttcgccacaaggaagacgaaaggcgcgtcgtggcggagactttaaagaaggcgaatgctgaaaacaagctgccgccacgaccttggttccggccacagtccgccaagcaggcctgttacactctccggctgccccttaatgaccttggggcgcgggcggaaggcgctctgggcgaaggcgggaccgtattcgacttctccgaatggacgcaggaagcagccggcttggtcgttgaagtggcgggtgcctacggggactgctgcgctcgtgtttcggcgggattcgtcctcagccttttgcacgcgcacggctgtgaccatatcgggaattttcccgacctcgtgaaagaagaatggctcagcaacacgcagtgttctggggcggcctttcgaaaagggttctgggaggatggcggtcgggactgtgcgaaaactcgactccgcgagaaccttgagaggatcgcgagagatgaggaagccgctgctggcaacaccgaagttgaccctgggccgtcggaacaggccgccgggtacgagggcaaaaacaacggaggccaagaccaccctgatgtgtga

SEQ ID NO: 8509 - DNA, 468 bp, Oryza sativa
  Clone ID: PAT_MRT4530_1500C.1
tttggttcgatctctggccggtgaacgctgccatgtcgaagtgggaccgccattggatggtgaggtggttctaccacatcagccagttgcatcgccgctgattgaggcgaagggaaagagagcggtcgctgagacgtccgcttcagaatattcgctctcggtaccccacttcgcccctggcgacttcgagacgcgagcggacctccttccttttgtggagggggtaagcaatcttgtactgcccgccagtgccccgagcttgttcaccgaactgaatgagttcgacgaggggtgctctggtataaaaagcctggctgctcgggtacgaacctgctttttttttccacttttttatcttttactcttcctctatcttgcttttacaattgacacttgttctctttcgcgctcgtattttgcgcccagatcctcgcggctcactgctcaacggagcgaaccgtgcgagct

SEQ ID NO: 8510 - DNA, 180 bp, Oryza sativa
  Clone ID: PAT_MRT4530_15010C.1
atacggccacacgttcgaagacttcctagatcaacgaatgcgagagcttgttgagctgcacaaatggccctctctttgatggggtcaagtgcaaccacggtatgtcctttgcaggggcttaagtcaactgcaggtatgcccgcgtcccgactgtccggaagatcaagctcatgcaacttt

SEQ ID NO: 8511 - DNA, 342 bp, Oryza sativa
  Clone ID: PAT_MRT4530_15011C.1
atggcgtcggcggccagagttgcggatgaaaaaggggatctcccgccgagccctctcttccttcctagtccctccaaatccaacacctcctccctcggatccacaggcggcagcactcgcgagcgatcggaggagagggcggcggcgagcttggggcgcgggcggcatgctcgggcgtgggcgatagcgctcgggtgcgggcgacgcaggagagcggcccgggcggcggcgctcggcgacagggaggcgcgaggcaccggatccggcgacggggaggtgcgaggcggcggatccggcgacggaaaggcgcgaggcggtggatccggcgacagggaggcgtga

SEQ ID NO: 8512 - DNA, 678 bp, Oryza sativa
  Clone ID: PAT_MRT4530_15012C.1
tccggcgaccgcacgccatcgcatcgctagccatgtacggcgggttcggcagaggggggcaagggtggagcccgttcgacgcgatccgcggcttcccgtcgacgcccgaggccctcatgtcccagatcgacgccgccatcgccgccaccgagtacgcccgctcctgcgcgcaactcgaccccgccaccgcctcctcggagccgcagcaggcggcaccgccgcccgggggcgaggcgcgtgtggaaggggaggcctccgccgccgccgcctgctacgacgcgaaggtcgcggacgaggcgtaccgcgcggcgtgcgcggcgctcggggccgggagggcggacgcggccgtgcggtcgctgcgggtggcgctggcgagctgcccgccggagaaggcggctgccgtggcgaaggtgcggtccatgctggccatcgcgtccgcgcagctgcacaagcagcagcatcaggcgcagcagcagctgcaacgcggcgtcaggaagtgagaagcatcaccggcgtcattgcaggattagccctttccgttcggattaaccttgattgagtttgtgattattaatcagctacatctagtggcgtttaattagtgttgaaaatttgttactagaagcaccatgatttgtggcatttatcatattcactatcacaagaaaaaaaaaaaaa

SEQ ID NO: 8513 - DNA, 254 bp, Oryza sativa
  Clone ID: PAT_MRT4530_15013C.1
atgaccgcgttgttgacttggatgattccctcctcaccatggatccccaaccacttgtgggagaaggccacaacggggaagcaaggcaaacaaattgagctgaagagccccattgatcattgcctaggcctcgaccttgacctcacccttgctggctcctcattctgccgcatccccttgcttactccctgctcctcaacggtgacaacaacaaaatcaaggatggggaggggaatggatgccaacgcctccat

SEQ ID NO: 8514 - DNA, 313 bp, Oryza sativa
  unsure (1)..(313): unsure at all n locations
  Clone ID: PAT_MRT4530_15015C.1
cgangaccatcgaacgacgaggtttcnccgccaacgacgtgccagcccntcggagagacnacccgccacangaaagggncacagtgtacnacacaggtctcannanggaaaagcgacaaacaaacccngcataatcgaaaagcaaangtttttcaaaaccaaacacacaaactganaganaaaancccacacggacagatcangnggaaagcaccagnaatcaagcantgccgggcaccangcaagaacccnganccnctcnagtacncgncacccaccnncgccncaactnttttttttttttcganccgac

SEQ ID NO: 8515 - DNA, 155 bp, Oryza sativa
  Clone ID: PAT_MRT4530_15017C.1
aacgagacatcttcgagccaatctactcgagtatcaacaatcgggggccacaaatccaaacacttggcccttactatcataagatcacaatgaacaggttttcaaattaatttaataaccggcgcacaatccaactcaactttgaaccattcatt

SEQ ID NO: 8516 - DNA, 488 bp, Oryza sativa
  Clone ID: PAT_MRT4530_15018C.1
cgtccaccggcgcctttgttaccgctttttgtgcgtcgcacgctgtcgaaagggagcgcgcatgcagcaagagcctccgccccggccaacgccgccgcgtgccttaggcgctcgccgaggggccgcctggacgaggagcgcgccgcggacgacggaggaggcgccgagacggagcccctggacggtggggcgcactacggtgagctggcggcgaacctgggcctgaggctgacgctggggtggctaccggtgactctggctgcggagggccgcgccttcatactacggtgccgatacagctgccgccgcgggagcggcataatggggctgtccggagccgatcgaacagaagtcccctactagtacaaaacgttcggggtggtggtgcaacggtatatcggcgagtggagagacatcgtgatcaccctcaagggcggaaccaaggtcgacctcaagagcgagcccaggttccgaggggccagcgacta

SEQ ID NO: 8517 - DNA, 4422 bp, Oryza sativa
  Clone ID: PAT_MRT4530_15019C.1
atgtcccggttgcagggaggtgaggaagaagtcgccgccacggacggcggcggccatgtcccggtcgcggggcggagggcgcgaagaagaggccgaggaatggcgcccggtgggttgcgcggaagcgggcgcggaaggccggcgacgcggcgccacgcgcggcaggcgagggcggcgcggacgagcaccgcaagagacgggaggcggaggaaggcgagcaggagatcctcgccgagcgagtggatggtggtggtggcggtgcgggtgctggccggtccctcctccccggattccaccttcggccgttggtcggacagcggccgtcggctaggccggccattgcgaggcggcggaggacttgtaagccatcctttggtaaaggctgacgaaccctccctgaagaacaatgaagacaagacgttgctggatgagctacaggggagggagccaagccagactcaaccgaggcagggaagatcaggcccagttcggtccaggaagaagaacctcaagtattgcagcccagaatgggacaacgagggagggcgcgtgcacgtgatcgacagattcggggagagttttagtggttcgatccaccagcgtgagagatacactggaagcatggcgcaatccaaccagttcgagttgttgatgaagacgatcgcggagaatgagaagaagagggaggcggcggatgagaggacaagggccgagtacttggagctgaagaagatcgtggaagccaagatcccggaggtggagaagaaagttgaggatcttaacacggcacttatctcgttgagtgacaaggttgagcacctagaggacacggtgatgcagcaggccaggggaggtgcctctcgcaagatcaagaatgagcaattcagcatcaaccgctcgacatcgacccaattcttgcaaggtaaacgcgatccccaatttaattctcttgatggttctcctggttccgcttcaccagagtttggggatgggtctggttggagtgaattgagtggggcggtgccacccatgactttccctcagttcaccggggagaatcctcaaatgtggaaggcaaactgtgaacaatattttgatgtctatggaattcatccccgcaattgggttaaagtagccactctgaatttttctaggaatgccgctttttggttacagtcaattcgccactctgttgggtattacttgggtggaattttaaatcttgaaccaatctactttgtgacaaaatttgttgagggccttaaggatgagatcagatcagccattttgcttcagagaccacaggacctggatacagcttgttctttggccctgttgcaagaggaggcacttgggggtactaagactggagggtacagaaagttgcagttgctgaagatgctaggaaagaagcataatctgttaaggctagagaggacagactgtctgctctcaggacacagtttcaagggtgatttcagattaattcccttgggcacctacgacatcattttaggcatggactggttagagcaatttagtccaatgcaaatcgattgggtccacaaatggttggaatttcagcacctgggcaaagaaattaggctgcagggcatagtgaacaaaaaggatcactgcagtcttattacatcaaatcaacttcagggaatggttaaacaaggttcagttctctgtatggttcaactacagaccatcgagcaagcaccagccaatattattctagaatcagtacaacctctattgcaggaattccaacatatcttcacagaacctactgctttacctccaaaaaggaattgtgaccatcatatcccactagtggaaggaactaaacctgttaacttgaggccttacaggtataagcctgcacttaaagatgaaattgagaatcaaatcacagaaatgctccaatctggtgttatccaacacagtcaaagtgaattctcttctccagctctcttagtcaagaagaaagatggtacttggagattgtgtattgattatagacaactcaacagtaataccattaaaagtaagtacccagtccctgccattgaggaacttttggatgaattatcaggctccaagtggttttctaagttggatctcagagctggctatcaccagatcaggttggctgagggagaagagtataaaactgcatttcagacacaccctggccctggccattatgaatacaaggtcatgccctttggattaactggagcaccagccacctttttgagtgcaatgaatgatattctatcttctgttttgaggaagtttgttatagtattttttaatgatatcctcatttatagcccagacctgcaaacccacttactgcatctaagggaagtatttcagttactagcacagaagcagtggaaggtgaaactaagcaagtgttcttttgctcaacaacaactatcttaccttggtgatattattggagctcatggagtctccactgatcctcagaaaattgcagatgttatcaactgggcagttcccaaaactctgaagaaattgagaggcttcttgggtttggcaggctattacagaaaatttgtcaaaaattttggtctcatcagtaagccattaactagtctactcaaaaagggaatctccttcacctggacacaggaagctgatgctgcttttaaccaactcaaacaagcattagtctctgccccagtattgcaattacctgatttctctaagccattcaccattgaaacatatgctagtgaatcaggaattggtgctgttttatctcaagaaggacatcctattgcatttctgagcaaggctttaggacccaggaccaagggcttatccacttatgaaaaagagtatctagctattctatgggctgttgaccattggagaccatacctccaacagggagaattcttaattctaacagatcatcacagcttgatgcatctcactgaccaaagattacatactagctggcaacaaaaagctttcactaaattgatgggcctgcagtataaagtcagatacagaaagggaatatccaatgctgcagctgatgcactttctagaaatgatactataccttcaagtgaagttccggctatctctgtctgtactcccctattgcttcaagaagtggtgcaaggttatgaacaggatacctacacttcccagatattggctgaattggtcgttcaccccactgctcgcaagcatttcagcttgtcccagggactattgagatacaagggaagaatttggattggaaacaatacacagttacaacatagaataattgatgaacttcactccagtcctatgggaggacactctgtatgtctccaagctaaacctgatcgtgctaagtatccaggtttgttacaaccctttccagtcccagagggtgcttggcaagttgtctcccttgattttattgaaggattgcctaaatctcatggattcaattgcattttggttgtggttgataagttttccaagtatgctcatttcattcccgtgtctcacccattcactgctgctagtgttgctcaagaattcatgacacatgtttacaagttacatgatttaccaaggattattatttcagaccgtgatagaatattcactagtcaactgtgggaattcttattcactaaatctggcaccaagctacacaagagttctgcttatcaccctcaaatcaatggtcaaaccgaacggctgcgcaaagcccagggttttcaaccagatgtgctctcacagttacctccttccctgaagcaccttcaagtccctgaaacatttctagatcatcgtatcgttcgcaaagctgttaatgccacatgggaagatatggaagatcttcaacaccgcttcccgaaggctctggcttggggtcaagccagctttcaatactgggggcttgtcagccatcatttggtaaaggctgatgaaccctctctgaagaacactgaagacaagacgttgccggatgagctacagggcagggagccaagccagactcaaccgaggcagggaagatcaggcccagttcggcctaggaagaagaacctaaagtattgcagcccagaatgggacaacgagggagggcgcgtgcatgtgatcgacaggcagaggcgtgcatctcacaggactgcgtcgtcggcggcgattgagaccgtggagatgcacagtgcagtgcagatatgcacttttctcgacaaagaatgtctgggtattgttggtgcatggacggatttcctgatccaggagttgcgatcgagcaggggtgaaagaggagctttcctcaacgtcgacgagcagtggtgtccacgaaggtgcctcgttgtcgttggtgcttctgatctcaccgtcgatgaagcaacaacagcatcttaa

SEQ ID NO: 8518 - DNA, 2241 bp, Oryza sativa
  Clone ID: PAT_MRT4530_1501C.1
atggcgaagccgtccttcttcgagctggatgccagggcgaactggacatggcgaagccgtccttcttcgctggatgccagggcgaactggctatggcgaagtcgtccttcttcggcaggtggaactcccacagttgagcccgtcggcgctggttctgatctcggtcttcgactgggcatgccggacttccgggttcgaacccagcgctaccctcttcggcgccatattctttgccgccgtgaactcgaagacgctggttactccggctggaacgaagaagacggaggaggggaagaagaggaggtggagatcgtggtcgagaaggccacgggcgaggcagtcgggggccgcgctgagactcccggctatacccccactccgagtcctggccataacgagaccggggtggagtcgaatagctccccccttcgccagaaagacttagagggggcgaaggccctggttgcattctcttcgggcacagcggcgaagggaggtcctgtaaaaaaggtggctaagaagaaaggactcatcgatgtcgctcgcgtttttagcgacgatgagtcctctgacgggactccgacttcgcccgctggccgcatcttggatctttcggccgcccctgttcctccactcggcgccgctagagcgggcggtagtaccgccgctgaggcttcggcctctgcagaaagaatcgtgacggccgcggcgaaagtattcggcagtcctccgcgtcagccggttgcatcgccgctgattgatgcgaagggaaagagagccgtcgttgagacgtccgcttcgaaatattcgctctcgttaccccgcttcgcccctggcgatttcgagacgcgggcggacccccttccttttgtggagggggtaagcaatcttgtactgcccgccagtgccccgagcttgttcaccgaactgaatgagttcgatgaggggtgctctgctataaaaagcctggctgttcggatcctcgcggctcactgttcgatggagcgaaccgtgcgagcccgccttgacgggttcaaaagccgtcttcgggtcaaggatgatgaattaggccgcaaaaatttggagatggaggcccttgccaacacccttaaggaggtgaaggtcgaaaacaagcggctccaatcggaactggagaaagggaaggaagctagggccgaagtcgatcgcttaaaggccgatctggagaaagagaaggcccactccgccatgctcatagattattacaacctcaccgagccaaagatggaggctcttcggcaggaggttcacaaggccgaagcaagcgctgcggaggagtcacggcggttttcgcgggagatggtgaaaaccaccgagtccgggcggacagcgtgccaaacgcttcgcctcacccttactaatatgggcgcgaaagtgcggggtgtcccctctgaaggtgcctcagccttcgacttctccgaatggacccgacaggctggtggttcgatttcggactgcgccaccgcatacggcgactgctgtgcgcgcgtgtcagcggcctttaccatgggcctcctgcagcagttcggctacgagcacatcgccgagttccccaagtacgcgaaggaggattgggaaatcagcgcgcaagacatttcgcccgcacttcgtgcgtggcgaaaacaattctggcagaaggacggccgctccaccgctaaggcgcgccttttggagcagctggcgaaagcagaggcggcggacctttgtgaagaggaaggcgcggcggccggagggggtggaggcgatgcccaggaccacccagagggggttcgccgaaagtcatgcattcggcctcctttcgggagctggcgaagtcaaaacgagaaatttgtggcgttgaagggtctgccaaaggtacgatgtacatttcgtcctatttatcgcgaaatggagataaacggtcgcagctataaggttttcaaggttgccgattggctgcgggtgcaccccgggcgaaccttagaagattacgatcttattcattcaagacatttggaggatatggctcgcttttggcgaaaccatcagaagactaaacgtcaggaaacgatctttcagcgtcgttatagtttagtctgtgtttcgccccctactcctcttaaggttgtgtacgatattagtagtgatgacgaacctagttcgcctgacccttccttagggagggatagtgattatgggggcgaagatgtaatttacttgtaa

SEQ ID NO: 8519 - DNA, 727 bp, Oryza sativa
  Clone ID: PAT_MRT4530_15020C.1
atggacctggaggcgctaccgggagacgtgctggaggaagtcctccgccgcctgccgccacgcagcctggcggcgtgccggtgcgtctgcagtgcgctgcgcgcgctcgtcgacgaccgccgcgtgctgcgcgcggacctcctccccctgaagctggccggcatcttcatcggcgtcatctgggtccctcagttcttcgcccgccccgtgctgccccacgcgctcgacctcacgcgcctacccgagacgatgttggattgccgcaacggcctcctcctcgcccacaacgtcgtcgtcaacccggccacggggcggtgggcgcgcctgcctcggagcccacctcccccgcccggctgctcgtgcaacgacgtgttcgattatctcgtctttgatcctaccgtgtcggcgcactacgaggtgtataagatcccatctcctttcggtgacggcatgagcgactggccgccgtcaccgtttatcatcgatgtcttctcatccaagacactacaatgggagaagaggtcgtatgtgcgagagggcgaagctgctgggaccgtcgccaatctgctcgcgcgggggtttaattcctcctccgccaccgcgctcacctcctcctccgctgccgccgcctcgcctcgcctcgagcaatgcgagctcccgccgccgctgccttgcctcctccgccgcaccccgctgccgctcgccgcctcatcccccgcctgccgcc

SEQ ID NO: 8520 - DNA, 1334 bp, Oryza sativa
  Clone ID: PAT_MRT4530_15021C.1
tcacgcttgacaccatggaccgaatcatgagacaatggcgatctctgctgctgctgctgctgctgctctgcgtcgtcggctcgagctcgctgctgctggtgagctcgcagacgtcgtcgtcgtcgtcggactcgtgcaccgccgcgctcgccgtcggcgacctcatccccttcaacaccaccggcctcaactgcttccaggcatggagctcgcaggacttcatcctcaggttcgggcaggacgcgtcggcggggagcaacgtgtggaacttcgtgctgtcggcgccggacgccggcgggtacatctccgtagggttctcgccgaacggggggatggtggggagcagcgccgtggccgggtgggtggcgtcgggcggcgtgggcacggcgaggcagtactacctcggcgggacgagctcccggtcgtgcccgccggggcaggggaagctgtcgctgtcgaccggcgccgccgcgccgaccatcgtgtcccagggctcgaggctctacctcgccttccagttctccggccagccgcgcacggacctcgtctacgccgtcggccccgccggcagcttgcccgggaccaatggcttcctcgcgcagcaccagtacatgacgagtggcaccatcaccctgcccaccggcaccagcggcggcggcggcggaggcagcacatctaccggcggcggcggcggcggtggtgacagcgacgacggcaacgagggtggcggcggcgaagggaagggcaagcacaagcactcaggaggagacggcgacggcgacgaggggaaaggcgggaggcgcacgtcaccgtcctcgtcgtccagcgcgacggcgagcggcgccgccggggggctcagctcgaagcgccgccacggcgtgctcgcggtggtcagctggggcgcgatgatccccgccggcgtggcgatggcgcggttcatgaagcggttcgagccgctctggttctacgcgcacgccggcgtccaggggctcgggttcgtggtcggcgcggtggccatcgtcgccgggttcaggctcgacggcgaggacgacgtcggcgcacacaaggcggtcggcgtcgccgtcctcgtctgcgcgtgcctgcaggtgatggccgtgctggcgaggccgatcaaggaggcgaaggcgcgcaagtactggaactggtaccaccactacgtcggccgcgccgccgtcgtcctcggcgtcggcaacgtcttctacgggatgtcgctggccaaggaaggggacgagtggagctacgtgtacggcatcttcgtcggcgtctgcgccgtcgcgtacctcgtcctcgaggagtggaggcgcaggcattga

SEQ ID NO: 8521 - DNA, 376 bp, Oryza sativa
  Clone ID: PAT_MRT4530_15022C.1
caatatcatttattttggttgggagctgatgcgacaaacaaatgttgaaaaactaggcccttttgctccattaaagatttctacataggccttccaacacagagaaaaagtatgatgaagaatagactaagaagctggcctaaagcatatgccaagctagtgtaaaacaccatccgttctggtgttttgtatggaactagactgctatggttaaaaaatgaagttacagacatgacaattcacagtgggcaccgatggtacggctcagcatgagtgtacagctgcgaaagtgatttaccagttcatgctcactaaggcactgcaatttgcgagaaaatagcatactggacaagcattttgtccaatgaagcctcat

SEQ ID NO: 8522 - DNA, 1440 bp, Oryza sativa
  Clone ID: PAT_MRT4530_15023C.1
cacgagggagagagagagaactagtctcgagtttttttttttttttttttttttttttagaatcctacatctcaaaaaaacaatatggtcatacattgtcatacataccctacaaacatttactagtgggctacatggtcatactacatagtacatatacgattgtcatttactggagggacacagacatagccatacattgatacacaagctactacaactaacagtgctacagataataaaggataagccagatcggccaagtctttcaaaagataatctagttctgatgctcaggtactacatcctagcactactaaacatggttaggcataatctcgaaggcttgtcatggctgctactgggcacgatatgcagccttcaggaagttgtcgaaggggctggcgggtgggagcttcactgccgagcaaggctccaaagtcgtccggatgctgctctcgaaaccgcatgaatttactttaggaatgatgaaatgctgcgcagatggaaggcttggagcaggattgtctggcgtagagtcatggccattgacaagccagcttgagagcttcttcctagtgcctgatcccaaggcttcgcattgactggtcattgtgccgtatgggagcggggaggtcgaaacagatgctcccgcaacttggccggctacatgtaacgccgattcaagcaactggccaacacctaagacacgaggaacagattgtggcatcgtagtctttgatatcgagctaccggtgtttgtaattggtgactcatgcaacccaccatctactgaagaggttcttgaacactcctcatcaaaagaaagggattcatcagaaaatgcctgaacatgaaaattggcccagtcaaatgctgaatttgacccaaacaagggcacctcttcaggtgtaaacatttctgtgagctccttcaccagtacatccttgtccatctcagttaaattacacagtgcacaagcaactacatcaagtactcgctgatcattaatccccacttttgtcctgcagtcagaaagtacagatctagcgatttcttgatcgctatcagaaccatagttacctagatcagattgcaaccttacatagagttgcaagtcttcaccaattcttagataaggatccatattgcaagatgtaaagcacctcagcacatcaaccaattcagtaatgtgacagactttcccagcaaaagctagcatgcttgttgccaaaggtaaaaatagaccgctggcaagaaggggaaaggactccatttgaggttaaggaaacactacgaagggacagcggcaactgaaaaaactgaatgttattactgttccttgaatccttaaggcgagaagaaataaccgtgaggctgtacgagtgaccaatcgcctcataattaaaaggagtgttatctgtctgatttgcctgtacc

SEQ ID NO: 8523 - DNA, 2997 bp, Oryza sativa
  Clone ID: PAT_MRT4530_15024C.1
ctactgggcacgatatgcagccttcaggaagttgtcgaaggggctggcgggtgggagcttcactgccgagcaaggctccaaagtcgtccggatgctgctctcgaaaccgcatgaatttacctggatgaatgtcgattgcgatcgtgagggccagatgatacacacagatgcagaataggcaacattccagaatgacatgggagaaagacaggacaaatcatgtactttaggaatgatgaaatgctgcgcagatggaaggcttggagcaggattgtctggcgtagagtcatggccattgacaagccagcttgagagcttcttcctagtgcctgatcccaaggcttcgcattgactggtcattgtgccgtatgggagcggggaggtcgaaacagatgctcccgcaacttggccggctacatgtaacgccgattcaagcaactggccaacacctaagacacgaggaacagattgtggcatcgtagtctttgatatcgagctaccggtgtttgtaattggtgactcatgcaacccaccatctactgaagaggttcttgaacactcctcatcaaaagaaagggattcatcagaaaatgcctgaacatgaaaattggcccagtcaaatgctgaatttgacccaaacaagggcacctcttcaggtgtaaacatttctgtgagctccttcaccagtacatccttgtccatctcagttaaattacacagtgcacaagcaactacatcaagtactcgctgatcattaatccccacttttgtcctgcagtcagaaagtacagatctagcgatttcttgatcgctatcagaaccatagttacctagatcagattgcaaccttacatagagttgcaagtcttcaccaattcttagataaggatccatattgcaagatgtaaagcacctcagcacatcaaacaattcagtaatgtgacagactttcccagcaaaagctagcatgcttgttgccaaggtaaaaatagaccgctggcaagaaggggaaaggactccatttgaggttaaggaaacactacgaagggacagcggcaactgaaaaaactgaatgttattactgttccttgaatccttaaggcgagaagaaataaccgtgaggctgtacgagtgaccaatcgcctcataattaaaaggagtgttatctgtctgaattgcctgtacccaaaacgcggagagcaattgatttttttgatcttcagttagcatgacaatattagcctcctctgcagaactagttagtgctgcatatcgatcagtgaaagagaaaaccagctttgaaaaataagccgagtttttacgtgcccaaacatgtttattttcctcttcacttatgcttttttccttctcatcatccatgtttcctgtcttatcagaacctaaactttctttttctctccttaacttctcaagtagagcagtagctgaagcaaatactgatgtagtccgagactgccatttttttgtttcatatagaaagtctgattcactcctctgacggcttggtccttgaacaataacagcagaaaacatgtggtgtgcccccacacgagtgtcaacatctggatgtaccatggacttcagtatctgctggaggagtgcttctggaaacagcataggagcgtttaaagacattgatgtcaaggagattatgtgcgaaaggatcagcaaacttccaatcgatgctctggcaaccacaggcatagaaggcaaattctccagtgtaattgccatcatgtcatagagcggccgcacatcattaattcctgtgacaacttctagaagacagtcctgcaagaaattttgaagtgattcattcaagttcagctcttcaatactggctgactccatggcctctagtgttttcctcaagtgtctgcacaagtcacctgctactacaagctcagcagcaattcctcgtgatcgtagctgccgtgccaataaagtagctgtctggatcatatcagatttaatctgaggatcatacaaaacatttttgtggtcgaggtgccggatgacagaagttaaaatcaattgttcgttgcctgaacttttttcaagataagacatatcagacaaaacaagcaaagctaatccctgtcgaggagcccattgcttctttttatcgaagtaagaaagcattggatctaggatgcgtcgcattgttgtactctctttggccagctcagcaagcttctgaacacaaatgtgtgcccatacttctggagattcacgctcctccctggtcagggctgaagaatccctagctgatcgcagtctaatagctgtactgttgcaatttacatcattaccaccacctaagccagctctcccctcacgtcttactatttcatcaacccaattatgctgcggtgcatgtctttcttcgtcaccagcagcagattcttccactctataattctccaagactgactgcacaatctcatcaaaatccacaaatatgtacgaatgctccttcatgaaccagatcattgctgataagcactgaaggcttgctgcccggagaagactgtgctccactccctgttgccgtgagagcacacatactttgcgaaccaagctttcaatattccgtgcatacgtgttatccacctggctataaataaacttcgccaaagtttggcatccaagaatatgaatgttctcttgcttgctttccaggagctcagtaagaacattcaccaggctaatggcaaaatatgccatttgctccttgcaaatgaagagtagcttgctgtatgcctcagtgataattttgataaagttcacatgagcagaacgtagctccttgtgactcctctgttccagaaacttggcaataggcgtcttggggaatatctcggcaagcagtttcttgtaacgcttgacagggcgccgcgagcttgggcgcagagctggacagcacacgcacatactctcacacgaaggaaagagcttcgctgacatgaaacccat

SEQ ID NO: 8524 - DNA, 352 bp, Oryza sativa
  Clone ID: PAT_MRT4530_15025C.1
tgctactcggcaacggcggtggcctcccttcaccaacctcccatgcgcggcgctcccttcctcgacggcagcgggcacagcgacgacgacggcgggcacggtgacgacgacggcggatctggacggcgggcgcgcagcggtcacggtgacggcggcggcggcgacggatctggatggcagcggcgccctttgctctcctctccaccgagcgtcgtcgccaacactagatccgcctgcagcttctccgctcctacacccaccaccgccgtattttccctcatctggccatccactccgctgatgtcgagcgcgcggtgttataagatcgttgcctagcttgtgaagaggggat

SEQ ID NO: 8525 - DNA, 495 bp, Oryza sativa
  Clone ID: PAT_MRT4530_15026C.1
cttcgatgctgccattctatcaatatgtaagagcagcgcacaaattttttcagcagatgagctaaaggacagaaccattttaactcatataaaaatactatacaggttaattgcactgtttataactataagcttcggttactgcttgctctcagctctgccttcagtgtcattgaggagtcagaaatgaacttgctgaaagtgaaattcttgagccaagattatgatagtgaccacaaaaatgttcagaaagattaccccagcactccataagaccacagctatatatctgtgcacatcttttcagctgcagtttgttcatttcagatcaatgaaaaaacactgcttattctgtagaatggagagaccttcagtagagaaatggaaaaggctcagagttctcaaccatgggatcattacctcctgcatgatttgctgccaaattctcctccttctaaagcccgatttatatattgacggagcttgatgccctga

SEQ ID NO: 8526 - DNA, 302 bp, Oryza sativa
  Clone ID: PAT_MRT4530_15027C.1
tttttggtatccaatacacggcgttatgggaaaagcctaatacctgaccagcatgcttcggagaaattaagagggcaaagcagaggacgaagacgacgtcgaaaggaacaacatcgagtcacgctctgggtcgagctacgggcgatcgaaccacaagtagcgtaccatggcctgccgcggatgacagactgctgctgaatgcgcaaaggcttgcagggcccgctggccgccaggagcagctcgacgccgtaaacatggccgtcgtagtcgtgcctgaagcccattccgcaagggcacatgct

SEQ ID NO: 8527 - DNA, 472 bp, Oryza sativa
  Clone ID: PAT_MRT4530_15028C.1
atggaggaggaggaagtgccggccatcgtcgttgtcatcgctcgcttgtcgtggacggcggcaacagtgggcttgacagcgatggtggtcgtggcagcggcggtcgtaggtgcgacgacgaggcgtggcgcggcgggtgacgggggcccaccagccaatgggctgggcgcccccgatcaggacgcggtcattcagagccacaggcaaatcttcccaaaatataagaccatgaaacgtcaggacaacaacaatgacggactcgagggcagctcggtcagcctcggcttcctcaatgacaacgtgtcacaacatcagcggccacttgtttacaacggcaacacgacgagcttgaacttggcatccacgatgatccttgctttcatcaagtgtggcgccgcatggttgtaccaaactagtatcgattctggcagtgagattcgtggatgcaggggcggatgcaacgtggatcacg

SEQ ID NO: 8528 - DNA, 669 bp, Oryza sativa
  Clone ID: PAT_MRT4530_15029C.1
ggcaaggtagctgggcaggacaggcatcggttccatgctctagtttcaaggaagacatcgttccaagtgcacggtggctgcttttgctgcgataatcccataacatacatcaacggagctgaccgatgtaagaagccaacattaaacactgctagttaccagcagagccaccctgaaaagctgaaagcaagaaaaaatctgagagaagagcaagctgacatacatcatggagatgatcctggatgcccttgcatcctacctcggcgagcagttcgccaagatggtgaaagacgaggcaaggatgctgcttggcgcttctggcgaggtcgagaagctgacaggcatgctgagcaggctcaagaagttcctggccaacgcggagaggcggcacatcaccgatgccaaggaaggagaatatgtgcatgagtgggtgaggaagctcgaaggatgccatgtacgacgccaccgacatcgtcgatgacgttcatctcaagtcggagcagcggcgcgagcggtatgcgtctccgtatccaggcagctgctccaactcctccttgctctggtgcttgcaggatcccctcttcgcccacaggatcggaagccgagtgaaggagctcaatgagaggatggatggcctcttcaagcaggctgaagctgaccagcaggctg

SEQ ID NO: 8529 - DNA, 1991 bp, Oryza sativa
  Clone ID: PAT_MRT4530_1502C.1
atgagcctcgccgccgagtcgccgtcgccgtcctccccgtcgtcgtcgagcggcagcgacgacttcgcggcgctcctcgacgcggagctcgagctgacctccgccgccgactcggcctccgccggagacccctccgccgccaccgacgacgacgacgaaggtggtgacgaggaggaggaggatgtggtggtggtcgtggaacaagaggacgccatcgtagagcagagcaggggttggagatggcttcttatcttctgtgcggtccgtgcctttgacattcgttgggtaaacattgacagtcttgggggtgcattgatggagtcccagttgccttctgtcaagacttcctttatttccatgagcagatggtacactgttgcaggttcttctaaagatgttaaaattgatgaatgcccaccacatcctgggttttttggtggactttgctatagatgtgggaaaagacaagatgaggaagatgttccaggagttgcttttggttacatccataagggtttgaggctaggtacaacagaaattgacagactgcgtggagctgatttaaagaatttattgcgagaaagaaaactagtactcattttggacttggatcatacactgatcaactcaaccaaactctttgatctttctgctgctgaaaacgaattgggaattcaatctgctgctaaagaagttgttccggacagaagcttgttcacattggagacaatgcagatgcttacaaagttgagaccatttgtccgtagatttttaaaagaagcaagtgatatgtttgagatgtatatatacactatgggtgacaaggcttatgcaattgaaatagcaaaacttcttgaccctgataatgtatattttggctcaaaggtgatttcgaactctgattgcactcagcgacaccagaaaggtcttgatgtggttcttggagatgaaagtgttgcagtgattcttgatgacactgagtatgtgtggcagaaacataaagaaaatctgattctaatggagagatatcattattttgcttctagttgtcgccaatttggttttggtgccagatctttgtcagagacaatgcaggacgaaagggagaatgatggtgctttagctacaattttagatgtcttggagcgcatacacacaattttctttgatccggtgatcaagagggtacggcaggaagtacttcaaggctgcaaactagtgtttacgcgtgtattcccgttacatcagcgccaacaagatcagatgatctggaagatggccgagcagttgggtgccgtttgctgcacagatgtggattctacggtcacccatgttgttgctttggatctaggaacggagaaggctcgctgggctgttagtaacaagaagtttttggtccacccccgctggattgaggccgcaaatttccgatggcaacggcaacaagaggaggattttcctgtagctcgaccaaaggagaagggtaaagaaaatgccgctgatgctcctatctcaaaggagaacggtgacaaaaatgccgctgatgctgctaacgcaaagaagggtaacgaaaatgtcgctgatgctggtagcacaaaggaggggagtaaagaaaatgctgatgatgctgctaactcagaggaggagtaaatcggatggtgctgccagcggtgcaactggctcgtaaccagcttataccttttgtaaaccgttgcggacattgctgtagctgcgaacctacattaggatacgtactcttgcgaaatagaaattgtggctagtttgaatcggactgtgcggatgatggtgttatggtacatgtgagatttttcctactgatctgggcctacagccatatactttagttgacagtttctgttttgaagatctgtgctagtaacatgggtacccatacaccagtgatctcctttcagtaggtgttgatttctctaaacaccacaattatacatttactcaatgattgggagacc

SEQ ID NO: 8530 - DNA, 228 bp, Oryza sativa
  Clone ID: PAT_MRT4530_15030C.1
cggacgcgtgggcggaggaggaggtggaggtggtggtggtggtgaaggaggcggtggtggttacggtggatcgggctatggttctggttctgggtatggtgagggaggtggtagtggaggtgctgccgcaggcgagtatggccgtgatgaaggcgacggccacgctggtgctgagggtggtgcctcacactctggctatggctctgcgcaaggctctggctatggtgc

SEQ ID NO: 8531 - DNA, 319 bp, Oryza sativa
  Clone ID: PAT_MRT4530_15031C.1
gtcaagaattaccactgtctgctgggaggtacctttgattattgatcacagaaatggaggcccattctgttatgcttgtgatacatcaatcatgtttgcatgtgtggggagagacatgtaacatgactgacaatgatctcaggacagcatatatatctttccagcttaattttgtttttagttcttgacttagatcggtataaaccccctaaaactcaattgcacgtgaaaataacaaactctcactcgatcgctgacattttgagctgatggtcggtacatgtgactcaatatgtataggttttcgtcgcggcggtaa

SEQ ID NO: 8532 - DNA, 447 bp, Oryza sativa
  Clone ID: PAT_MRT4530_15032C.1
caggaacaaaatccacaatcttatttctgtcaaaaaacgagggattaaacttacattcataccttttgtataggccaccgatacaccctagatacagcttacaatgctcattgaaccctatatgcagtaacagtgtttctacgcgctacaaaactcttcgtaaactggtgaatactcaccttgatgagcccacagcccagtaaacaaagaagcagatcacctagtgtgaaaaggtaatctatgtatgtatacgtcaaatcatgaaaacaggaaatcttctatttcctctgtaacatcctaccgtatgcctttctcacctgtgcaaggggaacttctcaacacaaaagggagtggattcggtatcagcattagtacggcgagtaagagatggaggggacgggctgactgtcaggaggacaaccctcgtgcgatctatgaaggagcaat

SEQ ID NO: 8533 - DNA, 153 bp, Oryza sativa
  Clone ID: PAT_MRT4530_15033C.1
atgggtttatacagacttctgggttcccatttgcaccgggaaaagggaaccctgcttgaccagagtggaccaaccgactccgtccgggatgagagactaaaagactctcatcgtcacgacgtgatggggcatggcaggctgcacgccgcctga

SEQ ID NO: 8534 - DNA, 255 bp, Oryza sativa
  Clone ID: PAT_MRT4530_15034C.1
atggcatgcagaacaagccaaagaactgaaaaatttccgtctgaaattctgaaccttgaaattgtgtttgtttggaagcacctcaacgtggccattccttcatcacaagagagatcatgcaagaatgtctgcagactctgtccatggctccatgttgctgtctgggccttgaagcatgaagagggaacagccaccatcaatggcctcccgacagtcagcatcctgccctggccccgggtcgccccccccatttaa

SEQ ID NO: 8535 - DNA, 132 bp, Oryza sativa
  Clone ID: PAT_MRT4530_15035C.1
atgggggttcggccgaacccaggggccaaaaggagggagcagatcgcgtggcgggaccaatggtcaacggtaggatggtgcgagacggggctcgcctcctacttcatcgatgacgatgacaagatgccatga

SEQ ID NO: 8536 - DNA, 879 bp, Oryza sativa
  Clone ID: PAT_MRT4530_15036C.1
atggggaagtcatggaagaacaagctacctgatgcactttgggcatataggactgcttataagacgcccatcggcatgtcaccataccaacttgtctacaggaagacttgtcaccttccggtagagttagaacacatggcacactgggctatccagacttggaacatggatctaaaggaagccagacagcacaggaagatgcagctctttgagctagaggaatggagggacaaggcctaccacaatgccaagatttataaggacagaaccaaaaaatggcatgagaagcggattaagcccaaggagttcaaagcaggggacaaggtcttgcagttcaactcacgagtaaagcttttcggacatggaaaacttcgaaccggaaccacgctggcagaccagcaggggtcggtgctagaagcaatagataggaaattacctttacttagcaaagccctctacactcttcagatctggcaggaggccctctacggcatgatttcacaaccagatcgtcagatcaatactacaccagccacgcgggcggcgggatcggatggccccgatctaccgcctggtagatcggacggcggatgcagctcgcggccggcgcgcacgggcacggctcaagccggcccggcggccatggcgcgcggcggcgaacggccggcggcggaggacggcggtgtcgtggcgacgcgggcggcgatagcgacggctaagcggctaggcggtggcgcggcggctaagcggcacgggagagagggagaaaggggaggaggggcctcaccgacgacgatcgacgatggcgagcgatggagggcgatggcgacggcgagacgagctccgggaccacctaagggatcaaaagggatgagttag

SEQ ID NO: 8537 - DNA, 418 bp, Oryza sativa
  Clone ID: PAT_MRT4530_15037C.1
tcgttctccgactcccctgccctaccctacccacgcccaccgatctgatccacctcgcccctcccctcctctccttgcccgcctcggcctccgggctccggcgatggcggcggggaacggccggatggaggcggcgctgggctgcctcgcggcgctccccgacgaggtgctctgcgccgtcgtggacctcctcccgcccaccgacgtgagccgcctcgcctgcgtcagcagtgtcatgtacatactttgcaatgaggagcctctctggatgagcaagtgtctttcagatgggggtcttcttgtgtatagaggttcttggaagaaaacagcattgactagacttagtctttgttcagaaaatgatgagatttaccagaagcctcgccattttgatggggtcaattccatgcacttatac

SEQ ID NO: 8538 - DNA, 448 bp, Oryza sativa
  Clone ID: PAT_MRT4530_15038C.1
cctgcaggtcgactctagaggatcgcgtcaggggtaaagtcgccactctccgctgctttcacccacacgcttcattataaattagaggcagggagccggacaaaatccaaaagaaaatttctgcccggtactccaccatttgggcaaagtaaacgctcaacagcacccgcagtttgtggggaaaatgacccataaagttttagtcaaattacaactcacccgctatccccagccaaggtttggggggagtattcactttaacctgcttcttcttcgacgggaaagggtaacaccggcaggcgatcgcctcggaacacttcttcggaaagtttacctagggcttcactgcgttgaccaaggcaacgggctaaacccagggcggaaagcacgggcagggtagtggcgcttaaaactaatttggttaagggatccccgggtaccgagctcg

SEQ ID NO: 8539 - DNA, 416 bp, Oryza sativa
  Clone ID: PAT_MRT4530_15039C.1
ggttttgttttttgagaggaaagaaaggctaaagctggtacaaagccaggaagaaccagacctggattactatgtacttaaattaaacaacaagctaaataaatatttaacagaaagaaagataggaaataatggtaacactaagaagaaatagaaaggagaaggaaaaacaaaaggaggagcccccgtcgctcgctgcagccgcgggtgggccataggcccgtgggccctcaggagagcgcgtgggcccacccgggggagcccacccgtttccctgcagatgcgggccgtggaagcgagcgaagtagcagcgagaccatccgctgactccgttgactccgacgccgtcgagggtttcgccgttagttagagacggcggcggccaccggttcacggcttggagacggaggcggcgt

SEQ ID NO: 8540 - DNA, 731 bp, Oryza sativa
  Clone ID: PAT_MRT4530_1503C.1
tacacgtcgaatggtccgctaatattggttcctcacccttgcacacatgcagcctccttttgcagtttagttttcctgtgggaaatttggatttgttttgttttggaatggtccgccaaaattggtttagttttgctataggaaattcggatttgtttgttttggaatggtccgccaaaatgtggagtccggataagtttcacgtgagttatccggttcggttacgcggagaagagatcgtgcaagcatcctgattaagcgttctgatatctatatataagttgagccgccgcctccacgcaacacacgaaatcaatctagggtttgcctcctcctctgtattgcgccgttgctcgtagtgtactccatcccgctcgtcgatgtgcaccggcaatcgggagagcaggtctctaaaacctctgctttcgacgtcctgcaccgggagaaggtggcaataaggtttttgggaagcgcttcgcgcgactgctccctgttcgaacacaacggctcgtcttcatgttcgttcgcgtactgtgcgccgtcatcaacgtccgcaactgcgagtaattcctgctgagtaactggtcttccggtaccctcggtacgtcctaactatattgcacgtgccagtatattattgttgcccgagaatgagacagtgcccgggttgcacaggatcggtccatgatgggcggtggctgttgtgaattactctctcctatacaaaatat

SEQ ID NO: 8541 - DNA, 537 bp, Oryza sativa
  Clone ID: PAT_MRT4530_15040C.1
atgtggtcgcacttgtcttatgttcagatgaaattccaagggaaacggtccttaagtgcaagaacgagaaaccgtactcccgggcagaggggagcggcggaccggggccagcttgacccggtcgcggccgaggtggcgccgacgtggcgccttcgtggcagctacgtgggccggcgtgaggaagacgacgacgtcggctggaacggacggcggacggcggcggcgagcggcggggcgatctacagcgatgcaagcaagggcgagcgcaccgggaggttgcacgggacgaggggagacgagccaacagctcggattcgccgggggatgctcgacggcggcggattgcggcggcggcatccggcggcgagaaaagggggaaacggtgacgtcgcgacgggagttcgattcctccggaccagagcatctacgcggccaccggagtccgtttctagcgtcggattgggcggagctacgccgagcgaggccggcgacgagaggcgctaccgagctcgggcggcgacgtcggcgagcacatag

SEQ ID NO: 8542 - DNA, 459 bp, Oryza sativa
  unsure (1)..(459): unsure at all n locations
  Clone ID: PAT_MRT4530_15041C.1
gagcaggtaaacagttgaacatggcaactttaggtttctttctttacacagtaatccccttttcttatagggtaatactactacatgtcagngggctataacatgcctgattctaatctagtttccctttcttttatgtcctctataagaaacaaagatagtccagaaaggaatcggcaatgagcacaagaaccgaccaaccgactgaaagtgagtgagcgaatgagtgatacctaaggaacaccactgctggtgcttctcttcaccttgaaatacacagggtctcgcagcaccttcacggttacattgctccacacgtctgtgctggtcgacagcagtgccatttcctcagcaatcgccatgtcctcgggcacaacagacccaaacacagtgtaggctcctttccactccccatggtttgctaagctgatcaagaactccggccctgatccaacccat

SEQ ID NO: 8543 - DNA, 364 bp, Oryza sativa
  Clone ID: PAT_MRT4530_15042C.1
atacttaatgatactttcaacaatttattgagtgtccttgagtgtgtgttgtgaagtgagggagtgtgatgatgacacaactagctcggatatgaccatgactaacttatgtattcatcaaccaaatcatcaacttcaaacggacctagccgctgatctaaaagaaatttcaaggaccataagtacttgttggaaagcttatgtagtatactttaagatggttttagtcccaagtcaaaattcccaccgaactatcaggaatctgcaaaacaaggcacggattagccttctcggcgaggtcaaccgtgcaatgcacggttgataaccagaggagacgtgctgctactattacagggttcggatc

SEQ ID NO: 8544 - DNA, 1371 bp, Oryza sativa
  Clone ID: PAT_MRT4530_15043C.1
tgtttctcttgctttttcaacactaacaatatatattatacaatttttacaaaaggaaagccaatagagagaaagtacaaagcaaaatcctacatttttagcttacataaaataatgtccatgaaggccgacaatagagacgaggccaacagttcacattttaattacatgagaacagttagaaaccaaaatggcttgcttgatcctatattcgaacagccgatttcaccccccagaagttaggggatgcgtagtctcactcttattttccccaatttggatctcattgttctcaccttctcacatcacaacacaggcgtttggattctcgtcactgaagagctgcggcgcatacgggtatgcgtagccaggaacaccatatccaccagggttgctgaatcttgggtaatgcatatacagattagcagcagccaaggctgaaggatctttctctttgtccttctcttcaacctcggcagcattgctatcatccttctctttctccttttctttctcatcatcaccttccttcttttcctccttgctctcgtccttctcctcgccaccttcggccgccttcttgtcatcctttgcatttgcatcgccagcattctcagggggaggggctggttcagattttacaacggcggcattcttaccaatgcgtttatgcacgtaatcggtgagctttgactcctcaaacacacccttcaccgtcacttgtgatgccttcatgtctggctctgctgattgcactcctttcatcttgaggattttcttcctgataacttgcgcacaggcctcacaatgcatatgcaccttcaggaccaccgctatcaccgttggctccttctcttcaggttttggtggctcgggctcttcctttttctcctcttccttcttctcctccaccggaggtggcatcggtgatagaagctcaaccttgcggcctgtcttcttctgcacacggtgcaccaccttcattgggtcagcagcagccttctttcccttcacgatcaccttgtgagctttcgagtccgcgacaacatcttccactccatcaaatcccctgagtatcttcttgaccttgcgagcgcacccttcgcagtgcatgaagacccgcatcaccacctcctccggcggtggcggcgtcgacggcgcgtcctccttcttctcctcccctgccgccgccgcctccttctcctccgctaccgccgcctccttccccttctccgccgccgcctcctccttcaccttctcctcctcgcccatggctgcctgcctctcctcctgctctctgcgccctcttccctcgcgctctgctctggacactactgcgagcgtggaactgcaactgtgaactgctcctcc

SEQ ID NO: 8545 - DNA, 343 bp, Oryza sativa
  unsure (1)..(343): unsure at all n locations
  Clone ID: PAT_MRT4530_15044C.1
aanaanccngccctttacatctcctnggccncgcaagccgtccacaccgccgctgccgcatcaacaaaaagaagcnaacgtnattgcggcgtccttgcttcttganctggcggcaacggacaattngccgccggttaagaaggtcntggaaagaagaaaaagtgtctcttggcntttgctgggttngtggtanggggccttccgccaacngcgtttgcnaagctcnggattganccgaagacgcggnaaaggtgcngncccttttcggaaccccgggggtncctggggtntntcttgcngcgggccggnggaaagccnncccncctccgaaaannganggggg

SEQ ID NO: 8546 - DNA, 135 bp, Oryza sativa
  Clone ID: PAT_MRT4530_15045C.1
gggggggaattacgatgttttcacataaccagatccctctgaaagtgaaagacgcacggactaggtgaaaacccaacagtcataatcgagaacaagatagacacgccctgaacttgctaggtagtacaaggaaaa

SEQ ID NO: 8547 - DNA, 1344 bp, Oryza sativa
  Clone ID: PAT_MRT4530_15046C.1
atgggcgagcaagttaagctcaacgacgacaaggaggagggcggcaaggagaagaattcgaagcaggtggaagaagtagcaccggcggcagagaagaaggaggaagctgcagcagcagcagatgcagggagcaaggaagaagagcaggtgccgccgccaccggcaccggtgatcctgggcgtggagcttcattgcaccggttgcgccaggaggatgaggcggtgcatcctgcggagcaagggcgtgcagggcgtggaggtggacatgggcggcaaccagctcaccgtcacgggcatcgtagaccctcaagccctctgcgctcgcctccgccacaagaccttgcgcaacgccaccgtcatctccccgccgccgcccccaactagtaccgaggaccaagaccagcaccagccatccccgcggccgccgctcgtccattcgcaggtgagcgatgtgacgacggtggagctcctggtgaacatgcactgcgaggcctgcgcccagcaactgcacaaaaagattctcaagatgagaggggtccaaaccgctgacaccaacttgagcaccggcaagctgacggtgaccggtaccgtctcaggcgacaagctcgccgagtacatccaccgccgcacaggcaagctcgccacggtcgtcgtgcccccgcccccaaagcccaaggaggaggaggaggagaagaccaacgacgacaagcctcctcctcctcctgcagccgaagctgacaagaaagatgaggaaaataagccggcggcggaagacggcagcagcaagctgcagaatgaagcagagggcaacgccaacaaggaagcagcagcagcagcagaggaggaggcgcccgaggaggagaaggcagcagcgattgcgaataataagcagcagcaggaggatggttcggtggtggtggaggggttcccgccggaggagatgatgaagcggatgcacttgtactggccgccgtacgggcacggctacacgagttactaccaccaccaccaccaccaccagggcggacaactactcttcaaggagaggcccaaatcaagcccaattgggggtaacaaaaccagctgccgctgcactggctggagcctggagggggaagaactcagaagaacaggcatcggcgggcttggcgaaggcaagggcgacgccagagcagtgagggtgcctctggaggccgttgctagctccactggatctgagcccctcggtgctgaagtggtccttcatgtttatatggggcccccaaaaaacgagggccctgtgcgggtgcctatttggcacatgcccatcgacggccttgtggacagacaatcgagcgacaattaa

SEQ ID NO: 8548 - DNA, 503 bp, Oryza sativa
  unsure (1)..(503): unsure at all n locations
  Clone ID: PAT_MRT4530_15047C.1
cccgactgggaaaccaatatatatatgagcaaatcaagcagcaggaggacccctaaacccgggataaaaccaagagaaaaaaaaaaaaagaaaccccctaataaaacaaaaaaaaattatttaaaaaaaaaatatcaagaaaaccctttttttaagaaaaaattaaaaaaattatcccgctccccatccatccggccggccatccgccatccaagggacaggagctcccgaaaaaaaaaaaaagaagtccttaattagggggacgcgggggcccccccccccccgccggggggaagctccccgccaacgcggggcttaaaaagggcggggcggagcgggttcttcatgacaacgggaaaggcaaaggtctcgggggggtcgggggggccctcgccggggggggggacccaggggaactcggggaccatgttggcaagcatgacctggatggggagaaccccaaggggggggggggggcaaatgcggnggccggccccaaacgg

SEQ ID NO: 8549 - DNA, 549 bp, Oryza sativa
  unsure (1)..(549): unsure at all n locations
  Clone ID: PAT_MRT4530_15048C.1
cggattcggacgagggaanntggaacgcnnactgaccgcaagggnatancantggacttccatatctcccntctcantangacttctaacgtcggaancagcntcatccagaagggtggtcggaagatacgttntcgatctccatnacnantgataaggatggcatctnctgcaagatcangntccttgtngtcgangatatgaatcaattacttccgccccnacttcctcaaccntctcgacaaaatnatcgtcttcaggcaactcaccaanctggangtccggaggatgggtnangatcctgctcncggaggtctttgancgctcaaggcccaggacnttgatctccacgtcccgagaaatncaaagaccgtatcttccacaaatgcttcnacccganctatgntnccatgccnctaacgagggccatcatgaagntcctngangacatcctccccnaaaaaatctnctggggaagtgaaagaaggcaatcccccnttntcnatttgattccgatgggatgtgatttttttaattgccncnttggtt

SEQ ID NO: 8550 - DNA, 1143 bp, Oryza sativa
  Clone ID: PAT_MRT4530_15049C.1
atggcgtcgccggcgtggcagccgccgcaccgcctccaacctcccccgccggcgcagctggacctcaccgacgagctcctcgaggaggtcttcgtccgcctccccaccgccgcggacctcgctcgcgcatccacggccttcgcctccttccgccgcctcatcaccggccacgccttcctccgccgcttccgccgcctccacccgcctcccgtcctcggcatcctcgccgcgggattcctcgcggcgcagccgccccatccgtcggccgccgcggcccgcgccctcgccgaccccgacgcggccgacttctcttgctccttcctcccctcccgcgaccgctggtgtctccgccacttctccgacggcaggtacctcctctccgccatcccggaacgcagcgacccggctcccgaccaccgcgccttggtcagggaattcgctgtctgcgaccccttgtaccggcgctacctgctgctcccacccatccccgatgacctagcctcagtagtaaatcaatcagagattgtgaatttcgagcccttcctttgtcctgctactgaagatgaagaggacacaatgttcagggtgatctgcttggctcagtgcgaggccaaactggtcgccttcacctactctaggtgttctgggcaatggcatgctgtggagttcgatggctggagagatttgaccagggggactagcaatcccttcgagttcagctctatcgacctcccacctgggccctcatcacgtcggatggtcattgtggaggctctggaagggaagctggggctctttactctctgcaatgacaatgccttatactatttcctatggtatgacatcttggaaaatgatgatgagggcgcgcttcagtggacattcaagcttgagtggttttgtgggactacatatgccatcatatctccggacatgtggttaatctgcacgcagttgaggcttcgtctacgtcatgcgctggtggggcttcgtcgctttgagttacaaggatggctggctatggtggaagagaaacagaatgtcgtggagaccaacgggttgggtggccgaacttcggtattttacggcgtgcccccatctgttccacggtggaacttccaccccattgatccatcatccatg

SEQ ID NO: 8551 - DNA, 1860 bp, Oryza sativa
  Clone ID: PAT_MRT4530_1504C.1
atgggtgccgcattcttgtcgtcgtggccatgggataacctcggcgcgtacaagtatgtgttgtacgcgccgctggtggggaaggcggtggcggggcgggcgtgggagcgggcgagccccgaccactggctgctgctgctgctcgtcctcttcggcgtcagggccttgacctaccagctctggagctcgttcagcaacatgctcttcgccacccgccgccgccgcatcgtccgcgacggcgtcgacttcggccagatcgacagggagtgggactgggacaacttcttgatactgcaggtgcacatggcggcggcggcgttctacgcgttcccgtcgctgcggcacctcccgctgtgggacgccaggggcctcgccgtcgccgcgctcctccacgtcgccgccaccgagcccctgttctacgccgcgcacagggcgttccaccgcggccacctcttctcctgctaccacttgcaacaccactccgccaaggtgccccagccattcacagcggggttcgcgacgccgctggagcagctggtgctgggggcgctcatggcggtgccgctggcggcggcgtgcgcggcggggcacggctccgtcgcgctggccttcgcctacgtgctgggtttcgacaacctccgcgccatgggccactgcaacgtcgaggtgttccccggcggcctcttccagtcgctccccgtcctcaaataccttatctacaccccaacgtaccacacgatccatcacaccaaggaggatgccaacttctgcctgttcatgccgctgttcgacctcatcggtggcaccctcgacgcccagtcctgggagatgcagaagaaaaccagcgcaggggtggacgaggtgccggagttcgtgttcctggcgcacgtggtggacgtgatgcagtcgctgcacgtgccgttcgtgctgcggacgttcgcgtcgacgcccttctcggtgcagccgttcctgctgcccatgtggccgttcgcgttcctcgtcatgctcatgatgtgggcgtggtccaagaccttcgtcatctcctgctaccgcctccgcggccgcctccaccagatgtgggccgtcccccgctacggcttccactacttcctgccgttcgccaaggacggcatcaacaaccagatcgagctcgccatcctcagggcggacaagatgggcgccaaggtggtcagcctcgccgctctcaacaagaatgaggcgctgaacggtggcgggacgctgttcgtgaacaagcacccggggctccgggtgcgcgtcgtccacggcaacacgctgacggcggcggtgatcctcaacgagatcccgcagggcaccaccgaggtgttcatgaccggcgccacgtccaagctcggccgcgccatcgccctctacctctgcaggaagaaagtccgcgtcatgatgatgacgctgtcgacggagagattccagaagatacagagggaggcgacgccggagcaccagcagtacctggtgcaggtgaccaagtacaggtcggcgcagcactgcaagacgtggatcgtcggcaagtggctgtcgccgagggagcagcgttgggcgccgccggggacgcacttccaccagttcgtcgtccccccaatcatcggcttccgccgcgactgcacctacggcaagctcgccgccatgcgcctccccaaggacgtccagggcctcggcgcctgcgagtactcgctggagcgcggggtggtgcacgcgtgccacgccggaggcgtggtgcacttcctggaggggtacacgcaccacgaggtgggcgccatcgacgtggaccgcatcgacgtcgtgtgggaggcggcgctcaggcacggcctccggcctgtctga

SEQ ID NO: 8552 - DNA, 348 bp, Oryza sativa
  Clone ID: PAT_MRT4530_15050C.1
ttttggttaatcggagaaaattcgcccaattttcttccaatctgcttcttaattcttatacaagcagagagatttgattttgaattttttttacagggcatggtgcgcgtcccgggcatcggcctcgtatacaccgacctcacctccggcgtgccggccatctaataccgcttcgtcaccaacctcccggcgttccaccgcgtgctggtgtacgtctgcgtcaagtccgtcccggtaccgcacgtgctttccgccgagcgctacctcgacggccgcgtcggcccggctgggcaccggtcgaaccggtgcatcgtgcggcacggcttcggggacgtgcaccaggacgag

SEQ ID NO: 8553 - DNA, 1628 bp, Oryza sativa
  Clone ID: PAT_MRT4530_15051C.1
tcggatccggcgagatcgtagtcgagtggattcgactagctctcgatgacttggctcctcgcagacttcgacttcgtaggctgtgtgggttgtgttggctctgagattcgatcccctatgccctccccgtggggtcccttttatatcacagatctggaggtctccaagtaggactcggagatatcggacccaatacgatacgtcgacgacccagttctgtccgagaaggactcttcccatctgtagatttcgtgaaagttttccttaggatacgtaggaaatatccgcgtgcgcgtgggtatgccatgtcgatatgtaacgtatatcgaagggtagagggtatgcctgacccgtaaccctgtgaccgtcttgagtgctagagtgaacttgtcgtcgcggcggcagccaccctccacgctggcatttccactggatcccttggggcaagagcaagcgtagctgcctgccgtattggtgcagacgccgtagcaggggtactcatctttgtgctcgcactcgttgatgtctgtgcagtcgccgacgacgtacgggttgccgtggtacccggcggtgcagttgcagatatacccagggccgttgctggagtcgatgcagacgctgtgcgcgctccggcaggcgtacgacggcagcggcgtgcggcttgcggcggcgcagctcccgctcccgctcccgctcccggcgtccggccggatggcccagtccagcacgacgggcacggcgaagtcgcccgtccggttgaagtttgagccggcgtaccagaaccaccatgcgtccaccatgaaagcgtaggcgcaggcggtggcgttggcaaggaaggcgccgccctggcggcggccgaagctgcggaggcgcggccggtaggaggcgagcccgagcgggatgttgctctggcagcagccgtcgtcgccccggcacgagcccggcagcgcccgcgccgacggccggcacacggacatgcagccggtgacgtagtccccgccgtcgtcgacgaagtaggcgaggccggggcagccgatggcgacgaacttgctcttcatggacgagaagaggaacgcgctgccgttgagggacatgggctgctcctcccgcccccggcggccgcgcccgtagtcgccgccgccgtagcacgcgcggctggcgttgagcagcacggtgacctcggcggcggcgagggagatggaggtcacctcgtggccgtagccggcaactgtgaggcgcggcgggcgtcgggcgtcgtcgcagtcgaggcgaaacccccgcacgccgccgcggtagcagcgctcggagccgatgccgaaggggtaggggacggtcacgttgccgcaccgccgccggcatcccggcgcctcctcctgctgcgccagcgccgctgctggagtgatcagcgccagccatacaagtgccctccaaactaaaaacacctccattactctcgttgcgccttctctctctcgctgcgtgtgattacggctgccttcataattgagagctcgtggttgctggatcgccataactgatcgatcagctagcagcatagctacaccgattggcgaatggcgatggacgaggtcaacagagacctggcatggcatggcaaatcgatccat

SEQ ID NO: 8554 - DNA, 344 bp, Oryza sativa
  Clone ID: PAT_MRT4530_15052C.1
tcggatccggcgagattgtggttgagttgattcgactagctctcgaagacttggctcctcgtagactccggcttcgtaggctgtgtgggttgtgttggctctgagattcgatgtcctatgccctccccgggggtcccttttatatcgcagatctggaggtctccaagtaggactcggagatataagacccaatacgatacgtcgacgacccagttctgtccgagaaggattcttcccatctgtagatttcgtgaaaggtttccttagaatatgtaggaaatatccgcatgcgcgtgggtatgccacatcgatatgtaacgtatatcgaagggtaaagggtatgc

SEQ ID NO: 8555 - DNA, 2333 bp, Oryza sativa
  Clone ID: PAT_MRT4530_15053C.1
cggaggaggaggggagagacacacgcacgccgacgccgtcgcccaccaccccctgccgccgcgccgcgcggccatggggctccacgcgatcctcctcctcctcctcctccggatctccgcctccgcagccgcctccaggccgccgctcgacaccctcggcatcccgccgcaagacgaggcgtacttcaggggcggcgtgatcaggtgcagggacggatcggggaggttcgccagggacaagctcaacgacgacttctgcgactgccccgacggcaccgacgagccagggacatcggcgtgcccggaggggaagttctactgccagaatgctgggcattctcccatcacgatcttctcgtcgcgagtgaatgatggtatctgtgattgctgcgacgggagtgatgagtatgatagcaatgtcacttgcaagaatacgtgctgggaggctggtaaagcggcaagggataaattgaagaaaaaagtagctacatataaaagcggagttgttattcgaaatcaggaaattcaaaaggcaaaagtggcatttgctaaagacgaggcagagctagcgaaactgaagggtgaagagaaaatactacaaggccttgttgacaagctcacagaacaaaagaaattgatagagaaggcagaggaagaggaacgcttaagaaaagaaaaggaagaaaagaggatgaaggaagaagccgaaaagcaagctgctgatgaaaagaaagcgtcagatgcctctcaggaggtagattctcaggaaaatcatgaaactgtgcaagaagatgagagcaaggtagctgaacatcatgatggacatgccacgagccatgacaatcacacaccagaaagcgagtcatctgttgagcagcatgatcctgaaagccaagatgacattagcataaaagccgcacctgctgatgaatcaccaccagaggagacatctgcagcacctactaaagagcaggaatccactcctgctgactcagaaggtttatcaagagaggagttaggtcgtctggtagcttccagatggactggagaaaaggttgatgaggtcagtaaagatgataaaaatgagcatgaagctgagcatgatatgccagaacattcagaagaaacacatgaagatgaatcagatgtaccagaatctgctgaagacagctatgctggttaccattcagaagttgaggatgacagacataaatatgatgatgaagacttctcacatgaatcagatgatgaatatgtcgatgatcatgatgagcatgttgcgtcatacaagtctgatgatgatcagaaaggtgatgaccattcagatttcactgcctctgggcaagcatcatggctggataaaattcagcaaactgtacagaatgttttacgaacattcaactttttcaagacccctgtggatttatctgaggcttctcgtgttcggaaggagtatgatgatgcaagctcaaagctgtccaagattcagtctaggatatccactctgacagataagctaaaacacgactttggtaaggagaaggagttctattacttttatgatcagtgctttgagagcaaggagggcaagtatgtttacaaggtatgtccattcaagaaagcttcgcaggttgaaggacatagtaccaccagcctggggcgctgggacaaatttgaagaatcctacagagtaatgcaattttcaaatggagacagatgctggaatggccctgaccgaagtctaaaggttaggcttcgatgcgggctgaacaatgaacttaatggtgtcgatgagcctagtagatgcgagtatgtggctgtattatcgactccagcgctttgcgatgaacaaaaactgaaggaattggaacagaagctcaaggcatcttcgaaccagcgtgaccatgatgaactctaaattatggggtgagacaataatgaacttgctacaaggaaaacaactctcaccatacagccatactcacaagagaggtttaacaggtttattatatgaatagaatagcatatgaaactggaattcttggagttcagcactcggattgccaccgaagcagcattagtttggcaagaaaaatttttgaacaaaagctgtaggatatcgcgaaattcctcaccctgatttgtcggtagattttcttttaccactcttccctgtaaacgtatttgctcaatttttctatgccaccccaaagatgctagactgttgtttgtaacaatctgagtgtttctgagttatgaatagtatatttatgaactacatcctgaaaaaacatcactctggatgtagcatctgccggctgctgtttctgatc

SEQ ID NO: 8556 - DNA, 333 bp, Oryza sativa
  Clone ID: PAT_MRT4530_15054C.1
atgggtggtcctataaaggctgtgttgtatctccctaacgccgatcgtgttggcgagtttgtgaaaacccgtaatgcaaagtggtatctttgtggtgatgccaatggacttgagattagtgaggaaatctttggacattacgtcgccgaggtggcatttgggatgcacccgcgggatcctaactacgggaagtctgggacttgcccgatacttggtcttggacttgttcagttgtcgaccagctatcctgttcaacatcagaatcgaagtggattcggcggagaatcgtgttcaaagaacagagtgcgcatcggctgcgagggcatcggctga

SEQ ID NO: 8557 - DNA, 256 bp, Oryza sativa
  unsure (1)..(256): unsure at all n locations
  Clone ID: PAT_MRT4530_15055C.1
ctggttgcggacctcaccctaaaccctagccatggcggcggncaaccttctctctcgcgcgctcctccctgctctaaaccctaaccccaagcagtcacagcaacccgngtcagcctttcgggacgtatctctacgntgacgncacggnctgacggcctacgttcgcgantctctcttccanggcagnganttncncgacgtcgngnacgagggnggangggtccnangggttcggngcggacgaagngtttgtttt

SEQ ID NO: 8558 - DNA, 3621 bp, Oryza sativa
  Clone ID: PAT_MRT4530_15056C.1
atgcggtcggttcgctttgatattgcgttggacacgtgtgctagccgaattacatcgacaaaaaggagccgtgggaattttcttcccccaaatcgttccctccttctccccgcctccaatctcccgccgaaccctaaccccctcgccccctgtcgctgccgcggccatggacgacgagatcgcgcgcgcgcaggagcagcgccgcaatgtggaggacgatgcctatcctccgtgcccttcgacgccgacctctacggcggcgtctccgaccccgaccgcttcgccagctacgagacctccatcgcggccaccgccgaggacgacgacgacgacgacgacgcgaccgagccggtcaaccccgccgcccgcagcctcgcctcctactcgggccacgccatcgcctcctcctcctcgggcctcccccgcgcggcggatgaggagggtgacgggctccgcgcccgcgagggcgagtaccaccgccggcacccggtccgcggcatgtcgccggatcgccacgaccctttttctgccgcggagaccactccggacccatccacgcggacctatgccgacgccatgcgcgacaaccagcccgcgcccgcgacgaagcggcggaacagatgggaccaatcgcaggaggacgagggggatggcgccgccgctactggggccaagaaggcgaagactgcctcctcctcctcctcctcacattgggacgccgcccctgatgctgcaactcccgggatcgggcgctgggacgccacgcctgggcgcgccggaggtgcgacgccctccctgaagaggaatcgttgggatgagaccccgactccagggaggatggctgatgcggatggaacccctgcaccgtccgtggcgtgggattcttcttccaccccaacgcccaagaagcagagatcaaggtgggatgagacgcctgcgggtgtggggagcacggcacctcgcgctaccgatgctgttactcctgcaggttatgctcctgggccaaccccgttcgacgcggcggacctcgccacgccgtcacctggccagattgctcgtggcccgatgacaccggagcagtaccagctcttgcggtgggagcgggacatcgaggggcgtaacatgcctctgactgatgaggaacttgacaccatgctcccgcaggtggggtacaagattcttgatcctccggcttcttatcagcccatacgcacacccgcaaggaagcttctcgcgacgccgacaccgctgtttacaccgctctatgccatccctgaggagaaccgtgggcagcagtttgatgtgcccaaggagttgcctggtgggttgccacaaatgaagccggaggattaccagtactttggaacattgctgaacgagggagaggaagaggagaagctgtcaccagaggagcataaggagaggaagatcttgaaactcctgttcaaggtgaagaatggcacaccacaacagcggaaagcggcgcttcgacagctcacggacaaggcgcaggaatttggtgctggcccgctgttcaacaagatcctgccgttgctcatgcagccaacgcttgaggaccaggagcgtcatcttctggtgaaggtcattgatagagtgatatacaagctggatgatctggttcgtccgtttgtgcataagattcttgtggttgttgagccacttctgattgatgaggattactatgctcgtgttgaggcccggcagattatctcaaatcttagcaaagcagctggacttgctactatgattgccaccatgagaccagatattgataacactgatgagtatgtgaggaataccactgctagggcattcagtgtggttgcttctggtttggggattcctgctctcttgccattcttgaaggctgtctgccagagtaaaaagtcttggcaggctcggcacactggtattaagattgttcagcagattgctattctcatgggctgtgctgttctgccacacctcaggtccttagttgatatcattgagcatggtctgagtgatgaaaaccagaaagtacggacaatcaccgcactgtctcttgctgcacttgctgaggctgccgcaccctatggtatagaaagttttgatacggtgttgaggcctttgtggaagggtaccaaatctcaccgtggaaaggtccttgctgctttcttgaaagccgttggtttcatcatccctcttatggatgttgaatatgccagttactacaccaggggggtgattccaatcctgattagggagttccagtcaccagatgaagagatgaaaaagattgtcctgaaggttgttaaacaatgtgtcagtacagagggtgtagaggctgactatatccgtaatggcatccttccagagttcttccgtcacttttggataaggagaatggctctagatcgtaggaactataaacaacttgtggaaacaacagtggagattgcaaacaaggttggagttgctgacatcgttgggaggattgttgaggatctcaaagatgaaagtgaaccttacaggagaatggtgatggaaacaattgagaaggtggtggctcacctgggtgcctcagatattgatcgccatcaggaggagcttcttattgatggcatcgtgtatactttccaacagcagacaagtgatgattcaaatgtcatacttaatgggtttgaaacagttgcgaatgcacttggccagagggttaagccttatgttcctcagatttgtggtatcatcaagtggatgctgaacacctcgagtgcaaaagctaggcagcgagctgctgatctgatgtcaaggatagccattgtgatgaagctgtgccaagaggagcggctgatgtgtcacttgggtcatatattatatgagtccttgggggaggagtatcctgatgtgctgggttcaatccttggagctttaaaggctatcgtgaatgttgttggtatgacaaagatgacgccaccaatcaaagatcttcttcctcggttgaccccaatcttaaagaataggcatgaaaaggtccaagagaactgtattgatttagttggtagggttgctgatcgtggagcagagtttgtgccagccagggaatggatgaggatttgcttcgagctgcttgaaatgttgaaggctcacaagaagggtattagacgagccactgcgaacacatttggctatattgcgaaggctattgggccagaggatgtgttggccactctattgaacaacttgaaggtgcaggagcgtcagaaccgagtttgcactactgtcgcaatcgccattgttgctgaaacttgctccccctttacagttttgcctgcccttatgaacgagtaccgagtaccagagttcaatgtccgtaatggtattttgaagtctctgtcatttctttttgaatacattggtgagatgggtaaagattacatatatgctgtcacgccattgcttgaagatgctctgatggatagagatctggttcatcggcagactgctgcctctgctgttaagcacatggcactaggtgttgctggcttgggttgtgaggatgctcttgtccacttaaccttgtctggcccaacatatttgagacatctccccatgtcataa

SEQ ID NO: 8559 - DNA, 286 bp, Oryza sativa
  unsure (1)..(286): unsure at all n locations
  Clone ID: PAT_MRT4530_15057C.1
ccggctgaatgaggctttanacgtatggatgcctgcctactgtcgatcanaagctttgaaccgaggccttaatttgcttgcaattagtacccagcttatatgtaggcaggccttgccttttgctctgacgcctaaataaaaccgncgtcgtcgttgtcagtgtgtgcntgtgtcgaacaatgttggatgganccctagctagcttggatggaacatctatcancatggtgatctcatcatgtactcctgctccatctcctcatgcgtgccaggcttcttaatataa

SEQ ID NO: 8560 - DNA, 528 bp, Oryza sativa
  unsure (1)..(528): unsure at all n locations
  Clone ID: PAT_MRT4530_15058C.1
gnnnnnnttcngggttgcggattcggcacgaggaagacaagccctcctcgatccacaactcccacacctactttgggtggtcnaacctctcctaaantggtggatggtgtgaacccaatgatagcataagcccagangttctaantttgaggtctcangtggaaaatcttactcncaagtctcanctactggaactgatttggagaaaacaactnaacagttgaangaagctatttcnattgcaggggangaaactgcgaaatgcnaanctgccaangaaattntcnaatcnttaactgcncattgaanggcntggcanaaaaactccttaaagaaccggactggtgaaaaaaaacnnactgccccnctgccangaatttctattcccactgatatntcnnttgcatctgaaaatttgggttccccanaaattctggaaaacctgttccaaccgntcttatggtttgcttgtttcccatggaacnacttcccttngaaattagttgaattcccccgaaattccccann

SEQ ID NO: 8561 - DNA, 654 bp, Oryza sativa
  Clone ID: PAT_MRT4530_15059C.1
atgtcagatggaatcatacatgagaagataactaggatatggccagttacatcagcatggtggcataatcctaggatcgttctagacaatttcttgatgcctcttaatcctacaagggtccattcatctcatgttctcgccttcattcacctgcaggtcctcttcaaaggggaggatcacggcagcggcggtggtggagtggaggctttagtcctagaagccggtcttctcccaaatggcgttgcgaacgaggcagaggtcatggtccttgagcgtgcggctggtgccctcgtggacagagaaggacgcggcggtgcgctccaggctgagaaggacgcggcccagcccctgcccctgtggaactcctcgtcgccgcactcatccaacggccaccgcgtcgcgtccgcgcctgcactccccttgccgctgtactccacaccgaggatatttggccaattgaggatgttcactggcagcgatgtcgctgcccctcccccaccaccaccagctccctcccacgccctcgcgccagcgccgccaccacctctcttcccgcccttctacgtcatccccacaagcgtcagcggggcggcacataggtacgtctccatgggcgacaacaatgacgacgctgacatccccgtgcctccctga

SEQ ID NO: 8562 - DNA, 3087 bp, Oryza sativa
  Clone ID: PAT_MRT4530_1505C.1
atggccccacgtaagctaaaccctacttcagcgaaagggccagatcccggccgagtcgatgacgacagcaccgcctttcttggggtctctcttgtagacgacgtcgagctggcgaagctggttagctccggagcgttggttaaggggcaggcttttgccctagggaaaaccgtggtgccaaaacctgtcgacaatcggacagtggtgttcaccgtattttttgaggcagggctatggtttccctgcaacgtgttgttgccggaaatccttcgcctcttccaggtagaacttccgcagctgagcccgtcagcgcttgttcggatctctatcttcgactgggcgtgccggacttccgggtttgagcctaacgccgagctctttggcgccatatttttcgcctccgtgaactcgaagacggtgattaccccggctggaacgaaaaaaacagtgttcgggagcgtgaacttcaacgttcgccccgagcggtccgatctctggccggtgaacgctgccatgtcgaagtgggaccgccattggatggcgaggtggttctaccacaccatccccttcgaggctggttctgaatcggcgaaagccctccggtgccagcgcagggcgattgcgccgaaccggagacccaagatcgctgtggacggcaccatggaggcgcggtttgttctactgtggaaggtttgctcccgtcttagctgccgtgacttggtggaggaattttgtatgcttcgcatttttcccctctcccagtcatggcaagtcgcggttgaacaaggcgaagaggtcgacggtttgccgaacctgatacttcctgagggggcgaacatgttgaccctcgaccaggccgaagtcgaagcctgtaggatgagcgacgatgtttcggtcgtcgagtatagtcagctgttaacgcgtcaagcggctgggcgggcgaaccgggtttacaatggcgaactgcctccccgggtgaatcctcaaaaggacgacgacgaggcagggccttcgcgaaagcggatgcgtggacaagtgaagcttgcccccagcaagcgaagagttcctgcttcatctgactccgacgctgacgacaaggatgatgccgaagaacgtgacggcgaggaggaaggagaggaagaggaggaggtggaggctgtggctgataaggccgcgagcgaggcggtcgaagaccgcgtcgacacccccggctacactcctaccccaagtcccggtcacaacgagaccggggtggagtcgaatagctccccccttcgtcggaaggatttggaaggggcgaaagccctagttgcgttctctccaggtgtagcggcgaagggaggtcctgtcaaaaaggtggctaagaagaaaggactcgtcgatgtcgctcgcgtttttagcgacgacgagtcctccgacgggactccgacttcgcccgctggtcgcagcctggatctttcggccgcccccattcctccattcggcgccactggagtggacggtagtaccgccgctggggcttcggcttccgtggaaaggattgtgacggccgcggcgaaagtattcggcagtcctccgcctcagccggttgcatcgccgctgattgaggtgaagggaaagagagcggtcgctgagacatccgcttcggaatattcgctctcggtaccccgcttcgcccctagtgattttgagacgcgtgcggacctccttccttttgtggagggggtaagcaatcttgtactgccagccagtgccccgagcttgttcactgagctgaatgagttcgacgaggggtgttctgctataaaaagcctggctgttcggatcctcgcggctcactgctcaacggagcgaaccgtgcgagcccgacttgatgggttcaaaagccgtcttcgggccaaggatgacgagctaggccgtaaaaatttagagatggaggcccttgccaacactcttaaggaggcgaaggctgaaaacaagcggcaccaatcggaactggagaaagggaaagaagcctgggccgaagtctatggcttaaaggccgaactggagaaagagaaggcccattcggcggtgctcatcgactattacaaccttactgagccgaagatggaggctcttcgccagaaggctagcagggccgaagcaagcgccgcggagcagtcgcagcggttttcgcgggagatggcgaagatcaccgaatccgcgagaacggcttgccaaacactccgcctcgcccttaccgacatgggcgcgaaggtgcggggggtccctaccgaggatgcctcagccttcgacttctcggagtggacccagcaggccggcagatcggtttcggactacgccaccgcgtacggcgactgttgtgcgcgcgtgtcagcggcctttaccatgggcctcctgcagcagttcggctgcgagcacatcgccgagttccccaagtacacgaagagggattgggaaatcagtgcgcaagacatttcgcctgcacttcgtgcatggcgaaaacaattttggcagaaagacggccgctccgccgctaaggcgcgccttttggagcagctggcgaaagcagaggcggcggacctttgtgaagaggaaggcgcggcggccggagggggtagaggcgatgcccaggaccacccagagggggtccgccgaaaatcgtgcattcggcccccttctgggagctggcgaagtcaaaacaagaaatttgtggcattgaaggggctgccgaagacgcgatgtccatttcggcttgtttatcgcgaaatggagataaacggtcgcagctataaggttatcaaggttgccaactggctacgtgtgcaccccgggcgaaccttagaagattacgatcttgttcactcaagacgtttggaagatatggctcgcttttggcgaaaccatcagaagactaaacgccaggaattgatctctcagcgtcgttacagcttggtctgtgtttcgccccctactcctcttaaggttgtgtatgatattagtagtgatgacgaacctagttcgtccgaccattccttagggagggataatgattactggggcgaaaatgtaatttacttgtaa

SEQ ID NO: 8563 - DNA, 2275 bp, Oryza sativa
  Clone ID: PAT_MRT4530_15060C.1
atggccgaccaacgccggagatttcgcggcggaggagattggcaggcgagcgtcgacgatgtggtggacgacggtggcgagctcgaggccgcggcggcggcggcggcgaggggatcggtgctgtccggggagtaccaggctcaggagatgtccacgatggtgtcggcgctgacctgggtcgtcgccgccggccacgacgaccacggcggcgggcagtggtctggccttgtggacgtgccggcgacgacgctcgccggcggcggcggcggcgactacgggcatggcgcacaggggagctattattactacggcgcagcgccgacgtcgacaccggagttcgtagcaggagggcagcaagagcagctcagctccgacgtgccgcagggcggcgctagtctcggtctcgccatggacgagcactcgcccacatacaccgtcgaagcgtcgtcctccgccgatcagcacggcggcggcggcggcgggcggctgattgagaagcagcagttgctggtagattaggcagatccaaatacgaaagtcagtgttcacaaggccgcccgcgtctggctcggcaccttcgagaccgccgaggccgcggcgcgcgcctacgacgaggccgcgctccgcttccgcggcagccgcgccaagctcaacttccccgaggacgcgcgcctcagcagcccgcccgccggcgccggcgccggtggcgccaccgcagcggcgcagacggtgccggtggcctacccggccagcgcggtctcggactacttgcacggcggcgccgccgctgccatgagtagctctttggggccttactcctccatccccacctcctcggtcaccgtcgcctccgtgccgtcgtcgtcctctgccgcgtcgtcttcttcgggttacggcgcgccggcggagcacggcgaggcggtgcagtggaccagctggccggacgctcagctgcagccggcgcccgcgcgggcggagcaaaccacgggcggggcgaccacgccgacgacccgcgcacacgccggcttcttcgtcctcttcttcttcttcttctgcttccacccccgcgacccgacgccgcccaccacctcggtttcgttggcatcgtcatcctccaggtccacggccactagctaccatctagaagcttccggaagcttcgggaaggaagccgccccccgcgccgccttgccgggcctcgcaatgccggaggagaaggagtacgcgcccgtgcccctcggccaggcgccggaggcggtggaccccgaggacccggtcaagtcgccgccgcggcccacctcgccggcgaactccacccgcaaggcatgttttgctgttcttcaaagctgggtgtcaagaaaatttatgacaggatgcgtagttcttttccctgttgctgttacattcttcatcacctggtggtttgttaagtttgttgatggatttttcagtccactgtatgcaaagcttggatttgatatatttggccttgggtttttgacttccttgctattcatattcctagttggaatatttgtttcttcatgggtgggttcaactgtcttttggattggagaatggtttattaagaaaatgccttttgtaaggcacatatattctgcatcgaagcaagttagcactgctgtttcaccagatcaaaatacaacggcatttaaagaagttgcaataattagtcatccccgtattggtgaatatgcatttggattcataacatcgacgatgatccttcagactgacaaaggtgatgaagaactgtgcagtgtatatgtgccaaccaatcatctatatatcggtgacatcttcttggttaggtctgaggagattataaggccgaatttgtccattcgagaagggatagaaatcattgtttctggaggaatgaccatgccgcaggtgattgcagcaccaggacaaacaccccataagggtcagagcacccgtttaaacagaatgatgagtgcgtgagtacatcaggtctgcccagagttgctgagagagggcaaatcggtggatgacaaagctggaacaaggtgattgagaagcagcattgctggtagattaggcagatcaaaatacgaaagtcagtgttgactagtccgcatcgcttaggtttgctcgctgagtgaaaagttgtgtaatctttcaatcacgctccaaatgtatatcagtactgtgaccaatagtatttatactcctttcaaaagaaaaaaaaatcgatagcatttgtaccttgtttaaaaaaaaaaaaaaaaaa

SEQ ID NO: 8564 - DNA, 581 bp, Oryza sativa
  Clone ID: PAT_MRT4530_15061C.1
gtcaccgccaccaccgccgccgcgatgatcagcatcctcgcgcaggagcgcctcctcgggttcgccctgggctccgtctccatgggagggttcgtcctccaccagcggcgcgccatctaccgctccctcgccgacgccgacgctgtcgctgccccgtcgcccttctcctcctaccagcctagtgaaaccagaagtagaacaagctcaactgaattggctcacgtatggaacaagggagtggatgagactctcggacgacttgttgcatacctcagctctcgtggatggtaattcaagcattatctggttgggcgtgccaaagttaacaggtggagcatgcctccccggtcatgtcattgttgtgctatgatgtactcacatttctttgaacccatagctgaatacaatgatgtctttttctttttaatttaagaaaggttgaacgatatcatggatgaatggatggatcaatatcctatttgtcccagaaaaaatgttctttctgctacaattcttgcatgtattacacacttcggggacttcatactggccctgtctatatgcttcgttttgaagcgaat

SEQ ID NO: 8565 - DNA, 490 bp, Oryza sativa
  Clone ID: PAT_MRT4530_15062C.1
gaatcaaaacgttaacccacgctccataacacagacgacagcccaaaatactaagacttgtgcactactagatttacatcgacaaacattatggcacctacattgcatccgaccaaaggaacaacgaaaatcataactttcgcaccatatatacttacccatccttattgaacgtaacaataacaagctctgcagaatgctagaaagagccgttgcaagctcttattgggtgcgaactagaaattctcagagggcacagagcaagatatgatttatgatgcgcagcaaaaatcctaagaagatcttctactagagcatccactactcactagagctcgatcacagacaacatcgaataagctatagcttagctctgaactcacacgacctaattgcaccttgtcggaacatataagccacggtccgagagctgagccgctgactatgtctgggaaatgctcgcacaagacatcaccgatgacttggaggg

SEQ ID NO: 8566 - DNA, 288 bp, Oryza sativa
  Clone ID: PAT_MRT4530_15063C.1
ggagggaaaaagcggggaatgaccccaaaaaaaccttaaccagggaacctttttgggaaaaaacaaaacagagaaaccgcatttaaccaaacggaacccgaaagggcccctttaacggcccgaaaaccgattccccggccggaaaccccccacctttaaaagggggggtttacctaacctaaaaggcccccctttgaaaaaaacggaaaaaagttgggggccttgcccaaaaacctaagggttgaaaaaccaaagctaaaaacggaaaacttgggggaaagaaacccc

SEQ ID NO: 8567 - DNA, 534 bp, Oryza sativa
  Clone ID: PAT_MRT4530_15064C.1
atggatgaaaaaactaatttcataacttgtcacaaaactctctcctccaagtcctctccccgtctcgtggttcgccgccgccgccgccgttccaacgccgtgggcgggaataataagtttctgatcaatcatccaatcaaagaaagcatattaaaggctgagaatcttccctttccttcggtacataaaatggaagaattaacttttaagtcggcaattgacaatccgaatcccaagcaaataagctcattggtggtgcgacaagattttcgatcacacatcactggctggtcattgtcgcttccccttgttctccatcctatgggggtcctggtcggtgaaggggtcctatttaaatccgaacttgagatctggggctgtggagtgaaagtcggggatgcgggttgggccgtccctgccccacctgatctagacctaccccgttgtgaaccctacttcggtcttgggcctttctatttttacttggcacaaagttctaaattggtgatttggcatttccatgttctaagccaa

SEQ ID NO: 8568 - DNA, 264 bp, Oryza sativa
  Clone ID: PAT_MRT4530_15065C.1
atggcaattaaggaccggttcacggggagccctgggagacttaccgtgcttaccacaagcgggagtgctgctggattcaccgcggcgcacgaggagactgcccactgcctgttgaggggtggggacaagtattacaattcattatgtcctagctacggcttcgacgtcggcgtattatgtcctagctacggcttcgacgtcggcgtattatgtcctagctacggcttcgacgtcggcgttatctcagaagataacgacttatga

SEQ ID NO: 8569 - DNA, 1191 bp, Oryza sativa
  Clone ID: PAT_MRT4530_15066C.1
atggcggcggcggcggcagccggagcgggcgcggacgaggaggtggacttcgagttcttccccatcatccgccgctacaagggcggccgcgtcgagcggttcatgaacatccccccgctccccgccggcaccgaccccgccaccggcgtcacgtccaaggacgtcgtcgtcgacccggccgtcggcctctgggcgcgcctcttcctcccgcctggcggcggtgctccccagggtaagctccccgtcgtcgtgtactaccacggcggggcctacgtcgtcggctcggccgccgacccgttcacgcactcctacctcaacggcctcgtcgccgaggctggaattctcgccgtcgcgctggagtaccgcctcgcgccggagcaccacctccccgcggcgtacgacgactcgtgggaggggctcaggtgggtggcctcccacgcgaacggcggcggcggcgtcgagccgtggctgctcgagcacggcgacttctcccgcgtgttcctggcgggcgccagcgccggcggcaacatcgcgcactacgtcgccgcgcgcgccggcgagcacggcggcctcgggctcagcatcaggggcctgctcgtcgtgcacccctacttcagcggcgcggcggacatctgcgcggaggggacgacggggaaggcggagaaggccaaggcccgacgagttctggcggttcatctacccgggctcgccggggctggacgacccgctgtccaaccccttctcggacgccgccggcgggcatcagcgcggcgcgcgtcgccgccgaccgcgtgctggtctgcgtcgccgagaaggactcgctccgggacaggggcgtctggtactacgagagcctcaaggccagcggctacgccggcgaggtggacctcctcgagtccatgggcgagggccacgtcttctactgcatggatccgcgctgcgagagagcgcgggagatgcaggcgcgcatcctcagcttcctccgcaagtgaagctcctccacgacgcgaaggcttcgccatgatggaataattctggcgctttgtgatgccgccattgttgagctcgagggctcctgtagcttgtcgctcgtcagttcaggcatcttttgtgccaattgacgatcttattcttcaagagttggaaatcatcgaacaaattggaaatttctattcgaatcaaaaaaccacc

SEQ ID NO: 8570 - DNA, 186 bp, Oryza sativa
  Clone ID: PAT_MRT4530_15067C.1
atggctgcaaagaagacaccaagtggaggctttgctgatgggaactcttccccacagtacagggggacgggaaaggaggtggcaaagaacccccaaaaagtggagtgccatcctcttggaccggtaagaagccggcgtgtgaagctcccgccgcacagccacatttgctctgcaaggaaagcatga

SEQ ID NO: 8571 - DNA, 527 bp, Oryza sativa
  Clone ID: PAT_MRT4530_15068C.1
cccgggctgcaggaatcgcacgaggacagcaaactcttggctcgtgtatgaagtcgagttgctggaagtgaagcgagccaaaagggcacgttgactggccttctacatgttacctagatgaatgttttggatgccatcttctattttaccctagtgccaatgcctcgtgattcagtttgcgtcttttgctgtcccatatatgcgcatacttgtgcttgcttgacactactacagcttttggggatctttagaagtgaagtagttgtggatgtgttgtgaacttgttgaacaacttggaagtttctcggcatctagtctaattagcaagcatgctgctgctgtatatatgactataatggggagcattgcaatatatatatgggactatatatatatatatcctccgatgcagcaagttcatttaattagtgcgttttggattgtaaaaaaaaagtgacctgccatatataattggtggcttgcctgccttgttttgattacttggaagtgatagaagatagatgaat

SEQ ID NO: 8572 - DNA, 1884 bp, Oryza sativa
  Clone ID: PAT_MRT4530_15069C.1
atgtcaccgaagaagatcgtcaaggagagagttgtcaagcggatggaagatggaagcgaaggggagatggtagccgaagagggagcagagccttcggcctccgagccttcagcctcgcaagagaacaaaagagaagaagagatactcttcgacattgtcaacatcccctacaactacaacgcaatcttcagcaggggcactttgaccaagttcgaagcagtctctcatcacaactacctcaagctcaagatgcctggcccagccgctggtcgattcgaccgccgatgcgaactcatgagcttcttggatgcatactccggatatcaccaaatttacatgaacccggcagacatccccaagacagccttcatcacgcccttcggcaccttctgccatctaagaatgccttttggtctgaggaatgcaggggctacattcgccaggctagtgtacaaagtcttggggtcgcagttggggcgaaatgtcgaagcctatgttgatgtcattgtcatgaaaagcagcaagggcttcgaccacacatcagatttgcaagagacattcaacaacctccgcgcagctggcatgaaactaaatctagagaaatgtgtgttcggtgttcgtgctggtaagttgttgggattccttgtgtccgaacgggggatcgaagcgatccccgagaaaatcgatgccattcagcaaatgaagccaccatcgagcgtacgacaagtacaaaagctcgcggggcgaattgtggcacttagtcgattcctgtcaaaagcggctgaaaggggcttaccttttttcaagacccttcgaggggcaggaaagttctgttggacgcccgagtgccaaatagctttcgatgagcttaagcggtatctccaaagccctccaactctagttagcccagtggcagggaacgaactctggctctatctaccggcttcgcccattgctgtcagcgcagctttggtacaagaaaccgaagcaggccagaagccagtgtactttgtctccgaagctctccaggaggcgaagtgggccgctaagctgtcacctttcgacctacactttgtcgcccgcaccacgatcaagtcccaagtcctcgctgacttcatgcccgaatggacactcgcgtccgtcccagagcccgaaccggtcaaacaaccatgggtcatgcactccgatggttcgtggtctcacaaggaggcgggcatcactgcaatcctgacttcgcctgggggcattccaattcgttacgcagtaagactagagttcggcacaaccaacaacacaatagaatatgaagcaatgttaatgggcctaaggaaagcgaaagctttggttgttcggcgttcgctagtccggacggactcaaagcttgtcgccagccaagttgacaaatcttttgacgcgaaagaagggatgagaaaaccaaacatcatggtaattgaccaagctttttcgccaggagtccttttcgaagccttgtatacaccaagtgtgccagaagacagcccagacatcatggtaattgaccaagctgaactggcgaagacccagacgactggtgaacgtcttttgtcaagcacctcaaagagggatggctaccggatgaagaagcaacgtcgagcagccattcagaagtttgtttggaaaaatatcatggtactgaaggagttcattaccgacaacggcaagcagttcgactctgaaaaattcaaagaaatgtgcgaggagctaaatttgcaaatcaagttcgcctccgtcgcacatctgcaattgaagcatggggcgatgacgccggcagaactagggactaactcaccatgggtgatgttttctggtggcgaaatgggcgtgaagtgtcgctcgaactcgtga

SEQ ID NO: 8573 - DNA, 729 bp, Oryza sativa
  Clone ID: PAT_MRT4530_1506C.1
atggcggcggcggcgttctacgcgttcccgtcgctgcggcacctcccgctgtgggacgccaggggcctcgccgtcgccgcgctcctccacgtcgccgccaccgagcccctgttctacgccgcgcacagggcgttccaccgcggccacctcttctcctgctaccacttgcaacaccactccgccaaggtgccccagccattcacagcggggttcgcgacgccgctggagcagctggtgctgggggcgctcatggcggtgccgctggcggcggcgtgcgcggcggggcacggctccgtcgcgctggccttcgcctacgtgctgggtttcgacaacctccgcgccatgggccactgcaacgtcgaggtgttccccggcggcctcttccagtcgctccccgtcctcaaataccttatctacaccccaacgtaccacacgatccatcacaccaaggaggatgccaacttctgcctgttcatgccgctgttcgacctcatcggtggcaccctcgacgcccagtcctgggagatgcagaagaaaaccagcgcagacccgtgtcgcgccacccgcggcgaggcagagaagctgacgaatggacggtgtggtgtggtgtgggtgtgtgcaagggtggacgaggtgccggagttcgtgttcctggcgcacgtggtggacgtgatgcagtcgctgcacgtgccgttcgtgctgcggacgttcgcgtcgacgcccttctcg

SEQ ID NO: 8574 - DNA, 648 bp, Oryza sativa
  Clone ID: PAT_MRT4530_15070C.1
atggcgcgttccaagcttcctctcctcctcgtactcgccgtggtcaccgcggcggtgtcgtcggcgtggctcccgtcgccggcctcggcggccagcgatgccgccgccggcggcgagtactgccgcgactccctgagcgggctgctcgcgtgcagggacttcatgttcggcggcgcggcggccgcgtcgccggcgtgctgcgcggcgtacagcgcggcgttcgacgccgacccgttctgcctctgctacatcgccgacggcgtctacggccgctccaccggctacgacgtcaacgtcacccacgccctcgagatccccgtcagctgcggcctcgccacgccgcccatcgagctctgcaacacgcaaggtctggtgcttcctccctacgagccgtcgtcgccgcagcagcctccatcagcggggaagctagcagagtctccggcggccacgccggcgcaatctccaacggcggcgccttcgctgccacaggcgcccaagccgtcgtccccgccgccgttcacttcgccgtcgccactgccgccaccgccgccgccaccgacctctcatggagcgcgtggtgcgacaatggggatcggtacggtggctgctgcggtggccatgacgaccttgctggccttactatcttag

SEQ ID NO: 8575 - DNA, 781 bp, Oryza sativa
  unsure (1)..(781): unsure at all n locations
  Clone ID: PAT_MRT4530_15071C.1
attcggctcgagcgaaagccctcaaagcataacctctctcgtattttcgttgctgtgtgagagaaagagaaatggcaacaagcgaagaagtggttgcggcggcgccggaggcagccgcgccggaggcagggttgaagcacaaactggagagaaaatggacgttttggtgcgacaaccaatccaaacccaagcaaggcgctgcttggggaacctctcttcgcaaggtctacaccttcgacaccgttgaagagttctggtgtttgtatgatcaggtattcaagcccagcaagttgcaaatcaatgccgattttcacttgttcaagactgggattgaccctaaatgggaagatccagagtgcgccaatggaggaaagtggtctatcaccagcaacagcggcaggaaggctaaccttgataacatgtggcttgaaactatgatggctttgattggggaacaatttgaggatgctgaggacatatgtggtgtggttgctagtgtgcgccagtggcaggacaaactttcgttgtggacaaagacagcagcaaatgaagctgcccagatgagcattggaaggaagtggaaggaaatcattgatgttaacgacaagataacatacaactttcatgatgattctagaagcanagggagcacaaagggtcggtacaccgtataaacaccgcaggagcatcttcttgcacttgtgctgggctgctgcaaggctgnaatatttgatatctttatcatgtgccatatgtactaagaacatgctactactttggg

SEQ ID NO: 8576 - DNA, 118 bp, Oryza sativa
  Clone ID: PAT_MRT4530_15072C.1
acccataaatcctggcccaatttaaataagatttaatggctagggaaaacttgttaaaaccagaaaaccggggcattggcgggggggattccaaaatatttggggtagggagttaaac

SEQ ID NO: 8577 - DNA, 546 bp, Oryza sativa
  Clone ID: PAT_MRT4530_15073C.1
cggcacgaggccaacagcagcaacagatgccctgaatgtttataattgaaagggggaaaaacaacccaatatggacaagaactgcactgtgacctatcaaagctcttatctgcggactggataatggatacacaggttcactttggtcatcaactaaagcaccttgagagccaatgtatggatgataatgcaagatggttgttgaaccataataccagctgcgaatttcaaaaggattgccagcatactatggcggcgcaatgtgtggtgggaaacctcacaatgctggttattctgcatcctgccacatgctggcataacagccatcaggagtatagtacctggtgactagacagcctgtcaacatggccacatgggcgtttgcaccatgaccccaggtcatgtggaatcacctgtttttatttacatatgtttaagaggacaggaagtgaggaaacttacagatttactgttgcttgggtttatttatggcatcatataaatatttaggctatttctatgaaaatacaatgtccttaaataatg

SEQ ID NO: 8578 - DNA, 123 bp, Oryza sativa
  Clone ID: PAT_MRT4530_15074C.1
atggcgggatgtacggaggcaacgatagtggggattggccggggacgaagtgagcggcagcggggggcgaactccggtaaagagttcaagattgcatacatggcaccgctcacggtattctaa

SEQ ID NO: 8579 - DNA, 186 bp, Oryza sativa
  Clone ID: PAT_MRT4530_15075C.1
atggtggtgggatcgggtggatccgccacccccgccctcgggagcgacgacggcgggcagatccgtcgcccccgacctcggaagcagcaatggccggcatatcacaagggccttcgacggacctgccgaaacgagtcaacaatcgtcagggcgaagcgcagcagcgaagcactgattgacgcatag

SEQ ID NO: 8580 - DNA, 533 bp, Oryza sativa
  Clone ID: PAT_MRT4530_15076C.1
acccacccccccccccccccaacagcgtccagcccacaactacaaagaacactcatatctactgaacaaaaacaaatctcaccgactatacactaatatacgaatgacacaggttgagcaaccaaaggtacaaataattacatcaactctgaaacaaatatgcaggataacccatttgccgttttacacaggaagaaacctataagattgtcacggatctaagagcgatatagatgcacaaaaaggattactttgagtatacttattccactttcaaacaattatagcacactgacagtgctctacaagacccaacataaccatctatgcattgcaacgtgttgtttaactcgacgctgaagcctgagacatatgactttagatagataatttgtaagccttgatctgctaggacaatgttattttcaccaaacccttgacaggggtcttcagattccaaccaagctgcttgatgattatggccatacgaagaatcctcttatcactataatcatatccttcaccatagaact

SEQ ID NO: 8581 - DNA, 1596 bp, Oryza sativa
  Clone ID: PAT_MRT4530_15077C.1
cctctctctctctctctctctctctctctctctctctctctctctccccactcgctgcttccgccgccgccgccgccgccgccgcagcccatggcctcctcgtcggagaacgtggaggcgccgcgagacgagcagcgcgacccgccgccgtcaccgccgaaccctagcgaggaggccggggcgggcgaggagatggaggcggagggggagggggaggaggaggtgaaaaccctagagcgggcggaggagctgttcgagagggggtccaaggccatcgaggagggggacttcgtcgacgccgtcgactgcctcagccgcgccctcgagatcagggttgcacatcatggagaacttgctccggaatgtgttatgcacatattttaagtatggatgtgccttgctatacaaagctcaggatgaggctgtccgcttgtgagggtgagatagagcagctcagtggcattttgagtgaacttgagaagaagctggaagacttggaacaagcaatgtctaccccaagctctgttatggatgagattatgaagaggattgcctcaaaggcaggtggtgaacagaatgctactgacacaatgccagcggctgcttctttcaattcttcttcacagatggctggatcaagcaacggctttgattcgtcaactctgtctacggcagctacaaccggaagtactggaagcactgtaaccgatcttggggttgttggtagaggtatcaaacgtgctaatatcaagccaatctctgctgaacctcctcccaagagagctgcagctgattcgctctcagtaaaaggtgatagcagcaacaactcagatgttcataccccagcacaagagggcgatgattctgtatcaaagtaatgcattttaccctaggtagtaacttaatggaatctattcggtgccaaaatcctgtcttgcttaatatgtactgctgcatgtccattttctcagaagaactgccaatagggattgcatgaaccttttaccttttcagagctcaaaccgtgtcttaaattgatggttgacttgattgttgagtgagttcatggtggactaccatccaaatgcaatgttagctgataaaaaagataacgcatcagcagatgatggaggctcagaaaagtccgctcctgagggtgagatagagcagctcagtggcattttgagtgaacttgagaagaagctggaagacttggaacaagcaatgtctaccccaagctctgttatggatgagattatgaagaggattgcctcaaaggcaggtggtgaacagaatgctactgacacaatgccagcggctgcttctttcaattcttcttcacagatggctggatcaagcaacggctttgattcgtcaactctgtctacggcagctacaaccggaagtactggaagcactgtaaccgatcttggggttgttggtagaggtatcaaacgtgctaatatcaagccaatctctgctgaacctcctcccaagagagctgcagctgattcgctctcagtaaaaggtgatagcagcaacaactcagatgttcataccccagcacaagagggcgatgattctgtatcaaagtaa

SEQ ID NO: 8582 - DNA, 283 bp, Oryza sativa
  Clone ID: PAT_MRT4530_15078C.1
cagtataccactctctttcatccccacagctccagcgtcgtcattgttgcctcgtcgcctgctcgtgtccaccgcctcctacttccatccatctaaacgcatggatatccccttttccccctcctccttccactgccacccaacccccggggccctaatccgtgctactccactagagtttgcagtgtcaccggtgccagagaagaaagggagatcaccagagctacaagataagggtctacagcacgaatcgcaaagcacatctagtgacccaaaactataa

SEQ ID NO: 8583 - DNA, 436 bp, Oryza sativa
  Clone ID: PAT_MRT4530_15079C.1
ttttgtttaagaaataaaacaggagttacttaccttctagatccaggacccaagaggttaaaggatctacagagcatgctatatggaacatgcctcaatgctaaagctgactagaagcgctaatacactgacaacttattcacaccgatacattgacaatctgggggtagagatatgcatgaatgattctggtcagcccaggctggggccgaccatcatgtactcattgcttgtgctatggctttgacactataatcacggttctaatcgcatgctgagaacagtatgtactcacgcttgcaagaacaactcgtttgactgatacatagccatggattccggcatccaacatctacgactgatgcctgttaacagacccacaaagaacttacctggcatacgcttacacacttgaaacagagcatcattcacctgg

SEQ ID NO: 8584 - DNA, 2520 bp, Oryza sativa
  Clone ID: PAT_MRT4530_1507C.1
atggccccacgtaagccaaaccctacttcggcgaaagggccagatcccggcctagtcgatgacaacagcaccgcctttctgggggtctctcttgtagacgacgtcgagctggcgaagatggtcagctccggagcgttggttgaggggcaggctttcgccccagggaaaaccgtggtgccgaaacctgtcgacaatcggacagtggtgttcgccgtattttttgaggcaaggctacggtttccttgcaacgtgttgttgccggaaatccttcgcctcttccaggtggaacttccgcagctgagcccgtcggcgcttgttcagatcgctatctttgactgggcgtgctggacttccgggtttgagcctaacaccgagctctttggcgccatatttttcgccaccgtgaactcgaagacgccggtgaacgctgccatgtcgaagtgggaccgccattggatggcgaggtggttctaccacaccatccccttcgaggctatttctgaatcagcgaaagccttccggtgccggcgcaaggcgattgcgccgaaccggaggcccaagattgctgtgaacggcaccatggaggcatggttcgttctactacggaaggtttgctcccgccttagctgccgtgacttggtggaggaattttgtatgcttcgaatttttcccctctcccagtcatggcaagtcgcggttgaacaaggcgaagaggtcgacggtttgccgaacctgatacttcctgagggggcgaacatgttgaccctcgaccaggccgaagccaaagcctgcaggatgatcggcgatgtttcggccgtcgagtatagtcagctgttaacgcatcaagcggctgggcgggcgaaccgggtttacaatggcgaactgcctccccgggcgaatccccaaaaggtcgacgacgaggcagggccttcgcgaaagcggacgcgcggacaagtgaagcttgcccccaggaagcgaagggttcctacttcgtctgactccgacgctgacgacgaggatgatgccgaagaacgtgacggcgaggaggaaggagatgaagaggaggaggtggaggctgtggctgataaggccgcgagcgaggcggtcgaagactgcgtcgacacccccggctacactcctaccccaagtcccggtcacaacgagaccggggtggagtcgaacagctccccccttcatcggaaggatttggaaggggcgaaggccctagttgcgttctcttcaggtgcagcggcgaagggaggtcctggcaaaaaggtggctaagaagaaaggactcgtcgatgtcgctcgcgtttttagcgacgacgagtccttcgacgggactctgacttcgcccgctggtcgcagcctggatctttcggccgcccccattcctccattcgacgccgcgggagtggacggtagtaccgccgctggggcttcagcttctgcggaaaggattgtgacggccgcggcgaaagtattcggcaatcctccgcctcagccggttgcatcgccgctgattgaggtgaagggaaagagagctgtcgctgagacgtccgcttcggaatattcgatctcggtaccccgcttcgcccctggcgatttcgagacgcgagcggacctccttccttttttggagggggtaagcaatcttgtactgcccgccagtgccccgagcttgttcacggaactgaatgagttcgacgaagggtgttctgctataaaaagcctggctgttcggatcctcgcggctcactgctcaacggagcgaaccgtgcgagcccgacttgatgagttcaaaagccgtcttcgggccaaggatgacaaactaggccgtaaaaatttggagatggaggcccttgccaacactcttaaggaggcgaaggctgaaaacaagcggctccaatcggaactggagaaagggaaagaagtcagggccgaagtcgatcgcttaaaggccgaactggagaaagagaaggcccattcggcgaaggctagcagggctgaagcgagcgccgcggaggagtcgcagcggttttcgcgggagatggcgaagaccgccgaatctgcgagaacggcttgccaaaccctccgcctcgcccttaccgacatgggcgcgaaggggcggggggtccctaccgaggatgcctcagccttcgacttctccgagtggacccagcaggccggcggatcggtttcggactgcgccaccgcgtacggcaactgctgtgcgcgcgtgtcagcggcctttaccatgggcctcctgcagcagttcggctgcgagcacatcgccgagttccccaagtacgcgaagggggattgggaaatcagtgcacaagacatttcacctgcacttcgtgcgtggcgaaaacaattttggcagaaggacggccgctccgccgctaaggcgcgccttttggagcagctggcgaaagcagaggcggcggacctttgtgaagaggaaggcgcggcggccggagggggtggaggcgatgcccaggaccacccagaggtgtga

SEQ ID NO: 8585 - DNA, 422 bp, Oryza sativa
  unsure (1)..(422): unsure at all n locations
  Clone ID: PAT_MRT4530_15080C.1
cgcgcggnagacacgtggtggtgaggcctatgtgccgttcgggacggcgcgtgataatgagggagatgtgctaacttcctcaacatatgatagcagaattggaagagaggacggcggacagcctgtcacagaggatgtcagagggacataaccaccggcagcccctttagaggttcacccatgcccagaggacgcaaaagcacagctcgagtacaagctggagctgccggagcggatgcatgtgataagacgctcgagattatgcgcaaattctctgagcagtgcggccgacggttcaacaccttactttgatacgagaagtgcgacaccgccgttggtatcaagggacttgctgaacacaaggatcaacttggagcacctatatgcccttggaggcagttatgatgacatagctgctgagg

SEQ ID NO: 8586 - DNA, 312 bp, Oryza sativa
  Clone ID: PAT_MRT4530_15081C.1
atggccacagcgaagaagcacaaggccaccaccagctttagcatggaactgccgctccgcctccacctcccccccgagctcgccattggcgcctcccccaaaaaccagctccttttcaagccgcacgccgcggcagcagctgtagagcggaggctgatcagccggccagatttaggaagctggaaggcagggcagggatcggaggaggtcaagctagattggtggcgcgatctggatggtctgctcaccgccaatagtgagctcgagtacgaggcaacgctcaatgtagctccagtgcaaggtcgagcttga

SEQ ID NO: 8587 - DNA, 410 bp, Oryza sativa
  Clone ID: PAT_MRT4530_15082C.1
gctacggagaagacttcagcataagagaatacttcgataagcttcaccagccgccgccgccggagtcggagagctcctcgtcggagttctcgtcggagttctaatctatctaacgtggctgctgcctctgtactcctcctaccttttctttgggtcatttttcggtttggtcctcgttaggttactattttgtaacgaaggggctgagggtgcgtgtatatacgtggagaggggcggcaatggaaattccgcggagaggcttgggagaatgggcaaacaaccattttggaagggtggccgacggtgcccgttcttgaatgaggctgtccaggccattttttttcggaatttttctggggccctttttcaagggctggccagaaaatttaccaaaattggcacactggcca

SEQ ID NO: 8588 - DNA, 3017 bp, Oryza sativa
  Clone ID: PAT_MRT4530_15083C.1
tcaagggttgcgggcgaagaagtttcgtctacccacgcccttcgccatagcgccaatgaggcacgatatcaagggttgcgggcgaacaggtttccccaacccacgcccttcgccataatgccaatatggcacggcgttaagggctgcgggcgaagaggcttcgccacacgccatacccttcgccatagtaccaatgaggtacggcgtaaagggttgcgggcgaataggtttcgcccacccacacccttcgccatagtaccaataaggtatggcgtcaagggttgggggcgaaaatatgttgcttccaagctggggggctatgaagccgcccaagccgctggacacctttcgccacacgcaacgcccttcgccatagtaccaataaggcacaacgtcaagggccttcgccatagtaccaatgaggtacggcgtcaagggttgcgggcgaacaggtttcgcccacccacacccttcgccatagtaccaataaggtatggcgtcaagggttgggggcgaaaatatgttgcttccaagctggggggctatgaagccgcccaagccgctggacacctttcgccacacgccacgcccttcgccatagtaccaataaggcacagcgtcaagggccttcgccatcgaaccaatgaggtacggcgtcaagggttgcgggcgaagaggtttcgtccacccacgccctttgccatcgaaccaatgaggtacggcgtcaagggtttcgggcgaagaggtttcgtccacccacgcccttcgccatagtgccaatatggcacggcgtcaagggctgcgggcaaagaggtttcgccacacgccaaaccctacgccatagtaccaatgaggtacggcgtcaaggtgtgcgggcgaacaggtttcgcccacccacgcccttcgccatagtaccaatgagatttcgccaacccacgtccttcgccatagtaccaatatggcacggcgtcaagggctgcgggcaaagaggtttcgccacacgccatatcctgcgccatagtaccaatgaggtacggcttcaagggttgcgggcgaacatgtttcgcccacctacacccttcgccatagtaccaataagggggctacaaagccacccaagcctctgcacacctttcgccacacgccacgcccttccccatagtaccaataaggcacggcgtcaagggctgcggacgaacaggtttcgccaacccacgcccttcgccatagtgccaatatggcacggcgtcaagggctgcgggcaaagaggtttcgccacacgccataccctacgccatagtaccaatgaggtacggcgtcaaggtgtgcgggcgaacaggtttcgcccacccacgcccttcgccatagtaccaatatggtacggcgtcaagggctgcgggcgaacaggtttcgccacacccacgcccttctccatagtaccaataaggtacggcgtcaagggcttgcgggcgaagaggtttcgccaacccacgcccttcgccatagtgccaatatggcacggcgtcaagggctgcgggcgaagaggtttcgccacacgccatacccttcgccatagtaccaatgaggtacagcatcaagggttgcgggtgaacaggtttcgcccacccacgcccttcgccatagtaccaatgaggtttccccaacccacgtccttcgccatagtgccaatatggcacggcgtcaagggttgcgggcaaagaggtttcgccacacgccatatcctgcgccatagtaccaatgaggtacggcttcaagggttgcgggcgaacatgtttcgcccacctacacccttcgccatagtaccaataaggtttcgccaacccacgcccttcgccatagtgccaatatggcacggcgtcaagggctgcaggcaaagaggtttgccacacgccataccctacgccatagtaccaatgaggtacgacgtcaaggggacacatttcgccacacgccacgcccttcgccatagtaccaataaggcacggcatcaaaggctgcggaccaacaggtttcgccaacccacgcccttcgccatagtgccaatatggcacggcgtcaagggctgcgggcgaagaggtttcgccacacgccatacccttcgccatagtaccaatgaggtacggcatcaagggttgcgggtgaacaggtttcgcccacccacgcccttcgccatagtaccaatgagccgcccaagccgctggacacctttcgccacacgcaacgcccttcgccatagtaccaataaggcacaacgtcaagggctgcgggcgaacatgtttcgccaacccacgcccttcgccatagtgccaatatggcacggcgtcaagggctgcgggcgaagaggcttcgccacacgccatacccttcgccatagtaccaatgagcgtcaagggctgcgggcgaacatgtttcgccaacccacgcccttcgccatagtgccaatatggcacggcgtcaagggctggctgcgggcgaacaggtttcgccaacccgccatacccttcgccatcgaaccaatgagggtttcgggcgaagaggtttcgtccacccacgcccttcgccatagtgccaataaggcacggcgtctagggctgcgggcgaacaggtttcgccaaccgacgcccgtcgccatagtgccaatatggcacagcgtcaagggctgcgggcgaagaggttttgccacacgccatacccttcgccatcgaaccaataaggcacggcgtcaagggctacgggcgaacaggtttcgccaacccacgcccttcgccatagtgccaatatggcacggcgtcaagggctgcggcgaagaggtttcgccacacgccataccctttgccatagtgccaatgagggctgcgggtgaacagcttttgccacacgccatgcccttcgccatagtaccaataaggtatggcgccaagggctgcgggcaaacaggtttcgccacacccatgcctttcgccacagtaccagcaaggtacggcgataaggactag

SEQ ID NO: 8589 - DNA, 258 bp, Oryza sativa
  Clone ID: PAT_MRT4530_15084C.1
atgggggtgtcgcacggcgcgggtggtcctgctcatcaactcactgctcgatgtttccatccacactaccccttcatcactggtgaaactcccctgttccctgtcgtcgcagcaagcacacttgtgtgggaaggcaagaagatatgcaagatgaaggcaagggtaatttcatctaagagggtgtttagatccagaggtgttcagacattcgatatgacagggtataaaatttttgtgtgtgaactaaacaggacctaa

SEQ ID NO: 8590 - DNA, 260 bp, Oryza sativa
  Clone ID: PAT_MRT4530_15085C.1
cccgcctacccggtgcagatttcagctaagggtgtggtttcgaaggcattgatctttccaatctttcgtgcgcgcaagagatcagaagcgaggaagcgagagcaactcagacgcggagaagaagaaactaacaccgggaaagaagcgaagaagacggatcggactcgcggcctccttatctatcaggagaaagaacgtggacgcgctgttgcggagggaatcgtgggaacgtgggttagtggctgcaaaaggatagcgac

SEQ ID NO: 8591 - DNA, 456 bp, Oryza sativa
  Clone ID: PAT_MRT4530_15086C.1
cttgttcttctttctcctggctcctgccatgattccaagcttccaactccaagcttcagcagttcctcttaaaaaaaaagctttgcgtgatcgagttaaacgcttgaatcatgcgaaacttgtggcgacgcgaggacacgaacttccagatgggccaaaaaacttgccagttggttgcctggttacattccaagtgtgttgggagttttatttctcgtcggttaggtacgtgtacattgtacagtgtactgagatagttatatatatgcgagcatgctgtttgcaactttgcaaggaaatgtcggttgctacaaagtgttaggcagacgaataggagcctgtgatatgaatgatattgttgatgtagttacatggaactttctgtgatttttcgtcgtcgtactcaaggattgattagtccaaaccaccatgtctttgcttaaaaaaaaaaaaaaa

SEQ ID NO: 8592 - DNA, 750 bp, Oryza sativa
  Clone ID: PAT_MRT4530_15087C.1
atggcggtgctcaccggcaaacggcacggagtgggtttcggcggcgggatccaatggaagaggggtggacggggtggcccgcacgacggcgaacgcgacggcgtcgtcggccggctcggcgcggcggctagcggcgaccggagcggtggcggcggcggcgaagaggagggcgacggcgctagggcgttagagggctcgagagggctcggcgagatggggaaaaagagagaggggtggcggtggtgcttaaatagaggagggggagcccggacgtggccggtagaggcgggaatcgccggccgacgtggggaggtggaggaggagagagaggcgggattcgcatttcgaatcccagccgtctcaggcgcgggcgcgggcgaaagggagggggagtgggtgcgggagacgtggcgcatgcgcgggcgtggccgacatggcctggaggaggcgggaacgtgggcgcggcggcggttgcgtgcactcaacagccaaggagctggaaccggatttatcctgacatctcttacaggagatcagttcaagcacgcaattcacctcaatttccgggcaacaaataacacggccgaatacaaagcgctactcgtagagataaaagcagctgctgcgcttggctcaaagcaactaatcatgaaaggggattccgagctagtcgtgaaccaagtacacaaagactacaagtgctccaacccagagttagccaaatatctcgtcgaagttagaaagctgtaa

SEQ ID NO: 8593 - DNA, 257 bp, Oryza sativa
  Clone ID: PAT_MRT4530_15088C.1
acctcccctccccttggcgacggggacctccggtttggaggaggccggcagcagcaccagcagtagcagtagcagagggcacggtggaggagcaccgacgatagataatagtgcagtagcactcgatggtggcgtcccaattttcttgtttgcctgtgatgttcttactttgtcctgaatttgtttacatatgctgtgtgaaaaatttctgggaagatgaattgatatatttacgtgaaaaaaaaaaaaaaaaaaaa

SEQ ID NO: 8594 - DNA, 874 bp, Oryza sativa
  Clone ID: PAT_MRT4530_15089C.1
atggcagtgacacgggtggcggccgcggtggaccgagtccacggactggggaaaggacggcgcaccacgtggcgctgacgtggcgccgacgcggcggccacacggcagccacgtgggcggccgaacggacagctcatccggtagatcggacggcgagcgtggctcgcggccggcgcgcgcgggcacggctcaagccggcccagcggccatggcgcgcggcggcatggcgcgcgtgcagcggcgacgcaaggcggcgaccggcggtggagggcgacggcgtcgcgacgacgcgggcgacgaagcggcggccaagcagctaagcggcggcgcggcggctagcggcgcgggagagagagagagaggaaggggaggagggatctcaccgacgacgaccgacgacggcgagcgacggaggacggcggcgacggcgggattatctccggaaccacctagcgaacacggtggaaggggttagagagggagagggaattggaagagggcgaggatgccggccgaaggcggcggccatggcgatgctcaccggcgaacggcgcggagtgggttccggcggcgggatccaacggaagaggggtggacggggtggctcgcacgacggcgaacgcggcggcgtcgtcggcgcggctcggcgcggcggctagcggcgaccggagcggtggcggcggcggcgaagaggagggtgacggcgctagggcgttagagggcacgggagggctcggcgagatggggaaaaagagagagggggtggcggtggagcttaaatagaggagggggagcccagacgtggccggtaaaggtgggaatcgccggccgacgtgggggagtgggggaggagagagaggcgggattcgaaatc

SEQ ID NO: 8595 - DNA, 297 bp, Oryza sativa
  Clone ID: PAT_MRT4530_1508C.1
atggcgtcagtgcaggccgccgagatgagtgtcacggggctatttgcctgtccagggtcatccccagctcaaggccacgacactcaaggcttggcgtgcggcgtcgcggaggtgctcccgacgaacaagctggcccaccagggaggccatcgctatgcaaagtggccatctctatgcagaacgacgcgaggcacaccggtgacgggaaagcaatcaccaatggtagggacaaagtgcgtacgagaacggaggctagggcatcgctggattggatttacggatgaaataccgatgtga

SEQ ID NO: 8596 - DNA, 177 bp, Oryza sativa
  Clone ID: PAT_MRT4530_15090C.1
gtaggtgaaggcggcgcaacaggctcagccgcaggcgggcgtcttttactggacccgagagttcctcgacgagacagccaaagaggatcggccggcaaggtgcacgctcacgaacactgctagccacagccaccctgcattagaagcaacggcaagaccaacatgaagaagaggaac

SEQ ID NO: 8597 - DNA, 1041 bp, Oryza sativa
  Clone ID: PAT_MRT4530_15091C.1
cggcgggccggcgcgcgccgggccgcgcggcgcccgcgcccggccccccccccgccgcggcgccggcgcggggcgggccgcggcgcgcgccgcggccggcccgggccggccgcccggccgccggccccggcgcgcccgggcggcgcgccccgccgggggcggccgccgccgcagcgacggcgccccccccccccgcaccaaccagcccggggcgcggccgcacccggcgccggcgccgggcccgccgcccgcccgccagccgcggggcgcccgcgcggccgacccggcgcgagccgcgcgcgcgccgcccggcgcggccgcgcggcgcgcgcgccccccgccccgccccgcgccgcccccccgccgcccgccccgcgccggcggccgcccggcgcgaccgcgcgcgcgccgcgcggccgcgcgcggggggccgggggcccggccgccacccgcccgccccggcgcccgccgcgcgccccggcggccggcggcgcggccgccgccgcccccgcgcggcccccgcccccgcgcgccgcgcccggcgcgggccggccccggcggccgcggcgcccccgcgcgccccgccgcccccccgccccccccgggggggtggcgggatctccgtcccgccattctctgcctcgagcttctcctctgtggacttctcttccatgcgcttctccaccaagctcccagacgtccccacaccaccgacccgggaaagagccatccgccgcatggttccagggtggcaaggaggaggccatgaaggttgggtttgacgatgccgccgacaaggccgactcgatggccatgtacaaggcggggctggtttctcctagagaaaataagattgtcgatcgctctagtgccaagagagaggctctacagagcatcttcgacaacgtgacggagattgagtgcagcgggtcgagctccagcagcagcagaaggaggcgaaggagtggcacatctggagaaggagctatgggtctcctgacgaaaaatccgcgctcagccgatggtgccagatctatgtag

SEQ ID NO: 8598 - DNA, 1447 bp, Oryza sativa
  Clone ID: PAT_MRT4530_15092C.1
gatgggcatcttcgtcttcaccgaccggtcgccttcatcgccgccgattggtgtttctgcctatatggttggttggttataccattgtttatgggcgtctacgtcttcactgtcggccgcctacgccgccgccgactgctgtttctacctataagattggttagttacaccaccgttgatgggtgtctacgtcttcaccgacagcttgccttcgtcgccgtcgactggtgtcctcgcctacacgactggttggtcacactgtcgttgatgcatatctacgtcttcatcactgatttgctttcgtcgccactgattggtgtcttcgcctgcacgactggcctattatgccaccgtggatggccgtcattgtattcacagccagcttgcctttatcgccgccgactggtgccttcgccttcatggttggatggttacaccatcattgatgggcatcctcatcttcacctccagtcgcttcatctgcctccatggctggtcttatctcctgcgcttcaagaatggatcagttagaacatcaccaccggctcgccttcgctgccgccgactgatgtcttcgcctacacggttgattggtcacaccactgttattcggcgtcaacttcttcaccgaccggccgtctcgtccgccgctgactggtgtctccgcctacatggttggttggtcacaccaccgttgttgggcgtcaatgtcttcaccaccggcctgcctttgtcgctgccgataggtgtcttcctctacacggttggttggtcacaccaccattgttgggcatctacatcttcaccgaacagccgcctcgtgcgccgccgactggtgccttcgtctacacggttgggttgtcacactaccgttgttgggcgtctacgtctttaccgaacggccgcctcgtccgccgccaactcttcgcctgcacggttggttggtcacaccatcgttgttgggcgtctacatcttcaccgaacggccgccttgttctccgctgactggagtcttcgcctacatggttggttggtcacagcaccgttgttgggcatctacatcttcaccgaccggccacctcgtccgccgccatctggtgtctctgcctacacggttggttggtcacaccaccgttgttgggcgtctatgtcttcaccgactgactgcctctgccactgccaactgatgtctccgcctacacggttggttggtcacaccgccgtcgataggcgtctatgtcttcgtcgttggctttccctctgccgccgccgtccatggtgtcttcgctttcatggctggcttattatgcctctaccgatgggcgcattcgtcttcactggtgtcattgtctttaccactacccacatcttcgtcaactctgatgagtgacatcatattcatgtttgtcatttcgtctccatgccgactgcgtcagctaccagcaat

SEQ ID NO: 8599 - DNA, 302 bp, Oryza sativa
  Clone ID: PAT_MRT4530_15093C.1
caggaccggaccggaaatcccgggcttcgccacccgcgcctccggccacacgcagccgccggaggagacgggtgcagttcaagaccgaacgcaccaacacccagaaacaaggcaacacgaacaaacgcaacgagaaaacaaaggcgaacacccagcagaacaacacaaagagtcagccaaagaacaaccgctacgaggcaacaccacagagaccggcgacacagagccaacgacccacacagccggccacaacaccaggcgccccaacgcacaggcagagacacaagacggcaagaaggagg

SEQ ID NO: 8600 - DNA, 375 bp, Oryza sativa
  Clone ID: PAT_MRT4530_15094C.1
acctagggtcatttctgctttcacattttgcaaaacatcacccagaaatactcactaaaatcctacaaaacgttaaccaaaaaaactgggggcatccaagggccccggatacaacaagttccgcaggtcgccccccccaacaaaaaacccaagcttgggcatgatggggccaacaaaaaaattccggggtcatcttaaccgggggtgggccccacccggtaaacaaagggtgcatgaccaacaccacccgggggaaaccatttactgtcttaaaaaacccccccagccgaacccagctttttcttgctgagagagaaaacccggggccctccccccgagggctcatcagcacgccctctgacaggccaaaaggcc

SEQ ID NO: 8601 - DNA, 137 bp, Oryza sativa
  Clone ID: PAT_MRT4530_15095C.1
gtacctttcctttttcacgagacagcagcgcccggtgggggacggtgctactttaaattggcgggcgactagagaccgcgctgttaccagtgaggaaaaagctgtgacgccgggaaatcttaggcggttacggggga

SEQ ID NO: 8602 - DNA, 660 bp, Oryza sativa
  Clone ID: PAT_MRT4530_15096C.1
atggtcgtccccaggcgcgtcatcggcaagcgtacgcaggatgcgacggcgaaggcgacgtcactgatcagattcatagatgaggtcatcgtcctcccgacgatagcgtatggccaaggagtttctaatcgacgcgacgatgaaggcctgcgggtgcgacaggcggttgagcggcgattgcaggtcggcggcgggcggtcgccggcttgggcctcctcggtgtgccgggcggcaggcggcggggtccctccagcttcctccaacgacgggcgacggcgacggcctgcgccagcagcgagcgacgacgatggcctgcgccaacggcgggcgacgggctcggcggggctgtccctcgcccgatccggcgacggcggtcgtcctccgcctggatccagcggcgggggtttgaggatcggcgaatggcgggcgagatccgggctggttgtcggcgttggaggcgccacccttgcccccttcctgttgcatcatcctccgctcctcatcgccggatgtgacgaggacctcggcagtgccgacgcggaggtctgcctcaacagatcgagcggcggcatcgacctcgacggcaacgaggcctctccattgtccgcccggccgtccaccttcggcatcagcttcgtcgaacaggaggcggcagcctag

SEQ ID NO: 8603 - DNA, 147 bp, Oryza sativa
  Clone ID: PAT_MRT4530_15097C.1
atggagtcaaacgaggcgtcggagctcgtcaatatgactgctcagcaatcggtgaaggggatggcaactggaggaggagagggatcatctggtgttggcgctgctatgaatgggtgggcgacaaatgaaagtgatgacgacaactag

SEQ ID NO: 8604 - DNA, 267 bp, Oryza sativa
  unsure (1)..(267): unsure at all n locations
  Clone ID: PAT_MRT4530_15098C.1
aaataacaaccatnttgccacgcttctttattacatcacactatttacaacaaanatacttcaccacaaatccacattaaaatatatacancccatnnatnatcacctgggggtgaccacccttctttttcaccttacctcnccaaaataaacttcccnatgttccccatcttcaccatcaccttggcgaaatctgcccccaacaactccnggtttgccgcttactacctcaccagcccttccttcgaccctccatttaacaacacc

SEQ ID NO: 8605 - DNA, 1067 bp, Oryza sativa
  Clone ID: PAT_MRT4530_15099C.1
gactcctatagggcgaaatccggccgggagctaaccgttatcatcgtcaggtcaggcacttcaccaaccctctgcctcccttccgccgccctccgccgccgcatgcaagccatcctcgccgctgccatggccgcccagaccctcttgttctccgccaccgcccctcccgcctcccttttccagtccccttcctctgcccgccctttccactcgctccgcctcgccgccggccccgcgggcgccgccgctgccagggcgctcgtcgtcgccgacgccaccaagaaggccgtcgccgtgctcaagggcacctcccaggttgagggagtcgtcaccctcacccaggatgaccaaggtcctacaacagtgaatgtccgtgtgacgggacttactcctggacttcacggcttccacctccacgagtttggcgatactacgaatgggtgcatatcaacaggaccacattttaacccaaacaatttgacgcacggtgcaccagaagatgaagtccgtcatgcgggtgacctgggaaacattgttgccaatgctgaaggtgtagctgaggcaaccattgttgataagcagattcctctgagtggcccaaattctgttgttgggagagcattcgttgttcatgagcttgaagatgatttggggaagggtggccatgagcttagtctcagtactggaaatgctggtgggcgacttgcatgcggtgttgttgggctgaccccgttgtaggtcgctgcaagttgcagctgaagtgtcagtatcgcatccatgtcaccctttttgtcatcttcgagcctgaggcagtcgttcttgtatcacatggatttcgcaacatggatgcttaatagtatctgttgatcgttcgtctcacagtaataaaatttagttgagcaaataagtgtcgtcacatcccctgttctccaccctgtcaaactataaattgtgaaacatgagctgttctgggtatacaacgcataaaaaaaaccatgtgttatacataaaagccttgttgctggctgtactttcgtgcttcgatctaaaaaaaaaaaaaaaaaaaa

SEQ ID NO: 8606 - DNA, 867 bp, Oryza sativa
  Clone ID: PAT_MRT4530_1509C.1
tcatggcaagtcgcggttgaacaaggcgaagaggtcaacggtttgccgaacctgatacttccctttgaccaggccgaagccgaagcccgcaggatgatcggcgatgtttcggtcgtcgagcaaccttactgagccgaagatgcagtctcttcgccagaaggctagcagggccgaagcgagcgccgcggaggagtcgcggcggttttcgcgggagatggcgaagaccaccgaatctgcgagaacggcttgccaaacactccgcctcgcccttaccgacatgggcgcgaaggtgcgcggggtccctaccgaggatgcctcagccttcgacttctcggagtagacccagcaggccggtggatcggtttcggactgcgccaccgcgtacggcgactgctgtgcgcgcgtgtcagcggcctttaccatgggcctcctgcagcagttcggctgcgagcacatcgttaagttccccaagtacacgaagggggattgggaaatcagtacgcaagacatttcgcctgcacttcgtgcgtggcgaaaacaattttggcagaaggacggccgctccgccgctaaggcgcgccttttggagcagctggcgaaagcagaggcggcggacctttgtgaagaggaagacgtggcggccggagggggtggaggcgatgcccaggaccacccagaggtgtgaggccctccgcccttctcttagtttttcatagttttcttttggtgctcgctagatgtggcgaaccattgtatattcggcaaactgccactaaaccttaaaaaaggctttttggtatatttggaatgtatgacacaatcttaattactttttgatgatctaagtctttggcataattttatttc

SEQ ID NO: 8607 - DNA, 243 bp, Oryza sativa
  Clone ID: PAT_MRT4530_150C.1
gaactatttattctccggtgcgctcccatccgccgggggggcactatagagcttcaaggcggagaacaaccagttctccggagcactaccggatgacatgtcgaggctcgccaacctcaccgagctgatcctcgctggcaaccggctatccggctcgatttcgtcgcctatcacatcattgactatgccgaccccactcaaccttagtagaaacccgatttccgccgagaacctctccttcct

SEQ ID NO: 8608 - DNA, 1739 bp, Oryza sativa
  Clone ID: PAT_MRT4530_15100C.1
actagttctagatcgcgagcggggacgctgtttttttttttccttttttttttttttttttttttttacaaaaatacacaatagcatatcttctgttgcaatgaaatacatgtacataagatctcataagatcccagcaaaagaaagaaaagaaacaagttgagggaaaaatggtgctttcatgtccacctcaactcaagaaaaaagggaaaacacttgggtcatcatatatatatttacaacaatgagaatggctgaacaatggtacaacatcaaaagaataatatactacctaccttctttctttccttcctttaagaaaataagaacaatgcctatctactcgcccctagaggtataaccggtgatcaagctcaacaaataaacagaatggtacacttccctggaggactctggaggatggtcagaccccttggagagtcatgagtcacaaggagaatatggtaagggcgatattgtctcacatcttacgcctccttgcagtggtatcataacgactgccgtcgtctagcttggctgagtgatgaaatcatctagcaatattagaaccaaaaggtctccccttgatcaatccactgaacaaaatgctccgataacccctgagcctgaatctctgcagcatgatcttccgttctcctagaggatacaccagcagaaacactatcggctgaagcattcacatcaggagtacttatggttgttggcctttcgttgtctgaagatgaaagccagtcaatgtccaggaaatttgaatcaccagaaccattgcagtaatcaagctcacagcttacatgcttaacatgaggttccgtgggagtataccttgattttgacactgtaactgtattatcaggtgctgatgaaatttcgtttattgcatcagaagaacttgcattctcaccaaggacaccctccccagcaacaggttctaactcccaaagtgcaggttcaccttcacatggctggaagtatcctaaaaataagtttattgctgcttgtttgtaagcatccatatatgcattactgtagtatctttgcagtgtcctgaagaactcttgcgactggatagcgaactttaagtgtcctctctttgcagagaatatcttgttatgagcagctgaaccgccatactgtacagcaagtgtgtcacccatccgctcataaaaatgcatcaaatggtgagccaagggggagtccaaatcaagttcaggggattctatagaaccaagtgcatgcaactgatgtccaagagcagctaaaccatacgcatactgagcaacatttgtacggtccaaacagtctatacagttcgtacgtaggacacccttttgaaattttggaggctttactgatatagatccattgccctcggctatatcttctgcagttccattaccagaagtatcagaactgccacaagtatcttcttgggacatatcatcaatattatcgatacagtctgtgatatcatcattgttgctgtcatcacattcatgaggaccaaaaccattcttcctataaagcccatagtgaaaataaggaaaggcacagaagaaaatgctgcctttgtataaatagcccatcaggtaaaaatacttcctccgtttcacaatgtaagtcattctagcatttcccacattcggaggggggatttggaccgggtggccctttaagtcccggccctccttgtctgcagtcccgtggcgggtccccctcat

SEQ ID NO: 8609 - DNA, 1156 bp, Oryza sativa
  Clone ID: PAT_MRT4530_15101C.1
atggttttagctgacattaggcggcggagccgcgagatcgacctcctccccgacgacatcgtctccgacctccgtgcctctgcttgcgtggccgtctactctcttggcctctccatcctaaggaagaagaagaagcagaagagaagaatattccagtcaggcacttcaccaaccctctgcctcccttccgccgccctccgccgccgcatgcaagccatcctcgccgctgccatggccgcccagaccctcttgttctccgccaccgcccctcccgcctcccttttccagtccccttcctctgcccgccctttccactcgctccgcctcgccgccggccccgcgggcgccgccgctgccagggcgctcgtcgtcgccgacgccaccaagaaggccgtcgccgtgctcaagggcacctcccaggttgagggagtcgtcaccctcacccaggatgaccaaggtcctacaacagtgaatgtccgtgtgacggggacttactcctggacttcacggcttccacctccacgagtttggcgatactacgaatgggtgcatatcaacaggaccacattttaacccaaacaatttgacgcacggtgcaccagaagatgaagtccgtcatgcgggtgacctgggaaacattgttgccaatgctgaaggtgtagctgaggcaaccattgttgataagcagattcctctgagtggcccaaattctgttgttgggagagcattcgttgttcatgagcttgaagatgatttggggaagggtggccatgagcttagtctcagtactggaaatgctggtgggcgacttgcatgcggtatgttctctgaatcatatttctgttccataaatgttcttgtaacgtgttgttgggctgaccccgttgtaggtcgctgcaagttgcagctgaagtgtcagtatcgcatccatgtcaccctttttgtcatcttcgagcctgaggcagtcgttcttagatggtggcggtggaagtgccgccagatccacgcctggatctggcggggaggcgaccggcggtggggcctgctggtggcggcggcgacggcgacgcccggtggagcagaggtgggcgaggtccgactccgtgacggccggatccggctggacgacgacagacggcggtgggtgcatccttag

SEQ ID NO: 8610 - DNA, 174 bp, Oryza sativa
  Clone ID: PAT_MRT4530_15102C.1
aggtgctgcccggcgacccgaaacatcgccttcgcctcaactgctgtcgaccaccgttcgccacccatcgccatcaaccgccatggtgccgtcgtcttcctccatggtgtgtcaccaatctatgggctgggatgcgagagcgggatgatgggacgtgaggtgaggtgggcctaa

SEQ ID NO: 8611 - DNA, 1152 bp, Oryza sativa
  Clone ID: PAT_MRT4530_15103C.1
atggggtcggtgtccctcaacgtgccggcaccccgccgcggcggcggccggcgcatctcctgccactgcacaccgtcgctgctcaacctgctcatgttcctcgccctcctctccaccaacgccctcgccctcctcgccttcttctcctcctcctcctcctcctcctcctcccccgccgcctccgccgccaccgcggcggcctcgacgatctccgaccacgtcgcggccatcgcccgcgagatcgacacctcctcctcctcccacctgccgtaccgcgcggacggcctgccaccggagctcctcctcttcctctccccgcacgcgctcccgctgggccgcgacgcccgcacggggctcacccacatgccggcctccgtcgcgcactcctgcttcaggtcgcccgccacgctctccctcctagccgccttcatgtcctacgacccgcacgccgcctgcccgcgcaacgccaccctgcagcagcaccgcctcctctccaaggcctgcgagccgctgcctcgccgccgctgcctctccggggggccccgcgcggcgctcccggcctccaacatgggcgtcgacggccgccgctgggtcaggccgcgccacgactacgagttcctcctcgacgacgtgctgcgcctcggcgccaccaggatccggattggcctcgacgtcgccggcggcgccgccaatttcgccgcgcggatgagggaccgcggtgtcaccgtcgtcaccacggtgctcgacaacgccgggaagcccatgaacgagttcgtggcggcgagggggctgttccccctcctcctctcgccggcgcaccggttccccttctacgacggggtgttcgacctggtgcacgtcggcaccaatgcgctggacgaaggtggcgcgccatcaatggggaattccggcacggaggaggcgctggaattcttcatgttcgatgtcgaccgcgtgctccgcgtcggcgggctgctctggattgatagctacctgtgccagagtgaggagaggaggcaattggttgtgaatctcattaagagatttggctacaagaagctcaagtggatggtcggagagaaagccggcacggggagcgcaaagacggcattgtacctctcggcattgttgcaaaagccggcgagggattga

SEQ ID NO: 8612 - DNA, 855 bp, Oryza sativa
  unsure (1)..(855): unsure at all n locations
  Clone ID: PAT_MRT4530_15104C.1
gcctcccccctttcgtgaacnaggagnccgtttttacctgacnaccaggtnccntncaccactgcgtgttgtttttgttgttgttgtgtttntcttctactttntctncctgttggtgtntcttcgctgcgtncncgccattncaccacaccattccnccttatngtgtncaccacaccacacgcccccaccccaccccatncattggngtggntttnctgttcttcaacttgagccatgtccactatgccagtgtctcttgcctnctncttaactccggtgattcttcntnatggtcctttncttcgtncactccccagccaccaccgccatagcctncaccaccgcaccttccaggtctcgcttttggatgcgatcaccattactngtngtgtttgtgcntntnattgccaccaccatnttttgggtcatttntagctcccttggctttgagagctgtggcggaacaggcnaaaacagagctggaagtagagtatgcgctatnagcccggtggcggttaacagtcgtntnaccggcttgacgagttggggttacctactgaatttgggtgtggcgncagtgcacatggtcgncaattgagggcctacgctggtggcccaccgccgcctaggacgtaaatatgatgatgatgatatgaagggggtgacgcctttgtggtgnctagtgcaggcctgggatggggtgatggtagatgtgcaccaatggtgatattagggggttgggttacgacagtcggtgcgccgaagacatgatggcggtagtggccggatagcggggctgtgattggtgtagcggtataaggccgtggcgttccaattaatcgaggcgtggaa

SEQ ID NO: 8613 - DNA, 229 bp, Oryza sativa
  Clone ID: PAT_MRT4530_15105C.1
tgcacacaggggtgtaactatgcgttctaggctcgtggatgacttgaacgtgaaacacgtcgcagaggactacggtatcaaggccacacaaagcacagcactctggtatgcctccggccggtccgatcgaacgctccgggttggcgtacatacgacatcgacctcctgctggatcacgtatggggacgcccacccgacgaccatgggacgcacagatcactcaagatga

SEQ ID NO: 8614 - DNA, 633 bp, Oryza sativa
  Clone ID: PAT_MRT4530_15106C.1
ctccgccgcctgacgaccaaaccccacctcggagcccccgccgccgacgagccacagacgaagatggcggaggtgaacccgaaggcgtacccgctcgccgactcgcagctggcgcaggcgatccaggagctcgtaaggcaggccggcaactacaagcagctcaagacgggcgccaaccaagcgacgaaggagggggggcagagggatcgcggagttcgtggtgatggcggccgacgccgagcctctcgagatccttttgcaggcttgccctgctcgccgaggacaagagtgtgccatacgtgttggtgccataaaagcagggtctgggccgtgcgtgtgaggcgacgaggcccgcgatcgcctgctcggtgtcctcatgtgctgctaggtgctcgagtgctccaatgcttcgctctgggaggttgtggagacgctcgtatggtgtaccgtgacgcggtcatgcgggtgtccgccatcgtggttcacgtgtgcaggctctaaaagggcgccttctgcccggtctggggctggttttgtctggcggcgtggacccgctggccgcaggtcctcttttgttttctggcggcagtcccccccacgaggctggccttggccggtggccggagcttggcc

SEQ ID NO: 8615 - DNA, 2123 bp, Oryza sativa
  Clone ID: PAT_MRT4530_15107C.1
atgtcgcacttagagggagataaagagttggatgaaaatggtgatggatcaactagcaagggaacgtctacacctaagggagcctctatttcttttgattacaacaaacttaccattccctctcataactttgtctccgtgccttccctgcgttctcctcaatttgatgggacatattacgccgcttggaagcacaagatgaagttgcgtacatctaatctctttgcaccctagcatttggaaagttgtgtgcacatgtgttgatgttccaaatgaagacatggagtttaccacggagcaagagaaagcaatacacctcaatgcacaagccgccaatgccattctctctgccttgagtccggaagagttcaacaaagttgatggacttgaggaagccatggaaatttgggatactttgcaattggctcatgagggttcacccgccgtgcgtgagtccaagattgagttgttggagggaagagttggacggttcgtcatggatgacaaggagacccctcaagaaatgtatgataggatgatgctccttgtcaacaagattagaggacttgggagtgaagatatgacaaatcattttgttaagagactccttcgtgtctttgttccaagaaatcccatacttgtgtcaatgatccgtgagagaaaggactacaagaggctttctccaagtgatatacttggacggatcgtgtcaaatgagatgcttgaagaagaagctcgtgaattgaagcaaatggtcaagaatgccgccatgatcaagaaccaagagataggtttgaaggccaatcaagaagaaatggccctaatcgtcaatagattcaagcacttccttcgcaagagtggatatgggaaaggaagaaaggaagatgacaagggcaagaggcaatccaagcgagcatgcttcaaatgtggcgagtatggccattttatcgcggattgccccaagaccaatgaagcaaagcacaaggtggtcaagaagaagcctgatcgtgctcatgttgcggaggcacacatggcggaagtgtggtactccggagatgaaggctctcccaaggctatggagaagggagatggagatggtggcgtggctactgtcgccatcaagtcctcatcaacaaaggagcgcctcttcaacatcttgagtgacgacgacaacgactcctaccaccactcgtgcttcatggaccatgggcgcaaggtaatgcctatccaaaagccctctcttgatgatgataacactagtgatgaggatagtgacaatgaacttgattagatgtttaagaattttagcaaaccggccatgaaacaattgtcaaaattaatgaaagctttggatagtaaagagagatttcttgagaggcaagaagacttgcttattctagaaaagaaaaaaaaaccttgccttagaagaagatctagctaaggagggtgagaggattgaattactacaatatgagatttctttgcttaatgattccatggctagtttgacgagtgtgaacgaaactcttcaagaggaacttgtggttttggataaaaaaccatataaatcttgaagtggaaattgacactcttcggaatagcgcatcctctctaaatgaaactcctatgacacctatgccttctattagtgttggttgtgctagatgctataattatgatttgagttcatatgctactaaccttgaagctatggaggcccttgaaaagaaaaatgagaggttaggtactttggtaaagtatggatgcatgaagacataccactccaaagacgctctctacaagaccattgctacaaatccaaacaaagatggacatgagcttggtttttctgatgaaagtcctgtgtccaaacgtgttgtggtgaatgggaagattttcttgatgtttgtaagagaaggaaaggctccacaagaaagtgaggtgactctaccctttgttggtcagagacccggagcttccggacaaaatgtccagaacttcctggcacctgtcaggatcatcgtcctcctcgcgccgggcttagctgggccatggccttcggccggcccagcaagggcacgggagggagaaggaaatgggccggcggcccattagggaaaaaa

SEQ ID NO: 8616 - DNA, 747 bp, Oryza sativa
  unsure (1)..(747): unsure at all n locations
  Clone ID: PAT_MRT4530_15108C.1
atcttctgaatgttatatttttgggacgggagtagattttatataagtaattactaataacatgcttgtactaatgaccatgtcattgtctaaaaaatcacttatttgtgactggaaggagtagtttgattgtacatcaatgataactgaataatcatatatatgtccttacgttttgcagtttgtccaggcaattttttttttattttttaaaaacaatattttaaaattagacatggcatacattcagtgtacagtaaaatttcacataataatttggttgaatttttatgtattttgtaagtaaatttttttgttaagagatgataataatttagtctacacatgcaaatctcaaatatatttttgcactgccctaaaaaatatatatatatatatattttgaactcaattaattaacatttttccaatctaccactaaatgaataccatgttgaagttcaactacaaatcatttatgcatgcatgtatgtatgtctgtttacatatttcaataaagcaattgttgatgctgatcttcatattaatgtgtagcacctagtttaacatagatatgattcgctaaatctgaactatgattntagttcttaatatatttatttggtaattacaaggtaattacaacaatattatatactctttatgaanttaacttttttttcaaatttatcttaacatttatgtttaaaccaacatncacgattacttgctagtactaaattaatt

SEQ ID NO: 8617 - DNA, 1281 bp, Oryza sativa
  unsure (1)..(1281): unsure at all n locations
  Clone ID: PAT_MRT4530_15109C.1
atatctgcagattttttccgtcctttttgggcccaagttttttgtggtttcgaggccggcccgggaaaacttgatcgaatccacactcactgcgtcaccacatcagtctaaagcaaataaaaaaaaaaaaaaaaaaaaaaaccggcattgcatctcaacagagcaacacaaactcacacattgccaattccctttcttggtttgattctggctgctgcaatggcttcgtcgctggccctggtagctctgctcctcgtgagctgcgccgtggtggcggcggcggcgaccaagtacaccgtcggcgacacgtccggctgggcgatgggggcggattacaccacctgggccagcgacaagaaattcaaaatgggcgataccctcgtgttcaactacgccggtggggcgcactcggtggatgaggtgagcgcagcggactacgctgcgtgcaccgctagcaacgcgctccagagcgacagcagcggcacgaccaccgtcaccctcaagaccgccggcaagcactacttcatctgcggcatcgccggccactgcagcaacggcatgaagctcgtcgtggacgttgccgcggcctctccagccccagccccaaaagccccgtccaccacaccgacgactccatctacgacaccagcgacaccggcgtcccctggcacaagctccggtctgacgcccacaaccccagcaacggtgctcgcgccgcccgccaagcagtccgccggtgcagctgggctcagggccaggtcatgggctatgctgggcctggcaggacttgccgccgtgcaactgggcctcttctagggccaaggccagggtggaggcagtgctgttaggttgcatgtcatttagacatcgacacacaccgtgtcaagtgtttgttcaggaagtgagttgaggtttcttttcacagagggaactggtgcttttgttgtggtgagctggcagtagttggatgctgtgtttgaattgacttcctgttaatttgttgtcctatctatgtcatggatttttagcctcacctgtgtatgttgggattcattccaatctggttatgatctaggtgcatatggtgcggtgtgtgaactgcaaatgtcctttgctgtgatgacaaaaaaaaaaaacttacagcaaaataaccctacttggcgtgccttgcaacccaacatacggagccggaagcataaagtgtaaagccttggggtgcctaatgagtgagctaactcacattaattgcgtttgcgntcaattgcccgctttccagtcggg

SEQ ID NO: 8618 - DNA, 561 bp, Oryza sativa
  Clone ID: PAT_MRT4530_1510C.1
atggagttggccaatactttgtacaggcacctgacctgcgaaattagacgaggagagattaagatgggtgagcttactaagccgctcgaacccggcggatgggaggttagcttgaaaagcaccggatcgaggctgttgctctccaagccacagtcgcccaaatcaagccatatcacacggccgtcggcatcgccgcagctaaccccctcccaccggcagcaatccttgccggcgttccatgatcggaaggcggccgtggagtcgtcggtgatggtgaaggatcgtttcaactggagcaacgccgatgcttggtccggcaagcatgggaccgccggcggcagggctccggtgtggttggtgtacgtagctgatgatgaagaggggatgaggaggtggaggaggagggacagcatgagcaacatttttgtctgggagatcgatcggtcgaaccgccgaaaatgcctgtcgccgactcctgtagccgtcggtctgaccgccgtgtgcccgccggtcggaccaccgagatgccgccggtctgaccgccggtgcgccgccggttag

SEQ ID NO: 8619 - DNA, 414 bp, Oryza sativa
  Clone ID: PAT_MRT4530_15110C.1
atggcttccacggttgtcgctcccatccttgcccttagcctcctcctcttcgccgtcattgtgcgcggctgcacaccaaactgctccggcgagcaggtcgtcccgacgccacccactgcagtgccgacgccattgcaccacggcgggcatggtgagcacgggcgttgcccgatcaacgccctgaagctgagagtgtgcgctaatgtgctcaacaggctggtcgatgtgaagatcgggcatggccccgatgattgctgctcgctgctgtctggaatcgccgatctcgatgccgccgtctgcctctgcactgccgtgaaggccaacgtccttggcattagggtcaaccttcccgtcgatctcagcctaatcctcaacaagtgtggcaagtcctgcccgtctgacttcacctgctga

SEQ ID NO: 8620 - DNA, 630 bp, Oryza sativa
  Clone ID: PAT_MRT4530_15111C.1
gacggcgtcgcgtcgctcgccacgacggacatgcagcacctgcacggcgacgtgctcgagtcggcggtggagcgcgtgccggcgcccgatctcgccgccgcggcgctggtgtcacgggagtggctccgcgcggtgcgcgccgcgctgcgacggcgcatgctgcggctgccgtggctcgtcgtccacgtgatccatctccggggccagcggcgcctcgccgcggcttacgacccgcgctccggggcgtggctcgccgtgcccacggcgccaccggcgcgccacggcgcgacgtcgccgccgcagccgcactcgcacgtccgcctgatgcggggcgcgagcggggaccgcgtctgcgcgctctcgctctccgggctcgccgtggcgcgggacgctctcgggatggacgacgacgcgctcgtcgtcgcgctcaaggcccccggcgtgtggcgcgtcgatccggtgctcgccgcggtgggtgaccgcgtggtcgccatgggcggcgcgtgccggctggcgctgggtgacggggaggacacctcggccgtcgaggtccacgagcgcggcggctggacgcactgcggcgcggtggcgaccgcgctccgggagtccgcggcggcggcagcgacgtgg

SEQ ID NO: 8621 - DNA, 252 bp, Oryza sativa
  Clone ID: PAT_MRT4530_15112C.1
atgtctttcgtgattagtctcacccttctcaccatagtaaatgatgctataattggtaataatttgattagctcctggtttggaatggtatattcctggtttggagatagaactgtgcagctgggatggttgtacataatggttgggcctatacaacagggtatgttgtatagcgttggattaatattgtttaattaatactcaactgttttattaaattctgaaaagtttgttaaatgctgtttttgcaaa

SEQ ID NO: 8622 - DNA, 2466 bp, Oryza sativa
  Clone ID: PAT_MRT4530_15113C.1
atgtctgttcctgacgaaaacccgattgcggtggagaggaagatattctcagctgtggatcgcatcctggtgaacataaaagtcctaataggtgacatcgggagcaatctgaaaaagctccccaaacagagcgaccactcctgcaacaccggcgatgatgagtttgacgacgccgtggcgctgcggcacatcgaggtcaacatccatgccgaacagctcggcgccggagtcaaccgttttcaggacagcatcggcacgaagcaccatgccgaggaggagtcgatgccctcattggcggagcaagaagacgagcccgcgcgccccatgtctggattgcacgtcaggcgcctgcttgacaccctcgacgggcagctgatgcagtgcctcctctgccttgccatcttcccgccaggcgaggccatcaagaagaggcttctcatccactggtggctcggggaggggatagtccaatcggcagacgcagggaaggagcgcttcaacgagctgttcgatcgcggcctcgttcagcccgcgctacgccgaggccactgccgacgtttttgggtcatggcaaaggcaacgtcgacgaataatgccttcctgtcagtattcaatctcgacatggagtacgtgaagattcatatcgcaaaatcgagaatcaccagagtcgtgcagcttgggcggtggaagaggtcaaggaagcaccacatcgagctggtgggagacaacgacctactcaaaaaagttttggcgtgcaagaacctgaggtacctcagcctcaggggcatctccctcatcgagtccatacccgaggccatcggcacgcttgccgaactcctcgtgctcgacctcagggcgtgccacaacttggagaagttaccggggtctatcggctcgttgctgaagctagagtacctggacttgtccgaatgcttcttacttgaagaaatgcccaaagagatcggcgagctgtccaagctgcaggtcctcaagggttttctcgttggcagttcaagaaagaagagcagcccatgccgtctcgccgacctggccacaaaggcgcagaatctacggaagctaaacattaccactggacggcaatctttggtgtgtgatgaagatgagctctgccaattggcgaaatgccagcatcttgagtccttgacaataacttggataggagaggcatctaccgagccatatcttcctcttccttccagcctcacaaagcttgatctccggcgtgcccctaccgcaagccttcttaatatcattcatccatcgacgtcggtgagcctgaaacggctgtatattaggggagggaagctccgtacactggggcaagacggcggctggaacgttgagacactgcgtgctagatgtctcaatgatttggagtgtgagtggagtgagctccatggtttgttccgagaactccgttttgtggagatgtggaggtgtgcccgccttagtttctggccttgcgatgggcggggcgtatgggacaaaggatctccttctctggctcgccgatccattggagtctgctacggagtgaaaggcaacaatctgccaccatggcatgaagtcgttcagctatatgcctcgaacaacattcctgccatgaggatattctatcctcaccacgatgttcttgaggctctgagaggcacaggcatcggtatcagcctcgacgttgagggccaattcctcccatccttcgcctctgaaccctccgttgcggctgcctgggtgaagaccaatgtgcaagccttttaccctgcagtctcattcaagttcatcacagtcggcaaccaggttgccctgagagagatgagatacatcctcccagcgatgcagaatatctatgcagcgttgtcagcagtagggctggatcacatcaaggtgtcaacgtcggtgagaagggacgtgctgggtttgtcctatcctccctctgctggtgctttctcctcagcgatggaacagtacatggcacctattgtgcagttcttggccaagattggggctccacttctggccagtgtgttcccttactttacttacgtgcacaatcaggaaggcattgatatcgattacgcccttttcacctccccgggaactgtggtgcaggacggtgaacatagctatcagaacctcttcgatgccattgtggatgctctgtattcggcgatggagaaggtgggtggctcaaccgtcagaatagttgtctcagatagcggctggccatcggctggggctcctgcagcgaccaaagataatgctagggcctacgtccagaacctgattaaccatgtgagcaaagggacacccaagaggcccgtacctatagagacatacatttttgccatgttcaatgagaacgagaaaaccggtgacgagatagagaggaactttgggctctttgaacctgacaagagccctgtgtacccaatcaccttctcttaa

SEQ ID NO: 8623 - DNA, 2285 bp, Oryza sativa
  Clone ID: PAT_MRT4530_15114C.1
atggcgaaggaggaggacggcggcggcggcccggagttcgtgaggtggagggaggacttcgtgtcgcaggagaggggcagccgcgtcgtgcattactacctcgaggacgccgcgggcgcgtcgcacctcgccgtcgtcggcacggagcggagcctgcgccacatgctctatgtggtctcggaggatttccgggaggcgcagggtgccgatggcggcgggccgggggtgtttgcgcgcaagtggcggtcacgccgtgaggtggtggattggctcgcctccttccttccggcgaagtccctcgcctcgaaactttcaaaatttggatcacatatgggtaatgacattggattggatggatacagtgaacctgatagctttatgggtcacaatctggggaaagcctgtagctcggacattatgtggtctggttcgtcctggacttgtggcaagcagctttaccactataaagctttttgtcgtaatggtaccacaatatctacccactcttttgtgcttgtcatgtctgaggaggaaagtcgctatcttgcatacttggaagatatgtacgaagataagaaggggcagaagaaggttaaagtgcgatggtttcatcaaaaccaggaatttgcttgcgctatacctcctccccctcctcatccttgcgaagttttcatcactccttattctcaagtaatcagtgtggagtgtgtcgatgatattgcaactgtgttaactcctgagcactatgaaaaatgcgtcaatacattgccaaattcttctatggtgggaatccgtttctgctttcgccaatacagtaaaaataagtttaaacgttttgacctgagatcattgcgtggatattttagtcaagctgttgttttgtccttaaaacttcccccagagcaagaaaaggatgatggttctgatatcataaaaacttttgagcaatggacacctgggaagacaaagtttcctaagcagtttgagaggctttactcaaaatgtttgggaactaaaatctgccgaggcccacaagaagactccatagcatcttatcagaaaccaagcagtaagcaatctcccagaaaacatctctcagtcaagttcatagggccccagaatcagcgtatgccaacctacaatgttggtgacagaatagaggtcttgtctcaggacagtgggattgtaggctgctggttcaggtgtacagttctcaagtcatgtactaatcataacaaattgaaggttcagtatgatgatctccagaatgctgatgatagtgggagattggaggagtgggtacctgtatcaacattggctcgtcctgataaactgggattgagatgcccagagcgacgcagagttaggccacgccctcaacaaaatagtttggctgacggaactaatcttttacctggagctgctgttgatgtatggcaatttagtggctggtgggaaggagttctagtcagtgcagacaacatttcagctgatagcctacaaatatattttccaggcgagaacttctttagtgtatgccagctaaagaatttaagaatttcgaaagattgggtcaagagccactgggttgatatagaaatgaaaccagatgtgttatcgaaaataccttcggttggtgttcaaacaaggcaacctgataatctgacatctgttgagaggccggactccagaaattctgcaatgtctgaccaagagcttgcagccatacaaacaaactctagtgaagataaacaaacaggagctgatcagccagcagaagttagtttgactgatatggcctctgcttttgcagaggaccagaaacaaacagttctaggaaagcgacctagggatgatgatgctgaacaacattgcaatggggaagtaggcatagatgttggcaaattgtgaagtttgggaagcgcaacctcattagacgtatgtacatagctatagatatggtaattggaccccagcagaggggttttttactaggttgctgatatcagtgagcatcgacatcttttttcatacacgtgttcccttgttttactgttagcttcccactttcaggctttctgtcaccagatacagaggttgcaaactaaatattacccttaccagtcatattgtatagcagtctgattgatcattgcttctcttatgttttcctccggagtctggactatagtttcagtttattctcaattgttaatatagtttaagttcatatgaaaaaaaaaaaaaaactaccctgctggtgctaaaaaaaaaaaaaaaaaaaa

SEQ ID NO: 8624 - DNA, 1692 bp, Oryza sativa
  Clone ID: PAT_MRT4530_15115C.1
atgatccatccccttgctgtttctctctcaactgcttcacactgttgctctcttccctctctgcacctgcaaccaccaccacaaccatataccagtaccatcgaggaggttgccttctcttccggttacttttttgggggtgatgtttcgatttgcaaatcagaacaagattacttaaggagctcagcagttgctgatgttttatcttgtgcatatgcagtgctgctaagctcaattggaagtggaagatcttggtcacgcggcatcagcatagtccgtgatgttagggacagcttcgggagcttatcaagacggagtttcgaggtgagaatttcaggcctccctggtctttctggccatcacagagggaagtcccttggatctttgagcgagctgcgtgacagacctgtagtagtagatcaaagcagatgggttggtcttcctcctgaattactccgtgatgtgatgaaaagactggaggaaggagagagcaattggccgtcccgcaaagatgttgttgcctgtgcagcagtctgccgaacatggagagagatatgtaaggatatagtgcaaagcccggaaatctgtggaaagctcacttttcctgtgtctctaaaacagcctgggcctcgagatggtttaatccagtgttttatcaaaagggacaaatcaaaattaacttattatctctacctgtgtcttagccctgctgtgctcagcgagaatggaaaattccttcttgcagctaagaggaatcgtcgggcaacttctacggaatacataatttctgtggattctaaaaacatctcacggtcaagtaattaactttggggttctgttcaagaatttccacctgatagctgacttgcggtcttctgaatcttccccccgttcggagcagcagcactcatgtcataacccatgcttcgagttcttatttggcatacgatcatggcaaggtgatcctgcactttgagtaaggttgttcaagaacagtgttcaccgattaggactaccggtaccctgtgtcagacatttcaggaatttagccagtactgtttgacaacgccttcagatactcctgaacgtgtctttgctgaataaccagtgacacttcacgcacgtcctttcgaggagtcttttcgcagtacatacacctcctccaggttctctttgatgtagggatcttaggacttcaccagctcccgcttctcttaaatcagtggagccgagaaccaccagggcgaggatgatatacctgaatttagttggtgctcgttctttcttggtgtggacatgactggtggaactgaagaatggccaacacgattcctcaagtgccgaggttgtttgactgtctcactagccattatattatacatgtaagtatttggagcttggaagtggaccaacctccagcagcagcagcagcagcagcagcaaaaccatgcttcgagttcttcttcggcatccgatcatggcaaggtgatcctgcagtttggtaaggttggcaaggacatgttcaccatggactaccgatgtgaacaaagaatggcaacacatctcaagtgcagttgtttgctgctactacatttatatcatgatcatagctgctatatgagagaagctacactgctacagcctgcatatgtgcttgaaggagccacttggaaaggaggcaatatcagttga

SEQ ID NO: 8625 - DNA, 309 bp, Oryza sativa
  Clone ID: PAT_MRT4530_15116C.1
atggacttgtacgtcccttccgtctacgcctggaacaccgacgccagtggtgcggaggcgccttccaacgacaagatcaagaacagcctcgccgccgtgcttgccaggtttcctcaccttgccgggaggttcttcggcgttgacgagcacggccggaggtacttcgacctcaacgacgctggggctctcgtcctcgaagccacagcgtccgccagccttgccgacgctttgtcgcacgacgtccccgcgcacgtcaacgagctctaccccaaggccgacaaggtagtttaccaaaatggcaacaagtag

SEQ ID NO: 8626 - DNA, 3163 bp, Oryza sativa
  Clone ID: PAT_MRT4530_15117C.1
atgggcagcggcgacggaggctttatcatactcagcctaaattgcttgccgtcgcttggaatcctcttcaccccttgcatacccgtcaatgatgcgaagcaggtgttcaagcgtctgcggctctttgttggcgatttttcttccaaataccctcttaaccaaacaagtgaattagcacaagggagacatggggaaattacaggggattggattgggccgctccaaaacccagactccgggcggctccgtcacaagccacgccgccgccgccgcattgccctgcagctccgctcccccggtctccgcgcgtccgccccgacgctccgctggcccttccctcgcttgctcgacgccattgccttccggccactgccttgtgccttggcctgttgcggctcgtcggcgccctccgtcgtccgccacctccgtgcctgcggctccgacgtattcttcttgcgcgcggacgcctggaggacagtgtttgtgaatacaaaagctatgcttttgaacttgcctaaggcgataattgcttctggtcttctttctttgcccacaccattattgtcagtctcactgccagcattgccatccgaaccatttatatctccaagatctctgggtactggtgtcgtagcttcttatcttgcttgtggtgctaccgactatgctctcttggtgttggaacgtgttacaccgtcaccagctgtgtggtggaatctacttatccgagaacacatcaaacaaggccgccttgacagtgcaattaatgtctcttgccgcatgctgcgtgctggaactaggctggaccattttactctaccacatgtattaaaagcatgtggagagctaccttcataccgttgtggtagtgcattccatggattgatatgctgcaatggctttgagtccaatgtcttcatatgtaatgcgttggtggcaatgtattcccgttgtggttctttggaggaagccagcatgatctttgatgaaataactcagaggggtattgatgatgttatctcatggaactctattgtttcagcccatgttaaaagtagtaatgcttggactgcattggatctgttttcaaagatgacattgattgtccatgagaagcctacaaatgaaaggtcagacatcattagcattgtcaacatactccctgcatgtggttctctaaaggcagtacctcaaactaaagaagtccatggtaatgctattcgtaatggcacatttctagatgtttttgttggtaatgccctgattgatgcttacgctaagtgtggtttgatggaaaatgcggtaaaggttttcaacatgatggaattcaaagatgtggtttcttggaacgcaatggtggctgggtactcccaaagtggcaactttaaggcagcctttgagcttttcaagaacatgcgcaaggaaaatatcccattagatatggtaacatggactgctgtaattgcaggctattctcagaggggatgcagccatgaagcactcaatgtatttcgtcaaatgatattttctgggtccttgccaaattgtgtcacaatcatctctgtgttgtctgcctgcgcttctttgggagcattttctcagggtatggaaattcatgcctactccctaaagaactgtcttctaaccttggataatgattttggtggtgaggatgaggatcttatggtgtacaacgcgctaatagatatgtactcaaagtgcagaagcttcaaagctgcacgctccatatttgatgatatacctctggaggaacgcaatgttgtcacctggactgtcatgatcggggggcatgcacaatatggggactcaaatgatgccctcaagcttttcgtggagatgatttcggaaccatatggagtagccccaaatgcttatacaatttcgtgcattttgatggcctgtgcacatttggcagccatacgtataggtaagcagattcatgcttatgtgcttcgtcatcaccaatatgactcatctgcatactttgtggcgaactgcctcattaatatgtactcaaagtgtggggatgttgatacagctaggcatgtattcgatagcatgtctcaaaagagtgctatttcttggacatcaatgatgacagggtatggaatgcacggtcgtggtagtgaggccctggacatatttgacaagatgcggaaagcaggctttgttcctgacgatataaccttcctggttgttctttatgcttgtagtcattgtggaatggttgatcaaggtctatcgtactttgacagcatgagtgcagattatggtttgacacctcgggcagagcactatgcctatgctattgacttgctggcccgctttgggcgattagataaggcatggaaaacagttaaggatatgccaatggagcccaccgcagtagtttgggttgcattactgagtgcctgtagagtacattcaaatgttgaacttgctgaacatgctctgaacaaactggtcgagatgaatgctgaaaatgatggatcttacacgcttatctccaacatatatgccactgcagggcggtggaaggatgtagcgaggatcaggcacttgatgaagaaatcaggaattaagaagaggccaggatgcagctgggtccagggtcaaaagggcacagcatctttctttgtcggagatcgatcacacccactatccccacaaatttatgctcttctggagagtctaattgatcgcatcaaagctatgggatatgttcctgagacaaacttcgcattacatgatgttgatgaggaagagaaaaataatcttcttgttgagcacagtgagaaacttgctcttgcatatggtctcctcacaactttccctggttgcccaataaggatcacaaagaacctgcgtgtatgtggtgattgccatagcgcattcacctacatttccaagattgtggaccatgagatcgtagtgcgcgaccccagtcgttttcatcatttcaagaatggttcatgctcatgtggtggctattggtgagggtttcttttgtgaaagcatcagaggtagaagcataaactaagtagttaacaatgtattactatatattttcccacagtaaggaatactgatgtaatctagattctttatactctagccatgaaaacttatcattttgggcatc

SEQ ID NO: 8627 - DNA, 328 bp, Oryza sativa
  unsure (1)..(328): unsure at all n locations
  Clone ID: PAT_MRT4530_15118C.1
tgcacgggtcgncggcggcgggccntaagggtgcccggtgcanaggcggcggctaagggagcgcagacgcgccgtacgggagncggcggcggccgagggcgtacacggcggcgcaggtagttgttgttgccgacgtctgtcgtggagtcgccgaacatgtacatcgtcggcacctttgccgccgcccgccgccgcgcaccttatgctaattgtgtcaaaattttgtcgaaattttattgaaattttggtcaaattttgtaatccgaacatgtacataacatgctcatatttgaattttaaaaaaaaaaaaaaaaaaaaaaaaaaaaaa

SEQ ID NO: 8628 - DNA, 982 bp, Oryza sativa
  Clone ID: PAT_MRT4530_15119C.1
atgcgagccccacatgtcataggctcaagggcgccagtccacggtggactgagtccacgggaccggggaggagggatccaccacgtggcgcacacgtggcgaccacgcgggcggccggatggatggccccaatccactcggggtggatcggacggcggagggggcggcacgcggccggcacgcacgggcccagctcaagccggcccggcggccatggcgcgcggtggcgcggctcgacgcagcggcggcgcagtggtagcggcgcgggcggctgagcggctaggcggcggctaagcggcgtgggagagagagagaggaaggggaggagttcctcaccggcgatgatcaatgacagtgagcggcgggatgatggcgacgagcggtcgagattcgggatcacctaaggaacacaatgggaaagattagagagggagagagagagatcatagagggcggggacgccagctgaaggtggcggccatggcgaagctcaccggcgtgcggtgcgaacggggctccggcggcagaaatcggcggcggaggagcggacagcgtggcccttgggctcgtgaacccgacggcggcgatggcgaggctcggcgcggcggctagcggcgaccggagcggtggcggcggcgacggagaggagggcgatggcgctagggcggaggagggcacgggggagctctgcgaaatggggaaaaatagagagggaggggcagtggtgcttaaataggggaagagagagagagtgagtgggtgcggggaggcgcggggaaggcggcgacgtgggcggcgtggcccgggaggcacgggagaggcgggagcggcggttgcgggcgcgggccgcgccggccggaggtttggggacgggcccggcaggtgggcccacctgtcggtgacccgaggggaggaggggctcgggcggccggctgctgggccttccgaagttcccttaggttcctcggaggccttgccaggg

SEQ ID NO: 8629 - DNA, 230 bp, Oryza sativa
  unsure (1)..(230): unsure at all n locations
  Clone ID: PAT_MRT4530_1511C.1
gncaagtctgaaattgattgaatatctttattcaatgggttcttatttctaggtgtttgacacacaacgaagataggtactgcacaacacacccttattatactaggaggtacatgttacacccaaccggtttgatcgatccaacacaacacaacccaccaagaaagagagtttggaagttgacaggggcccatgtgtggacactgtatgggactctgactgcccatgtt

SEQ ID NO: 8630 - DNA, 427 bp, Oryza sativa
  Clone ID: PAT_MRT4530_15120C.1
ctgctacaggggtctccaccttgcattgcagtgcactgagcacctcatctacacattctctaaccctcaaggaaaagaaaacacaaattatgcactcttggctctcatatagttctcctgtggcactcttagctggttatgcatatttgcttctctaatataatacagagccttatttgcaactagaaaataaaatctatcaagttgactatccaattatacaaacagaaaaaatatagttttgatccaaatatcttctacaaagctactgcaataatgctcagaaacaaggctataaaaaggagataagaaagcttgccactgccttgtatggcttgcacaaggcttccctagacggcagtcacggcaccttactccatggagcactgcaagtgtgtgggataagtggttaaatgcctcatcaaat

SEQ ID NO: 8631 - DNA, 482 bp, Oryza sativa
  Clone ID: PAT_MRT4530_15121C.1
cccacgcgtccgatcatcttgatagattttttttttcactcaatggaagcaagaaagaacctaaaccagaaccaaaattaggagtcaaaaacacattggctgaaaggtccagcttgtcccattgatctctcttcactgaaatccaaagaaaccaatctaggagtactatctagcttgctgcaatggagaagagaaggtttcttggagtgtgcttgcttgtggcagtgttggtgttgcgggcggcggtgctcggccgtggtgacgacggcggcggcggcggccggctgctggacccgggcaagctggagatgttcgtcgacgagctgccggacatgccgaggatgcgcggctacggcgtggcggagggcggcaagctcgtcgccggcaacctcaccatcggcatgtacgagaccatgtgggtaaaaattccaccgcgaccttccggcgacgcgagtcttcgcctacgggaccagcaaggagac

SEQ ID NO: 8632 - DNA, 578 bp, Oryza sativa
  Clone ID: PAT_MRT4530_15122C.1
ctctcgctctcctccgaggcgccgcttcccgacgtccggcggcgatcagccggctgcgggtgtgccctttgggcggacgatctgggtcccacgggcgtagtctccgcggcatcggtgacggcgacggcggccggccggcgggaaacttttagctccggccagattggcggcgccctcgccgccggcttccgtggagagcaggtcgctaggcagagtaggtgttggtcatatggtgtacatctcttgtttgacaaacctgctccttgagttcagcgaacatgtaacttgtttgaagctgcacattccatatatattatttgaagttgctataatgcatttgtaacataacttgaattgttctcttagctacataaatagcacagagaatagataagtgcttcagagaataagggttccaacagatgatgtaataaagatggggccaagcagttttcagaaactttttaggagtgtatcatgggtaagatttaaagattttcttcaaccccaggtactttgctgacctgggcaaccccaggtacttcagcttggataacaagcacgcccgtaccgagttg

SEQ ID NO: 8633 - DNA, 489 bp, Oryza sativa
  Clone ID: PAT_MRT4530_15123C.1
atggggccggcgaagacgaggcttggccggagcggagaacaacgtcacgcggtgctagggggtgacgacggtgtagtcggctggcgcacgggcggcgtggccgaagacggttggaggagcggcggcggcaggccggtgggcgggagcagcggcggccggccgggtgagcaggagcgggagcgggcgctggatcgggcgggagcggcggcggctggccgggcgggcggggtcggcggcggcgcctcgcgctcccttccactagatccggcggcggcggtggagcaacgggcgacggcggaggcagcggcgaggcaacacgagcgcggtggcgggggaggcattgcaaggcgaggctacggcgaggggcaggcggtggtctgcggcgcaggacatgaaggctggacgtcggctgccatagccacggccgaggaggaggcggagaaagaggaggagtgggtggaggcgggaggaagggatgaggagcggtga

SEQ ID NO: 8634 - DNA, 1809 bp, Oryza sativa
  Clone ID: PAT_MRT4530_15124C.1
atgccgacgcccggctcgtcgccggtggcgacggcggcggcgcaccgccaccgccgtagccgacgccgccaccctcagggccccccgccgcgccagccctggtgctgctccttcgccctcgacccgctctccgccgtccaccgcagccccgccgggacgacgacggctgctcctcctcctcatcaccggcggcgaagcaagcacgccgccaccacggcgccgccgctgtcacgccgcatgcgctcgcccggccgcgtctcccccgtcgacgacgcgactgcctatggcggcgccgccgcgtcggcgtcggcgtgttcctccgcgcgtctgtcgtccgtctccgagtgcccgccgccgcctccgcctccgctgccgcgtccacgacctccgcctccggcggtggaggcgctgcggatcaggctggtgtccaagggcgtgatcctggaggtggcggaggtggaaagggtgcggagggagtgcagggtggtcgggaggattcttgaaggcgccggaggaaaggtggcggtggaagggaaggtggaggtgaaggcgatcagggagccggtggagatgatgctggaggacgccgacgaggccgccgcgatgaggcgcctctcccgcgccggcgtcgcccgcgccattgccgtgctcgaggtatccttctcccttatgtttgacagaggagtcaccaactgtctaaaatatctcgaggctgtcccatggagtgagcccgaggaggagaggatcaagagtttgctgtcccagtatccttgcaataaaacggtttctcaagatttgcttgcaaggttacagcctcaagaacccagttcatcagctgaactggttgttgaactcatggattccatcacaaaggggaccaacaataatgcccgtaaagatttgcggactcttgtcgacggtatattatccaggacctctatctacataaagagtgataaagagctggacatgatgaacatttactcaatctgccatacttgcctgaactgtctggtggaattatttggggaagcctctgacctgggcccttctggccaaacaaccatttcagttggaaaagggccacacgagagaatatgcaagcaagttgagaacctcacctggttgctgcagattctgatagacaggcagatgggtgaggaatttgtggacctatgggccagccagaacacactcagtaccatgcatgaacgtttttcgcctatggtacgttacgagctcagccggatttcagccacaattttcattgccatggggagtgggaagctccactgcaccagcacgtcgcggcttggcatcttcgaagcatggttcaggccattgctggtggattttgggtggctcaggaggtgcccaaagggcctcaacatggcaaccctggaggatggaattgggcaagctttgctgacactcaccttgaagcatcagcaggtgctgttcatggagtggtttgagacattcagtgggcaaggcagggaatgcccaaatctgatgagggctttccaggtattcagtctaatcatacagccaaatggccaactgtaccatatgttaccgcaaactccccagcagccccagcaaccacagcataccatggagcagcatatgggacaacctgatcagagtggcccagggcagatgttgcatgcttctaatgttgtgaagctcgaaccacaacaactacaagcattaaggagcttgggtgcagtaaagatggagcaccaaagctcagacagtcagacccatacatgttcttgcagtagcaacaataacatttgctgcagttag

SEQ ID NO: 8635 - DNA, 408 bp, Oryza sativa
  Clone ID: PAT_MRT4530_15125C.1
tcttaaaaaaaaaaaaatgttatctgtatttttatggtgcaatgcaacttgtgtaaccattgtcaacttgtctgccaaaagaagttgcatttttctgttgaaaaaaaaaaaaaaaaaaaatgttatctgtatttttatggtgcactgcaacttgtgtaaccattgtcaacttgtctgccaaaagaggttgcatttttctgttgaaaaaaaaaaaaaaacaagaaggtcatctgtatttttatggggcaatgcaacttgagtaaccattgtcaacttgtttgccacaggaagttgcatttttttgttgtacaaacaaaaaaaaaaaaatgttctctgcatttttatggtggcatgcaactggagtaaccattgtaacttggttgccaaaagaagttgcatttttttgtt

SEQ ID NO: 8636 - DNA, 431 bp, Oryza sativa
  Clone ID: PAT_MRT4530_15126C.1
aaaaattaaccccgcactaaagggaataagcttgcggccttgggttgactacctgagccatgttatactcacatcaccttagtttttatgctgactggaccgctagttctactcaagaaaacctgattttgcctaactgcatatacgaatcctgcaaacctccgggagatgcaggttagaataatgtgtgacttatcacactgacttgtacttacttgatcaattcgagcaatggatcatgatggatagatttatctcactttaatgtgggcacactgctgtgggtggatagtggtaacacggaagggagaatgtgtgaacgaaagggaaagctcagggaagacccgtaaagggtcgtgcacgatggcgtctttgcataggtatccggccccgttacgagcagtacaaaattctgagaccacatccaaatg

SEQ ID NO: 8637 - DNA, 289 bp, Oryza sativa
  Clone ID: PAT_MRT4530_15127C.1
tgcaggtaccgaattggaatttcgagctagacctacgctgatggatcatcaatggttagcaggtgtctatttcttcgaggaggagctcatggcggtcatggggggcatctccggcgcttatgtgaacagagttcagatgatgttcatggacaggccacgcatcgggagagtctctacagtccgctggacgcgtgccggaaggtgatctaccgctagattagctgacggcagaggttctagcctttgtttcgaccttcggacgcactctgcctgcggatgcattgctgcc

SEQ ID NO: 8638 - DNA, 876 bp, Oryza sativa
  Clone ID: PAT_MRT4530_15128C.1
atgtcgtgtcattttctgcaagtcaatcgacaagaggattatcgaagtacagatacagaagcaggcgctgctgctagaagcgaaggatataacaagcggcggccggagacgacgacggagaaatccggaagaagaggaactgccggcgctgagctgcaatcgcgcccaagaatccatctcctccggcggcagcaagtgggtcgttcaacacattccttgaatccacgggaagctgtggctcttgcggctgaaacatcttgtgagaacgtcgatctaccagatttcgttaatattgccactggaacaccctttactgtgaatgaagttgaggcattatacgatctcttcaggaaattaagtaattcaataattaaagatggtctgattcacaaggaagaattccatcttgctctctttaggaacaagaagacaaatctcttcgttgatagggtctttgatttgtttgatcaaaaaggaaatggtgtcatcgaatttgatgaatttgttcgatctcttagtgtgtttcatccagatgcacctgaggaacagaaagctggatttgcatttaagttatatgacctaagacagacagggtttattgaaaggcatgagttaaaggagatggtgttggctcttctggatgaatcagatttgaatattacaagtgatgctgtcgagatgattgttgataggacatttgaccaggctgacacaaaaggcgatgagagaatagaccaggaggagtggaatgagtttgtcaaaaataatccatatgtgctgaggaatatgaccctcccatacctcaaggacctcaccatggtattcccaagttttgtgattcactcagaagtcagcgaagcagacatggttgcctaa

SEQ ID NO: 8639 - DNA, 446 bp, Oryza sativa
  Clone ID: PAT_MRT4530_15129C.1
ttgaaagagaagccggggctcatctactgggcgctaacctacacccttgcggagccttgtcgaagctaccggttcaaggctgtgccgctccaatggtgaacgaaccgatgcgcgcgctcgacaccggtgccgcatgacaaagagtagatgatcttgtccccatgattgctaggggagcgaagggggatgctgaccaggctgaacatctacacatgctagacattccaccagctactgaatatatgaatgggctcaagagggagatgattgctgctgcattagatctttcgctgggaattgaaggaccaactgatgttgaggaggactgccctgccgttaaagtaccaggattggttggcgtcaatccagaaggcgaccttggagctagggtggaagccggagtacgacctggaggagggccttaccgactcgacaaccttcacttc

SEQ ID NO: 8640 - DNA, 745 bp, Oryza sativa
  Clone ID: PAT_MRT4530_1512C.1
ttcctgcttcgtctgactccgacgccgacgacgaggatgatgccgaagaatgtgatggcgaggaggaaggaaggaaaggaggaggtggaggctgtggctgataaggccgcgggtgaggcggtcgaaaccgcgccgacaccccagggtacactcctaccccaagtcctggtaacaacgaaaccggggtggagtcgaacagctccccccttcgtcggaaggatttggaaggggcgaaggccctagttgcgttctcttcgggcgcggcggcgaagggaggtcctatcaaaaaggtggctaaaacgaaaggactcgtcgatgtcgctcgcgtttttagcgacaacgagtcctccgacgggactccgacttcgcccactggtcgcagcctggatctttcggccgcccccattccgccaattggcgccgctggagtggatggtagtaccgccgctggggcttcggcttctgcgtaaaggattgtgacggccgcggcgaaagtattcggcaatcctccgcatcagccggttgcatcgccgctgatggaggcgaagggaaagagagcggtcgctgagacgtccgctttggaatattcgctctcggtaccccgcttcgcccctggcgacttcgagacgcgagcggacctccttccttttgtggagggggtaagcaatcttgtactgcccgccagtgccccaagcatgttcaccgaactgaatgagttcgacgaggggtgctcgcctggctgttc

SEQ ID NO: 8641 - DNA, 672 bp, Oryza sativa
  Clone ID: PAT_MRT4530_15130C.1
ccgggctgcaggaattcggcacgaggcctctccaacatgcgcccgccgccatcggcacagatcaggcctgcggcctgcagctccgctcctacacccaccgccgccgcaccgctcctgcagatctggccatccgttccggtgatgtggagcgcgtggtgtcgcaagaaggcggcctcatctctggcgttcgctgattggggacgctgcagcgcgccgcctccaatccggcctgccccaactcgctgttgtggggagagatctatctgccctggtttcctaatctctagatatattcccatcctatttttctctctagttagagcaatcgcatcaatcgaatctgatttaaggatcttattttctcttgctaatttttgaggggtcaaccaaggatttgccgagccaaccatctatttgttgtcccgtgcaccaatacaaacattgaccagatttcattccaacatagtagaaggaagataatgaataaaacaagaatacctagatcttgagcattatagagcaccttctagatgtcaagtggattgtgaggtaataaaaatatacttcctcttggcatggggaatcaccctgacactctcttggtatgtatatctcaggtaacatattggtcagttcgctagtgataaaatttccatgtcagcaactttatta

SEQ ID NO: 8642 - DNA, 255 bp, Oryza sativa
  Clone ID: PAT_MRT4530_15131C.1
agctggagctctgccaaacaggccctactttcacacattcacatatagtcatgagtggctctacattgttcaaaattttggctaacttaattactttaggtagccaatttcatggctgtttcctataagtagctagcaagctgttaacttttcatagaggtgatcagttctgttgatcagctgttcaggatattttatttactggggattattatgtagctgttggcccatctattgctacgaatttgaactcac

SEQ ID NO: 8643 - DNA, 363 bp, Oryza sativa
  Clone ID: PAT_MRT4530_15132C.1
tcgggctattctttcctccttttttttttggtaaatctggagagcgactgacaaaggggggacgcggccccgactcggcgactccgaccgacgagatcgccgtcgctccatcccccatgggtgcctcctccgtcccaccttcccctacccgccgcctcctggctctcaccatggcgctcgccgccgccgtcgtatccgccgtcttcgccgcgagggccccggcctccgtcacgcccatcttccgcaccctctaccactccagtgattcccttttgagtgatctcaaggacttagctgcccggaatccagacaagttggtgtatcgataccacaacagcaaggtacaaagggtatttcacagac

SEQ ID NO: 8644 - DNA, 296 bp, Oryza sativa
  Clone ID: PAT_MRT4530_15133C.1
gaccatccatctcctacgcgttggtgacatatatatagccggaccttccatatatctcatccacatatgcctgacccaacaacatatagtcgtagcaactcccactcttacatcaaggcacagagagatcaggtgaaacatatacaaatgccgagcacgggcggcaaaatcaaatgacgatgaacaaactgttaacacaccaaacatggtgggagacatcatcgcatcagagatgaacaattaaacaaggctatatatcacgatgacggcttatttgccaccagactcctacaagc

SEQ ID NO: 8645 - DNA, 483 bp, Oryza sativa
  Clone ID: PAT_MRT4530_15134C.1
tgtggatctgtttgggaggctcgggtcgaggtccacaccagagttccttcagagttagactacagcttcccgacacgccaccgtcgcgacttgccggagatcgcgatgcaggatgctgcccgggaggccttcctccgacttagctctatccaccgagctgagttggcgagtactgagtttgctcaccacccgtttcgagaggagggcaactccgtctgcacagttcaggacacaccttgctgctacagcccgataatgacccgactgtcacgatgggctgaggctgtggacgacttctacgaggaggccctgttggagattgacgatcagcagagacgtgtgggcgtagtgtctagattacggtgtatcattatttggggttatatgctgcggatgagaggtcggccgctgatggtgacagctcagtacgggaactcggcagtcagggatggcttcttgaagtaccaggagagcatcggatag

SEQ ID NO: 8646 - DNA, 180 bp, Oryza sativa
  Clone ID: PAT_MRT4530_15135C.1
gggggggttaagaagttttttggggaactgaaaaaaaagattaagaacaacgctggatcgtccacatgaacagaaagtgaaaagaacccacaattgggtatggcaactaaaatgacaccaggccgacagattacaatctgagcagcgattatcataaacagaaggcacgggaggaaatgc

SEQ ID NO: 8647 - DNA, 1128 bp, Oryza sativa
  Clone ID: PAT_MRT4530_15136C.1
atggtgagaggttctcatcctcttaccccagccggagtcggtcctcccgctccggtcaaagctaggctcctatttcccggtgtaataggagctcagaagtcttcacccattaaatgccctcgaatctcacccgctacccctggccgaactcacaaaggggggcctcacggttccctggtggaggagttcattccccgccatctgccgcgccaggtagggggcgcgttcgtgatttttgaggttcttttgagcgccggcgtgacgagcgtcgcaccgccaatgtgggggaaggcgcagcctcctcaggagagccgcgccaccccaggcagggggctagtccccccacatcttcaccggcctcaccgaaaggtaccacggaagcgtcaacccctccgagtccctccaaatccacacgacgatcttagaggtggcgtggggtgacgaccgggtcaaggcgaatttcttccccatggccctccagggccaagcacggggatcgcttatgaacctgccacctgcctcgcggctagctttggtcccaccggcaggctacggtgcccggcccggctcaactaatcgtcctttcaagcttcaacagctagctttggtcccgatggctagctacggtgcccggcttggctcaactatggatggggatcgctggctctagagtttttttggctctcacactcgtgcgaaagtagtcgtcgatgtagaagggagagatattggaaggaagccaccgaaaggaaagagcaaacagaatgtgtagcgtgaggacacaggctcgtgggaacctcacctccttccgtagcggttggctttggccccgccggctggctacagcgcccagcttggcttgcaactcccagaatgataggacagaagatcgggcccacatgtcaactgactagcagattggcgtcaaccctgaccacctgggaaaggttttggtcagggctaacgccgggtgctactatcggtgatatgggcccaggggcgtgcagtgtactcaaccggtctgtcaccggtcgaatgaccgatgggactggctagtgcgcctgtgcgttgctcgtgtgtcaggcagcgtgcaacctgacatgtctcatcaaataatgatggtgagag

SEQ ID NO: 8648 - DNA, 456 bp, Oryza sativa
  unsure (1)..(456): unsure at all n locations
  Clone ID: PAT_MRT4530_15137C.1
ctatcgcaaagatactcgacatgtatctgtacgtggtgtggcagcggtggagcatggggtagattcccctcatgcaggatcattactgccggaatgtcggagagtgaagatcggtgacgcgtctcccagttcttagtagatcggggctcagtatggggtctgaatgtggcaccgcgaatgcagctgggtacggtgcaggccaggacacagttgaacgccaggtacagcaggccacaccgatggttgatctgcacgaatgtcaccaccgccgacggtgacacgtacggggttaccacgccatcccgactttgcttcgggcgaacacctcgtcgcgctccagcgacccggtgttggagtggtggcgccggtgtcggcgccgctctagagatccaagctacgtacgcgtgcatgcaacgtcaagctcttcaaaagntaccaagtagtcgcnggtggggt

SEQ ID NO: 8649 - DNA, 603 bp, Oryza sativa
  Clone ID: PAT_MRT4530_15138C.1
atggtagccacaagcaactgtggtctcaagacgccacgtaggatagaaccacacaaagcggtggcggcagcggtggatctggcggtggcggggagcagcggtgaggtcgacgccgccgtcctcctcccccacaacggcgcggacgatctcgccgacggcgtgacgagcttggcggcggacgagctcgcctacggcgtggcgagcttggcggcggcgggctcgccagatctggcggcgacggccacaacgcggcggctgttcctcgacgtcaccgtcttcctccccccacgacggcacagacgagctcaccgacggcgtgacgagcttggcggcggcgggctcgccggatccgacgaccaccacggcggctgtggcggatctggcgaggcgacgacgaccacagcacggggggaccggacgaggcaatggcgcggagctccgactcctccaacgcgagacttcggcttgtggcttcgcgcctcccgagcccaggcgcggcgcttgctccggttcctctgcaagctcgctgacaggctccgaaaccacccaaacgcgtgccagctcggctcggctccgacgtggagttttgagaccacaggctag

SEQ ID NO: 8650 - DNA, 612 bp, Oryza sativa
  Clone ID: PAT_MRT4530_15139C.1
cggacgcgtgggcggacgcgtgggctccgccgcggccccatcgcgcgcttcctctcctggcactccggccgccccgcccacgccgccgagctcctctccttccactctgccggtcagcccccaattataatcttgtagtctcaaatcctgaaaaataatagacccactccggtgccttctacttttagtagaaaataatctgaaccgttcatctcatttgatcatagggttcagatctatttctattaccatcacatttaatggtagtagaattgtagagggatatttttgtccataaaaaaatatttgcggagggatatttccgtctttcctgggctccagctgccgccgccccgcgtgctgctcctcctgctggccatccatggcgccaccaccacccgctcgccaccgcgacgactcgcaaggggaagcttcataaactggatcgttggaatgggtttcacgcagaattctagcgagatgggcctattcacgttacattagctcgggtaaagaggaagcaaagcacaaatttaatggatcaggctcacggaagttgagctacttgttttcatagcaaattcaggatgttgattctggtatagcaataga

SEQ ID NO: 8651 - DNA, 2223 bp, Oryza sativa
  Clone ID: PAT_MRT4530_1513C.1
atgacctcccagacaaaaatgttgctcatgctgtccctcctcctccacctcctcatcccctcttcatcatcagctacgtacaccaaccacaccggagccctgccgccggcggtcccatgcttgccggaccaagcatcggcgttgctccagttgaaacgatccttcaccatcaccgacgactccacggccgccttccgatcatggaacgccggcaaggattgctgccggtgggagggggttagctgcggcgatgccgacggccgtgtgatatggcttgatttgggcgactgtggcttggagagcaacagcctcgatccggtgcttttcaagctaacctcccttgagtatctcaacctgggtggaaatgactttaatgagtccgaaataccatccgccgggttcgagcggcttagtcaggtgcctgtacaaagtattggccaactccatagtttggtctctcttgatatctcatttagttctgaccttattgagctattcgaccacggttatctcattaacccatggcaaatggacttaccaaacttgacagccttagttgcaaatcttagcagcttacgctcactaaatgtgattgacctacaatataattatttgactggtccaattccagagtactttgccaacttatcctccttgagcgttctccaactgggttataacaagcttgaaggatgggtctcgccttcaatatttcagaacaagaaactagtgactattgatcttcatagaaatcctgacttatctggtactctgccgaatatctctgctgacagtagtttggagagtttacttgttggtcggaccaacttctctggtagaataccaagttccattagcaacatcaaatctttgaagaagctggaccttggtgcaagtggcttttctggaaagctgccctcatctattgtgaggttggatctcagttttaacatgtttgaagggacaatacctctaccccagaactctagattcgtgcttgattactcaaacaaccgtttctcatccataccaacaaatatttcaactcaacttggatatactgcctatttcaaggcgtcaagaaacaacctctccggagaaattccatcatcattttgtagtaacaatatacaggttctagatctctcttataatttttttagtggctcaatcccttcttgcctatttgaggatgccaatgcgttaaaagttctaaatctgaaacaaaatcaacttcatggagagctagcacacaatatcaatgaaagttgcacattagaggctctagatttcaatgacaataggattgaaggaaatttgcctagatctttagtttcttgccgaaaattggaggtccttgatatccaaaacaaccaaatcaacgattcttttccatgttggatgagagtaattcctagactccaagtccttatcctaaaatccaacaagttctttgggcaagtgacacctacagttgccgaggaaagcacttgtgaatttcctagtctacggatcctagatctggcctccaataatttttcaggcacactgagtgaggcatggtttatgagacttaagtcgatgatgattgaatctactaatgaaacattagttatggagtttgaaggtgatcaacaagtctaccaagttaacattgtgctcacatacaaagggtctgccatcgcaattagtaagatactaaggacctttgtattcattgatgtctcgaataacgcattccatggaagcatccctgaatctattggagagctagttctgctacacgcgctcaacatgtcacacaactcactgacggggccggttccatctccactcggtcatctaaaccaaatggaggctttggatctgtcctcaaacgagctttcaggagtgatcccacaagagctagcatccttggacttcctcggaacgctaaacctatcctacaacatgctggaggggaaaataccagaatcacctcatttctcgttattctccaatagttcatttcttgggaacgatgctttgtgcggccctccgctatctaaaggctgcaacaacatgacattgctgaatgtgataccttcccagaagaaatctgtagacgttatgttgttcctcttttctggaataggattcggccttggatttgccattgcaattgtaatagcatggggatttcccattagaagacggtctccggcgaggcagagagccctctga

SEQ ID NO: 8652 - DNA, 549 bp, Oryza sativa
  Clone ID: PAT_MRT4530_15140C.1
atgggccctaagcgagggatagatttgatggactttgctctaattgaatttgacgtgaggatcaagacaggcgaacaagaaaaagatgacctacagctaattgatggtgcaacactcttatggactccaggcctatggaatcagccatattcaattaagatcccaggcgattacggtgcagttgacataactgtagcacaccttaataatgcagttgaggccactgtagaggttgtcatatcagaagtgcaaagcggtttcaatttgctgcttggttgtttaaccagtgacttgaataaggaaatgcggctctttgatggtgccattgttgagtcgcgtttcctgaagaggtcggtggttgctgtaaattggaaatcttctatagatttgaagttcaaagtgggcgcatctccatccagtttcgaccaacattgtgtttccttcaagccgaaaatccatggccatgatactcaagaaataaagactgattttgcattaatctcagtgaaggtgacttggtcgactttgttgcctactggacttgattga

SEQ ID NO: 8653 - DNA, 606 bp, Oryza sativa
  unsure (1)..(606): unsure at all n locations
  Clone ID: PAT_MRT4530_15141C.1
ccttgggctgaggatgcggcntgagaanttcctcagccacagccaacgccagctgggtccccggcccctccccggcccccctctgctgccgcttcgccgcccccctccctctcctcccgccccaccgcgccgcggcgccctctcctcccggaacacgttttgacgccctcacctgcccgcgttcgccaccggagctgccacttccatgcccggtgtcaccatagctcccgatctggaactcgcgttccggttagctctgttgtcttccagcccagtgtccacgtcgtgagaagccacgggacgaacataaacagttccgtcagcgctttttcctattggctgaaccctaccaatcccatcaaaaccccctaaatagtgcctccagcatccgccgcggccgccgaaaccgcccacgccgctgccgccgtttcccgccgttctccgcgccccactccgcccgtgccgcgcgcccacgtcgccgccccactcctccgcctttcccgcccgcgcgcacgcacgaagtgggcgggattcattttgaatcccaccccactctctctctctcctccccacgtcgccggcggtttcgaccatctccccggccat

SEQ ID NO: 8654 - DNA, 483 bp, Oryza sativa
  Clone ID: PAT_MRT4530_15142C.1
atgggtcccaccccctctctctttctcctccttttcccatcacgtctgccgttcactccctgcccgcctagcgtcatcgttgtcatactcccagtgccgctcacccagcatcgccgtcatcatcctcttaggtcacccgcccagcacaccgccttccccgtcctccccccgctcgagttacgggtgaagaagggacaagcggctgctccgctgagccctcctcgcacctcctcccctctcgtcgccggcttcacccctcttgtcgagctcatcactgtagccgtatctgtcgtcgtagccataactattgctatcccttatcgttgcacggatcagccactatcgtcttctcccctctcaccgccgccatcgtcgcctcatgagcgcatggttctgccatcgctgtcgccgagggaagagctcaaggatggccacgggagaagaagaaggggagaaagaggaggaagaagaatgaggaagtag

SEQ ID NO: 8655 - DNA, 174 bp, Oryza sativa
  Clone ID: PAT_MRT4530_15143C.1
atggccagatcgttccgttttctcctggccggatctggagaggccgacgccttcggctgggttttcaaggcgagcgcactaatgtactcgtacagatataatcgaggccccagtacatgtagcccgttaccgatgacactcatctgtgacgggctcacagttaggcccgattga

SEQ ID NO: 8656 - DNA, 174 bp, Oryza sativa
  Clone ID: PAT_MRT4530_15144C.1
atggatggattccacgaccacgagtcgatagtcacacaaggtgctgaaagctgctctgctatgctccgagggtctcaacgctgcaaaaggaatctgatttcttacgaacacagcagtgttcccagcagcaacaattggatcctcgacagcctacaggttcagaacaaaatgtaa

SEQ ID NO: 8657 - DNA, 494 bp, Oryza sativa
  unsure (1)..(494): unsure at all n locations
  Clone ID: PAT_MRT4530_15146C.1
cgggttttgttgtgccatgtttagtcctnttccaaatgggtacaaaattgtnaaggantttttaaggtaaaccaagttatcgtgnacggttcgttgcacagtgtnaaagggctatacattgctcctatcgcatcggtggtaagatgtcatttcttcatatttcaattttcttaatgccaagtattgcattccaaaatgnatgtatggagcaataatgcctnatgtaagcaccgacatattttaatgttcttcctgaaaagtgacagcaagagtgaaatgtgaagaaataatgaatatttatactagtgatgtatttacaacggcctggtttgaaacttttcttctgggagagaaaaagtttgggacaatccatatgaaaggattctataganaaacaaataaatggtagtagaacgcattgctgtttgagatgtgtacacctttaagaaataagatatatacaaatacaattctccacctcaaaaaaaaaaaaa

SEQ ID NO: 8658 - DNA, 326 bp, Oryza sativa
  Clone ID: PAT_MRT4530_15147C.1
atccccgggctgcaggaatcggcacgaggggaggatttacgggaaatgctggaggatcagtactatgccccttgtgtgtgctgaaaatcaaggggatgttgtttatgattatgacatgtattatggaggatgggatgagtagatgtatgtaggggagtggtctagtagctttgtcagtgaacctggaatattggagcacctagtgaccaaagtattgctagctcctgcttgaaacttgtattattaatgggtgaacgtgtaagagcctgttctagactttagccctgcgtggcatggtattgtcatgttatctgaaccttctagct

SEQ ID NO: 8659 - DNA, 570 bp, Oryza sativa
  Clone ID: PAT_MRT4530_15148C.1
cgggcggcgatgcggaggagacggtggagaggagtgattccgttctactcccgggcatcactctcctggagcttccgttgctccggccggcgctatcatgccaccggggtttccgactttccctcccagaaggctttacctccccgtctccggccaactctggtctccggccatctcctcgtcggcgggggcaacctagcagtgggctagcggaaggatcggaagaccacattcccaggtgcacccaaaaccctactcattttcctccatttaataaaattcactgccatgctattgacgcttgtttggatctggcttctctcgatgagacgaaaagaaaatcatgtaggctagtacaattaattgttattttgatttgcggctatctgtaatttactctaggatagtacgaaaatcatgcagtttggatttggcctctttgaggccttgtttagttggggaaaaaaattgggtttagttgtcacatcggatatacggatagacatttgaattattaaacgtagtctaataacaaaagaaattacagattccgccaggaaactgcgagac

SEQ ID NO: 8660 - DNA, 204 bp, Oryza sativa
  Clone ID: PAT_MRT4530_15149C.1
atgtcgatctactgctgcggcctcagccgggctgccggctgcagcggtgggcggcggcacatctcgatctacttctgcggcggcggcggcccgcggccggcctgtgaggtggtagcacttgtgcaagcacaagatgatggtgaagcacaggcacagtccgctgttgaagcaaatgatgaagcacatgcacattataacttatga

SEQ ID NO: 8661 - DNA, 552 bp, Oryza sativa
  Clone ID: PAT_MRT4530_1514C.1
atggagaagtgccccaactggaaatttgtgtgggagaataaagctcctatgaaagttcagttctttgcctggctcttgactaaagatcgtttcccaataaaacgcaacttgcacaagaaaaccatagtaccggctccgacctgtgaactttgcaactctgctgatgaaacagccctccacctatgcttccagtgccccttcgctgtgaccttctggagcgcgatgaatataccgtcgcagccggacggcaagcatagctcggacgtgctcccggtcccagcgctatcgcagccgagctctagcagtcggctgcgcatcttctccggcacggcgaacccgacgctggcgcaggaggtggcgttctatctgggcatggagctgggtagggtgaagatcaagcggttcacggacgggggaagcgtgcgtggttgtgacatgttcctagtgcaggccacctgcccaccacccaacgagaacctgatggagctcctcatcatgattgatggacggccgccgcgcatcttgcggtttgggcggcagcagcagcactag

SEQ ID NO: 8662 - DNA, 108 bp, Oryza sativa
  Clone ID: PAT_MRT4530_15150C.1
atggcggtggaggcatctccaaggctcgataacatcgccagctctgccactgttgtcgacttttttcttgtgccatctcataatccacgaatccaaggctcgttctag

SEQ ID NO: 8663 - DNA, 375 bp, Oryza sativa
  Clone ID: PAT_MRT4530_15151C.1
atgagggtgacctctggcaagctctctcatgtcgtccccgagctcagccgctgccacaccgggctgccgccaccgcaccccgagtcgtcgctggtccaaccttcaccactgtggcctcaagcttgtatagagctcagccgccgtagctcgacgccctctaccctccaccgctgctcccctctcctcggccctcaaccgcgtgcggcgcaccatcgttgtctaccatcagccgtgtcgtcgttgttgtccaccatcaaccgcccatcgtcgtcctcaccaccagcgctgaaagaagatttggggaaagaagctattgcatcggatgcgagggagctaaaatgcaaatatgctgccactctggatggccgcggatag

SEQ ID NO: 8664 - DNA, 137 bp, Oryza sativa
  Clone ID: PAT_MRT4530_15152C.1
atgcggcctatattttgctagggagcacctggctacctgctgtgaaggactgtatgaccgtggtagggatgatgctaatgctacgccaggtatacgtgcattgcttggctgcggggaacgcacatggccaaagttac

SEQ ID NO: 8665 - DNA, 276 bp, Oryza sativa
  Clone ID: PAT_MRT4530_15153C.1
cggcgtgcgcgcgcgcgcgtgctcttggactctatattgggggcgcccttttttttttttgggttactgcgaagaagcgatttttttacaaaagcatacgcctactgagaggtactaatggtcagcaaactcacgggagatgatattatttgggctacacggataagcacagagggattatctcgccaaactttgatgttggtaggcgccaacaatgggggcgaaaaccagatattttttatactttaagttgttgagttatgacgcgggcattta

SEQ ID NO: 8666 - DNA, 200 bp, Oryza sativa
  unsure (1)..(200): unsure at all n locations
  Clone ID: PAT_MRT4530_15154C.1
acgtaacaatacgctatncccaagacgggggaatactacaacatctgaggcgagcacagatgtacaaaactcatgcaacggaagcctttacattaaaaaccaaacttaaacacacacgagtttttaacaccccacgaaaaacaatctgataaaaccctccttttgcggtgaaaccttaagagctttattttcccaaaaca

SEQ ID NO: 8667 - DNA, 1464 bp, Oryza sativa
  Clone ID: PAT_MRT4530_15155C.1
atggaccaccagcgaaaaccgatttttgctagcggccacgctaagaggttcgccatgaaaaatactctattttttgaggcggacctcttaagtgtccgccagcgaaaaatcacgttttcgctggtggtagaattcagtctgaaaaagaaaatcataagcttgaagcctgtgaagtatccacatactagctttgctatagaagaagccatgatgaggtgtttgactgattggggcttgaggggcaaactatttactttaactttggataatgctagtaataacacggctgcttgtgaggaaatggtgaaaaatcagaagaatgagttgttatttgaaggtagacattttcatgttaggtgctgcgcacacatcctcaatttattggttcaagatggaatgaggttaattcgtggggcaatacataagatacatgagctcttgaaatacatagaaaattcagcctcacgtatccaagcgttcaattcaattgccaacagttcatgcctttgttcaaaatttggtttaactgttgatgtacctaaccgttggaacacaactttcaaaatggttttagaagcattggtctatagagctgtccttaatagttatgccaatgaaaatggtgaggttgcaccatctgacgaagagtggctgactgctgaatcaatttgtgagtttcttaaagcctttgaagaggctactagacttgtgtcagctgacaggaaaccaacagcacactcattcttgcacttggttctctgcattcgccatgctttaagtgattttgattcgcaaacaactagtattttgactcaattggctagtgctatgcatatgaagtttgctaagtattgggatgaaaaattgccaaacaattttaatttggcacttgtcattagcactgtcttagatccaagaagaaaacgagattatttggaattcttttatgccaaggtgtctcccaatatgaatgaagctgaaactaaagtggattctgttatagagtggatgaagtcttactttagagtatatgaaggaattgcaaggagaaggggtgtatcctgcctatcacattctgggcaaggagaagctagtggtgtaggctcgccagttctaggcaaaagaaaacttgaccaagagtttgctattttcaagtcaaaccgaacacgattacataagtctgagattgagacatatctagaagaagtttgtgaggatgatagtaaagatttcgatgttttggcttggtggaagagaaatgctaaaaggtttcctgtactggcaattatgacttgggattttctagcaattccactcagcattgtgccttcggaatcagcttttagttgtggaggaaggatacttggagacacaagaagttccttgacaccggatatgcttgaggcactagtttgtgctaaagattggttatttaaaccgaagaaacaagatcaaagcacctga

SEQ ID NO: 8668 - DNA, 2064 bp, Oryza sativa
  Clone ID: PAT_MRT4530_15156C.1
atggaccaccagcgaaaaccgatttttgctagcggccacgctaagaggttcgccatgaaaaatactctattttttgaggcggacctcttaagtgtccgccagcgaaaaatcacgttttcgctggtggtaggcttattaaacatgtctacacacaattcagaaagttcaactggcaatagttctagtcatgaattatctttacaaccacgtaaaagagcaaaggtgtgggaacattttgagcaggagcttgttatggtagatggtgtccccaaagcacagtgcaaatattgtcggttaatgttgacagcaactagaaaatcaggaactagtcatctcataaaccatgtttgcgactcttgtccactagttgaggttgaagttagaaataggttcatagcaattgctcggaaacaacccgtggaaaattttgtgttttatcctagaaggagtgaagaattgatgataaaatttttcatccatgacgagataccatttcgaaaaatcgaagatccttactttgctgagtggatggagtccatgcaaccaacctttaaagttgttggtcgccaaacaattcgtgataagatttacacctgttacattaggatgaaacaagaactgcatgatgaattacaaaatattgattcacgtgtgtgcctaacatcagatatgtggacctcaaatcaaaacttaagatatatggttgtcacggcacattatattgatgcagaattcagtctgaaaaagaaaatcataagcttgaagcctgtgaagtatccacatactagctttgctatagaagaagccatgatgaggtgtttgactgattggggcttgaggggcaaactatttactttaactttggataatgctagtaataacacggctgcttgtgaggaaatggtgaaaaatcagaagaatgagttgttatttgaaggtagacattttcatgttaggtgctgcgcacacatcctcaatttattggttcaagatggaatgaggttaattcgtggggcaatacataagatacatgagctcttgaaatacatagaaaattcagcctcacgtatccaagcgttcaattcaattgccaacagttcatgcctttgttcaaaatttggtttaactgttgatgtacctaaccgttggaacacaactttcaaaatggttttagaagcattggtctatagagctgtccttaatagttatgccaatgaaaatggtgaggttgcaccatctgacgaagagtggctgactgctgaatcaatttgtgagtttcttaaagcctttgaagaggctactagacttgtgtcagctgacaggaaaccaacagcacactcattcttgcacttggttctctgcattcgccatgctttaagtgattttgattcgcaaacaactagtattttgactcaattggctagtgctatgcatatgaagtttgctaagtattgggatgaaaaattgccaaacaattttaatttggcacttgtcattagcactgtcttagatccaagaagaaaacgagattatttggaattcttttatgccaaggtgtctcccaatatgaatgaagctgaaactaaagtggattctgttatagagtggatgaagtcttactttagagtatatgaaggaattgcaaggagaaggggtgtatcctgcctatcacattctgggcaaggagaagctagtggtgtaggctcgccagttctaggcaaaagaaaacttgaccaagagtttgctattttcaagtcaaaccgaacacgattacataagtctgagattgagacatatctagaagaagtttgtgaggatgatagtaaagatttcgatgttttggcttggtggaagagaaatgctaaaaggtttcctgtactggcaattatgacttgggattttctagcaattccactcagcattgtgccttcggaatcagcttttagttgtggaggaaggatacttggagacacaagaagttccttgacaccggatatgcttgaggcactagtttgtgctaaagattggttatttaaaccgaagaaacaagatcaaagcacctga

SEQ ID NO: 8669 - DNA, 159 bp, Oryza sativa
  Clone ID: PAT_MRT4530_15157C.1
atgagtacaaccactaagcacgtggtcattgggactcaccggcttgggatgaaggaagtagaaagtgaagggtcacagcggtgcttgatgatgaggaagaggaatgtgctatcgggtgggaatggggtgtgcaagcaatccgggtggattgagtgctag

SEQ ID NO: 8670 - DNA, 240 bp, Oryza sativa
  Clone ID: PAT_MRT4530_15158C.1
atgggctttttcaggaatggcgccggcggcgactacggcaagagtgacgacgacacactcacaatggtggagggaggcggtggcggcggcgagggtggtgccgtccttggccccatgaggggcgcgatgacggacagcggatccagcgccgccgccctcgggaggggcggatccgcctccccggccccagtcctcgttgactactacggcgacaacgtcgacagtagcggactatggtga

SEQ ID NO: 8671 - DNA, 216 bp, Oryza sativa
  Clone ID: PAT_MRT4530_15159C.1
atggcgaaatcgtcttccttcggcagatactcttcgccttgcacccttcgcctgggacgcctctggctcgacaagcttgacgatgactcaacaaagaacgacaagcgatgctcacgggcaaagcaccatgatgacgacgagaacagaggcctacctggcagatcaggatcgatcccactcagggtgaagcgcgatgatcatgcagactatgaatga

SEQ ID NO: 8672 - DNA, 353 bp, Oryza sativa
  Clone ID: PAT_MRT4530_1515C.1
cctcctccctcttcgtatgcactcgctgccggcctccccgcctcctccctcttagcatacgctcgctgcgggagctgtgggggatggcggcgttctggctgcaggccaaccccatcctcgtcggtgccgcaccaagttgccacatcgccacccgtcgccagctgccctaccagcctcctccgcaatccgcacccgctggccgccctgagaagagagagagggagggagaggaggggaaaatgggaaataagagagaggtgatgatatggcatcttacatgtgggacccacgcgctgactcagccgtcacgtcaaataaaaccggggtcaaaaccaccgaaggatctaaagtga

SEQ ID NO: 8673 - DNA, 2651 bp, Oryza sativa
  Clone ID: PAT_MRT4530_15160C.1
gttccacactgagccgtgaggctggccgctgcactcaaaatagtggtgttgtgaacgtcgctgatgatggtgttaattactatggcagattatcagacattgtagagctgtcatatagaaattacaaggtagtactctttagatgtgattggtatgatgtccaccacagagctggtatgaaaaatgatgaatttcggttcagccttgtgaacttctctcggaagatacacactggagagaaattggatgatgatccatttgtgttttcatcccaagtggaacaagttttttattctgaagatccaaaaactgaaggatggcatgtggtaacgagatttaggcccagggatctttttgatatgggtgtggaacagccatctgatgaagcagagcagatcatgaggaaaaaggcaggagctctgccattcatttatagaaggaagcaagcaaacatagagaaatccttttacaggatggtttgccaaatgcagggtatcaatgcaaacagaagcaagatgtccacactgccagatgatttctgtcagagtcctgatatcctcaacagtgatcgtattgataaaatacaagcagcagcattcctaaatctaattcgttttggcacccaggatggaggcagtgaacttgaagaggaaaattcagaaagtgatgatgatgcaatagcagagttgccttccgcaattaaaaggccaattaatataatctttccgaatggagaggtacgacagattctaggaaattttaatgtcaaaaacatggagcaattaaagaatggaaaggtaattgtggagacagatgaaaatggtgttcccaatgatagatcaggttcccttcttggctcgtaccttggtaagatggcacaaaattcaacatttgcaccattgcacattccaaaatgggacgatgatttatttgtggagccacaaaagtgcatagtcgcccacgtggagacgaaatttgtctacccatctgagacgaagctacttacaagagattgggtcctaatgaaagttagcaaaggttggaggtcttacaaacatcgtttgaaggatagatactataatcttgatgtgagaactctgaatgaaataccagaagatgtcccaaaaggtgttaatgcaattcaatgggttggtcttcttgcaatttggggtcaagataaacataagaaattatgtgaaaaaaactctgaatgtgcaaaacaacagaggaatccacatacaactgggagaaaaagccatgctatgctttttaaagagatgggggaagcaaaaaagagggggaaggtccatgagattgatttatgggatgaagcacataagaaaaaagatgcacatatgaaggcagtactggacatggcttatcatgaattagctaaaaggaaaactgatagtagtggtgttctttcacccaaagattatgatgatgtttttcgaagtgttgttggaaaaaagacaaaacttcgagggtactatgatcataagaattggagccatttaaaggtttctcagggactagatgttattgggcaatctgaggaacaagcaatgcttaaattaaaaataaaggcaatggatgataaattagaggatatgagtgatgatatgaatctcatgcgcaccttcatagaacaaaaataccctggagagaattggagaaacattgtggttgcaagaaaaaataaggaagtggatatttctgaacaagttggtaatgatattccacatgagtttgaaaacattcttgacaaatcatatgaaaatgtccatcctacaccaaataatttgcaggagctgcattctatcagttatactaaagctaaagatggtcgtggcaaaccatccttaccacatgaacacatgataaccaagcaatcaggcattataagctctgccaaagtgtctgaatctagccagatgtacatagaatctactagggcacatgacaatggaaataaaaagcaagtatgttctcttaaatgtactaatgccaaagatcgtcgggccaatccatctattccatatgaacgcacaaatgccaagggttatagttttggtcaagacagtcgtaatgatattacaaatggatctgttaataactttgaggattcacataccaataggaatgccatacaaaataatgtgcagaggttacagtctgttagttcaactagacctaaagagagttattctagtcaagatttaccatatcaaaacttgactacaaagcaatcaatcattcaaagctctgtcaagaggcctagaaccagtcaaagttttgtggagtcaattttaccacatgataaaaccaaacaggtccctcagagaaaggaagctgtactcaagcatacttcatctaaatcaggtcaaagggaggtttacttgttttcactgaatgcaataaacaaagacaaactagtggcaaagggaaatttagtgaccgcaaatgccacacatgtggttggaaggaacatgcttggaaatgagtattatggagtggctattcatactgttacaaatattggtgatgaaaggctacctagaccaccatttgaaaattgcaatacattaagagatgcaattggttatgtcattgcttggcctcgcgcatatgatattaatggaggattatga

SEQ ID NO: 8674 - DNA, 409 bp, Oryza sativa
  Clone ID: PAT_MRT4530_15161C.1
ggaaaaggccaaaacaacaaaagtatatatggattacaataaccaaccaaaaaaagggcgcctttacaacacggggggccctacattacaaacactaaaggagggggggggttctaaataggtaaaaaagaaaaacagggaaggaacaagcccttcaaggggcacccacacccgtttcactacaaaaaaacggggcataacctttttactccaaagaaaacccattcctgccggccttatggaaacacaagtttgtacatgaacagcaaggccaacaccttttgttcggctcacccaattaattttaccaccaaagcagtaaaaaatatggcgggacaatcaaacgcagtttggctgtccttgggggccgaagttaaaaggttgcccgaacctccggtttgcccaaatt

SEQ ID NO: 8675 - DNA, 921 bp, Oryza sativa
  Clone ID: PAT_MRT4530_15162C.1
atgcggagcggggagggaagagagagacggctaacgaataccttcaattcgagccgggaggcgacggggggcgtcgggaggggcgcggccgcgtcgtcgctccgagcgttctctcgccgccggccatgcgcgcgaggagggggaggtcgggaagaggaagaggaggaggaggaagaggaggaggccaccctcggcgcgcctccgggagtgctcgccggggcgcgggcgcgcgtggggtggggtggggaggcggcgggagatggtcggcggtggcttcgccggggagaggagaggagaggagaggagagaggagatgcgtggagagaagggaagtcggaggaggctgtcccccaatgcctcgtggcactcccccaaggggagtcaggcccgaggtggggtggcggccactctttcccaaagactagtcagaggaggctgtcccccgatgccacgtggccctcccccgagggggggagtcaggcccgaggtaaggtggcggccactccttcccagagactggatggaggagactgcccgccgatgccacgtggccctcccccgaggggagtcaggcccgaggtcaccatgtacggtgggttaagtgtccgcctccaggtacccacctacccgcatttatggcggcccgagcagtcgcgccacgccgcatttaatgcggtgtgcaatgcactcaaccggtctgtgaccggtcgaatgaccgatgggactggggtagtgcgcctgtgcgctgctcgtgtgtcaggcaacgtgcagcctgacatgtcccatcaaataatgatggggcacccccgtgtcaggcggcaagatttgacaggcctcatcatcaagatgacgtgcgcttgcttcctaagtcaagagacaagacatgcatttaatgcaaagattgtaatccttctccgctaa

SEQ ID NO: 8676 - DNA, 245 bp, Oryza sativa
  Clone ID: PAT_MRT4530_15163C.1
tattgtggattactacttatcccatccctttggtcaaccttcaaggtcgcatttatcaggtgataaaagcacaacattcacatcaaggtagaggaggagccactatacaggtggaattgagggatgttgacactggcaacaaaataactgaaagatttcgtaccgatgaggctcttgagaatctaactatcaaagcaatacattcttctgaagtgttattacattacattcatgtgtcaagctaa

SEQ ID NO: 8677 - DNA, 548 bp, Oryza sativa
  Clone ID: PAT_MRT4530_15164C.1
gcacgagggcctcctcctcgactcgtcctccaccaccaccacccacggcgaccgccacctcgtcaccgccgccgcagacgggttctacgccggcggctgcggcccggaggccgcagctgccgccgcgttcgtgccggacgacgcggtcgacttcaccggcctctacaccggcggcgacgggttcggcaacgccgtcgtcgacgccggcgtcgactacccgccggcgtacgcgttcccggtggtggacagcggctactaaagctgtaaccgctttgagattcgtgctcttgttgccgatccaacgatttgtgtacgcagtagtattttccgtttcagtttgccctccccaaagtgtttggacgaagtggctgtgaacggcgaaggaaggaagctaggtagctctcctagtagccatgttgggttttttcccccttgttgggggtttttggtctcggtgtgtgcctgacttgtgggccagccgggtgtatatgcgcaagcaaaaaaaaataatagtactggtagtatctaagttcaacaaaaaaaaaaaa

SEQ ID NO: 8678 - DNA, 440 bp, Oryza sativa
  unsure (1)..(440): unsure at all n locations
  Clone ID: PAT_MRT4530_15165C.1
ctcgcaaatccatctccgagggggggctcgactacctgaggaaccccaacctggtgcacgcgcacagcatcctcggcatctgggcggtacacgtggtgctgatgggattcgtcaagggctaccgcgtagggcgaggctcgctcggcgagggcctcgacaagagtgccacacgcaaggccttcgcacccgctcgggctagacgacgaccctgacaccnttgccgagctcaaggtgaaggagctcaagaacggccatctcgccatgtactccatgttcggcttcttcgaccaggccatcgtcaccggcaagggccccatcgagaacctgttcgaccacgtcgccgacctcgtcgtcaacaacgactgggcatactccatcaacttcgatcccgggaagtgagcacaacgacacgatcgagatggtgccaaccaaacgtacca

SEQ ID NO: 8679 - DNA, 1083 bp, Oryza sativa
  Clone ID: PAT_MRT4530_15166C.1
gaaaggagtgacatggaagcgtccaagcgtgcaacttacgttaagaagattcatgagaagaccaaagaagcaattgagaagaggtccaagtactatgctgcatgggcaaacaagaatcgcaagaagaagcgcaaatccaagttgatgccacgaggagatggaccattcagagtgctgtccaagatcaatgacaatgcttacaagattgagctacctgaagattatggtgttagttcaaccttcaatgttgctgacttaacaccattctttggactagaagattcagagtcgtcgaggtcgactccttttcaagagggggaggatgatgaggacatcccaaccgtgcatgctacttcaagtaccaagcaaccatcatcaaacacaaaggatacaattcaaggtccacttacaagaagtcgtgccaagaaactacaagttcaggtgaattcattcctaactgattttaatttcagtacttctgagaatgttatactacctaagtgttctactttagttgtgcttaggaacatacaacatgaggaggatgaaagtggatcggtggattctatcactggagtacagaacggaccagtgaagcaaaacggaccaactgcagtgcaaaacggaccagttcaaagaactgctcataactctcaatttacagaagctatggaagtaaatgaggactctttggaaagcttatcaagtcagctttccaatgccaccaataccaagtactttggacttcacaccaatgagaaccaagctgtgacagtttactggaaccgaagcggtgatcatggtcttggtctggttcaagatgttgacgacgtgattggcttgattgagtgcgtcttccttgaggagggtgtcgagaagagtgatcggtgcagccgcgttctgctagggggtgcgaaaaaccgccgtcccctcaacgtcttgttgcccgatgagctctcgtgctcgtcgctcggcctccaaggcacgctgtcgccggtcctcagcctcctttgcagcccgttcgcgctcctgttgctcacgctgcaatcgttctcgctcttgtgcttagcgttcctcctctag

SEQ ID NO: 8680 - DNA, 1269 bp, Oryza sativa
  Clone ID: PAT_MRT4530_15167C.1
atgggggcagcgcctggtggcggagctcgagatggggacggcgggtggtggcggatgcggctggaggtggagctcgggaaggggcggcggcctgtggcggaggcggttggaggcagggctccgaatggggggcggcggttggaggcgggggtcgggatgggacggcggtcggtgggggtggcggaggcaggaaaggtggcgctagggatggggatggtggccggtgatggaggcagctggaggcgaggctcggcatggagcggcggtcggcagcggatgcggttggaggcggagctcgggaagggggcgacgatcagtggcggaggcggttggaggtggggctcgactccctttcttttcctctctcgggcagttaggaatgcggacggctcgaagaggcgaggctatgaaggggctcgtcgggcgacggtggaggtagctggaggctcagctcggtctcctctcttcgtcggttgggaatgggggcgacgagtaccagtggcggaggcggcgggaggctcggctcggcctgctctcttcgtcggttgggaatgggggcgacggccggtgacagagaaggggctcgggatgagggcagagatggggctcggctaggaacagaggctgcggccggttgcggaggcggctcttcctccattgttcatacttgcacttcaccgccaccagcgcctctagaaatcgccatcggtgaccaccttctctgaatcttgcaatccgggaagggtcagtgaagataattggggcttttatatatttcaccaacttgagctttgctacatcggtcctcaaggagtaattcgatcggcaggatatgccactggggtcactgttgctagtcgggtgcatgtgtgcgaggtaagcgagaacgtggtcgtgcagcgtgttctctgagcatatcacacccatcgacgagcgatattcaacaacgaaggagtcggccgggcccagcagcagcaggacagtggccagaattagggagcgatgagagctggagacatcagcacaagacattcgatcaactgatacatgtcggtaaccaggacgatacccgttggtaccagacgtagtacccacctgtattagccgatacccatcggatatcatatcgcggacaagcaacaaagaaatggtggccaaataacaattggcgtctttgagctccttcttgggtaggtcgcccacttttgaatctcctctacaccaagctcctatcatcggccgctcgaaccgcttccctaagctctgcat

SEQ ID NO: 8681 - DNA, 258 bp, Oryza sativa
  unsure (1)..(258): unsure at all n locations
  Clone ID: PAT_MRT4530_15168C.1
ctcaacacacaagtctctctcacaaaggaggacccatcaccatcattgccaaacaccaacaaacatacatatcatcaggttcctgaccagaatctctctcaaccatttgccactcactcaggatgaatcacaatgccatgattccactaagattcgccgtgctgctaacgacttgacccaaaaaaaaaaaaaagacgccatatacatgcacaaccttaggttgcaanatagcatgataagtagccagttccatctggc

SEQ ID NO: 8682 - DNA, 140 bp, Oryza sativa
  Clone ID: PAT_MRT4530_15169C.1
atttgggggcacgtcgtctcgccatgctctcgccggtcgacaaggagtagacaaaatcgccgccgatgagaaggacgggccctggataatccgacgacaagcaaagttcagatcgattgatacttcgtctgttctaaaat

SEQ ID NO: 8683 - DNA, 468 bp, Oryza sativa
  unsure (1)..(468): unsure at all n locations
  Clone ID: PAT_MRT4530_1516C.1
atggtgaccggagaaggaggcgacgacgacgacgacggtgacctgatgagcgggctgatgcacgtggaggatgagcaaggtagacgactcgacgacgatgaggtcgtggataacatagtctcccttgtcatcgcgggctatgagtcaactgctagtgccatcatgtgggcgacctaccatctcgcaaaatcgcccagtgcccttgccaagctaagagcggagcctgagcacctgcccatgatgatcgaccaggcttcatccctgcctctcatcatgcaaacaaacaaattatcactgccaaggtagtagaagatacaatccgattggccaacatagctccgatggctcaccgcgtggcactcagagatgttgagtaccgagggtatacaatcccaaaagggtgggaaagttattgtgtggttccgntcactacatgtcggacccagcatactacgacantccgttaag

SEQ ID NO: 8684 - DNA, 378 bp, Oryza sativa
  Clone ID: PAT_MRT4530_15170C.1
tttgtacagctctataaattgatttattttgagatggaggtggtcgtaaataaaattagctttaacatacactctaaaggtttaattaattaaagagagtcagatagtaagttgtgcatgaatcacgatggccaatcaaatagcaagtagcaattcatagtctatacgaaataaaataatcatgcagacctttggaatctgtggatatgtgccgatagaatctaaaaatatcttttctaccgacgaaaaatgaaatcagaaaacaatcagaatatagtttttttagccaggattattatgacatagaaatatatatatgaggcatgatggaggagacgagaaatgatgtgaagctagggatagatggttggagatata

SEQ ID NO: 8685 - DNA, 498 bp, Oryza sativa
  Clone ID: PAT_MRT4530_15171C.1
atggcgataggttggttcttgcctcgcctgcaaggctgcaacgcgctcgccggcgtgggggcggggagcacggccagtagcgcaaatggcggggaaaggccgaaacaaaaccggatacaacgactccaagaggttttggagagcagttttgctaacgtggcactcacgcgcaagcggaacgggatgttggagcgggccgtcgccgatgagcgtgatgtaggaggggcggcgagacgagtttgtacacgcgaggaagggcgccctcgccagctctgtttccacatccccagggccaagacgactaggccgtggcagagaccttctataagcccccgcagagccagatactctcggtccacagtcgcggctgccggaaccggctgtgcttcctggccagtggtagcgcccgcggcccgcctcgctgccctagccgtgctggtgcggctcagcatctcccacatcacgtgctcacctctgccgcaacctccagagacttaa

SEQ ID NO: 8686 - DNA, 1062 bp, Oryza sativa
  Clone ID: PAT_MRT4530_15172C.1
atggcatgcgtgggcagcaaatatggtaaaggcgacgcgcggcgaggaggattcggcgacggcgacacacgcagacccatgaccgtctgcaaaaatcgacgattttcacatcttgctataggcagagtatttggccacatgcgaaaatgtgttttggccgcctgcaaaaatagcttttctagtagtgcggacaaaccttggatagggcaatggctcatccatggtaacggcaaagcttccttccacgtagccaggccgaatataatatcgaggcatgaaaatgggaagcgactcatttgtgcttcatgcgacccactaacagactgggggacactcaaagattatggtctttgctgtgagacactcgaagatcgtgtatttgctcgtggacactgtaaaaatatgacccaatcccctctcattggaaacggaggcaatgagccggctgtcaggggagaagacgaggtcgaagacaccctcgccgtcatcgtcgtcgcacgcgggtgggacgacaggtgctggagcagcggcggcgaggaacagggcatcgcagatgggcgcgacggaggaggggcaatgaaacgaatttgggacgccgagatgaccaggccccaatcgaggggagaagaggcgaggcaaggcgaggctggcgtggtggtcgacggggaggagacgatatcgattcagcgtactgtctctggaggttgcggcagaggtgagcacgtgatgtgggagatgctgagccgcaccagcacggctagggcagcgaggcgggccgcgggcgctaccactggccaggaagcacagccggttccggcagccgcgactgtggaccgagagtatctggctctgcgggggcttatagaaggtctctgccacggcctagtcgtcttggccctggggatgtggaaacagagctggcgagggcgcccttcctcgcgtgtacaaactcgtctcgccgcccctcctacatcacgctcatcggcgacggcccgctccaacatcccgttccgcttgctgccaccacggcccaaggggaaaagaaaagagagagatatataa

SEQ ID NO: 8687 - DNA, 156 bp, Oryza sativa
  Clone ID: PAT_MRT4530_15173C.1
atggaggtggcattgaaatactcgagctcaagaggtggttgccgaagagggatagttggccaaggtgcgacaaaggtggggtggttgttggtctataaattcgcaaataatcccttgttaaaacgtgaacataagttcaatgctagtatttggtga

SEQ ID NO: 8688 - DNA, 3183 bp, Oryza sativa
  unsure (1)..(3183): unsure at all n locations
  Clone ID: PAT_MRT4530_15174C.1
tttttttttttttttttccacatcaatgcaattaataattaaaaaaacattttcacacacatcaatgggcaaaaatgtttgaccctctgttgcaacatggatcatgaatagaccaaataagttggccgaaaagatagttctcaggttgacaacagcacaagactagccaaaacccagttcaacattttgagcatattacaatgttactgtctgccacagtgcagtaagcacctagtaaaaacagagtaactggtgtcaattacaaccggatcaactgactggattgatcgcaagaaccggtgacgctgcagcgaacatcatccggaccaggacctaagtctattttctaagtggtagtgtggcactaagctgcaacatgacaacagaagcaactaattaacatcacataaaaacatggatatctacatgcatgcttggttatcttatggcttcaacaacttgggctaccaattctccctcatagcctgcattgcatgaattggtttgaatcagaagaagaaccaacccattggaatcacaagtgcactccaaattctagataggcatacctcaagtcattgggtccatcaaaccaacaccaacaccatcgatcttcatacatgacatactgccactagccatcttattgaaatacctagatcttatatttgtcgcgatgccaaaaaaaaaaacaactaaaaataagagagagcatcatttggcgtccatgttgagatggcatagagtattcgtcccttccatccttgcaagagccattggtgatctatatctatcacgaagtccttgtggtagcagtccttgaccttgttccgcactacctgaacaatttctggattcaatggcagttgcttgaagccagcccgttgattccgcacctgccattgcttgtatgtctcagggcgctccacccgatctatgccctcacacgcaatgacattcagagcagctcgtccaaagatgttttgctcaatcagcagccgctgttcgctttcccttggggtagttgcatccagaacatcgaacaaggccgagtaaaagaacaaagcctcccggaaccgtgtcacaaagaatggtgcactgaatgagccattcactattgcatggatgaacacatgaggctgcatcttccggatgttgctgagcacaatatcccttgggctgtcgatcacaacactctcatccatcaagttcttaaattgatactggcaattcacaatgagcacctcatcaggatcaatgttcagatcctctttgcggactgactccatcttaaccgctgcaatggcattgtacttgaatggcaccccaaactcctgggcgtatttactgagccggtgccctgtctcctcaatacgctcagttggccggaaaccaggctgggggaggtcaatgccagtcatccttacctccggtggcccaccctccctttgtgatatccgccgcaggaagcacggccactggaacccatactgtataccgtaatcaacgatgtgtatcttcttcttacccaaggaagcattgtagatggtttgattggagaaaatgaaggacaccttcttgaagcagatggcagccatgtacagctggtacgcttggaggatgtccacggctgaggtgcgcttagccacgagcgactggtgcaccaggctgcccgtgccagcgatccgcgcctgcaagccctcagcaaagcaatgagcaaggcgctgcgtcgcgtcgccggtcggtttcgcgtgctgcttgatctgcttaagcagctcggtggcgctccggcggtcgtcggtggccacggcctgcgcgcagtggatgagcagcgtgcgcaggtccaccacgtccctcccgccccgccgccctcccttcaccttcccgttcccacccttcccgccggcgctggcctcgttcttggccgcctcctccttcatggcaatcctcagcttctccatcatctcggtgcaattctcatgggagggcatcatcaccttgtcgaacatggcgcgcgccgcgacatcgtccccctgaaccgcggtctgcttgctgctcctccctccctccagctccagctcctcgtcgtcgtacgggttcttccgccctcgtccgccgccgcccgaggcggttgccaccaccacatccactgaagcttgtcgtcgctgggcaggaacctcttggcctcctcgagacccctgaggtaattattctccgacgaggcctcgaggtcgatgatgagcttgttctcggtggggaggaacttgttcgcctcctccatccccttgaggaaggcggagtcatgaggtcggagttggccgcggcgaagaacgcggcgggatcgagctcgatgctctcgtactgcggcacgggcaccgcggcggcggcaacggcggtggcggtggcggcggcgtcgtaggagttgatggcgacggaagtgtaggaggaagaggtcggggaaaagccagggtcatagaaattggcggaacggagttgaaaaaggggtcagcgggctctagaggtaggctactcacctagcaccaccaaagttttggagatacgtggcggccttttgaagttgtagcgannnnnnnnnnnnnnnnnnnnnnnnnnnnnnnnnnnnnnnnnnnnnnnnnnnnnnnnnnnnnnnnnnnnnnnnnnnnnnnnnnnnnnnnnnnnnnnnnnnnagaggcgggggtcgtcggagttggaggagcgggagttggaggagggatcggagaggatctcgaggaagggctgctgcgcctggagcagcgccgggttgtcggggtagtcgtagaagaacttgtcgtcgatgtcctcctccatcagcatcctcgagatgaacggcagcaccaggtcctccggcgcctcctccccctccttcaccatcgtcgtcgccgtcgtcgtcggcggcggcggcgagggggggaggtcgaggtaggcggagggggagacgggggcgaggtcggagaggtagaggaagagggacggatcgtcctcctccccaccaccaccgatgccgtacacgtctcggattgcatcatctccacaagcggggaacgagtcggccgccgacgagcccatggcggcggcgaggcggaggagggggtttagtgggcgatgcggccgccgacgaggaagtggtcgcgcccgccgtgcgccgcccacgccggcgtcccg

SEQ ID NO: 8689 - DNA, 2323 bp, Oryza sativa
  Clone ID: PAT_MRT4530_15175C.1
ctaaaaataagagagagcatcatttggcgtccatgttgagatggcatagagtattcgtcccttccatccttgcaagagccattggtgatctatatctatcacgaagtccttgtggtagcagtccttgaccttgttccgcactacctgaacaatttctggattcaatggcagttgcttgaagccagcccgttgattccgcacctgccattgcttgtatgtctcagggcgctccacccgatctatgccctcacacgcaatgacattcagagcagctcgtccaaagatgttttgctcaatcagcagccgctgttcgctttcccttggggtagttgcatccagaacatcgaacaaggccgagtaaaagaacaaagcctcccggaaccgtgtcacaaagaatggtgcactgaatgagccattcactattgcatggatgaacacatgaggctgcatcttccggatgttgctgagcacaatatcccttgggctgtcgatcacaacactctcatccatcaagttcttaaattgatactggcaattcacaatgagcacctcatcaggatcaatgttcagatcctctttgcggactgactccatcttaaccgctgcaatggcattgtacttgaatggcaccccaaactcctgggcgtatttactgagccggtgccctgtctcctcaatacgctcagttggccggaaaccaggctgggggaggtcaatgccagtcatccttacctccggtggcccaccctccctttgtgatatccgccgcaggaagcacggccactggaacccatactgtataccgtaatcaacgatgtgtatcttcttcttacccaaggaagcattgtagatggtttgattggagaaaatgaaggacaccttcttgaagcagatggcagccatgtacagctggtacgcttggaggatgtccacggctgaggtgcgcttagccacgagcgactggtgcaccaggctgcccgtgccagcgatccgcgcctgcaagccctcagcaaagcaatgagcaaggcgctgcgtcgcgtcgccggtcggtttcgcgtgctgcttgatctgcttaagcagctcggtggcgctccggcggtcgtcggtggccacggcctgcgcgcagtggatgagcagcgtgcgcaggtccaccacgtccctcccgccccgccgccctcccttcaccttcccgttcccacccttcccgccggcgctggcctcgttcttggccgcctcctccttcatggcaatcctcagcttctccatcatctcggtgcaattctcatgggagggcatcatcaccttgtcgaacatggcgcgcgccgcgacatcgtccccctgaaccgcggtctgcttgctgctcctccctccctccagctccagctcctcgtcgtcgtacgggttcttccgccctcgtccgccgccgcccgaggcggttgccaccaccacatccaccgcctccttcttcacgctcaccacaggcgccgccgccgcagcgaatccaacctgaagcttgtcgtcgctgggcaggaacctcttggcctcctcgagacccctgaggtaattattctccgacgaggcctcgaggtcgatgatgagcttgttctcggtggggaggaacttgttcgcctcctccatccccttgaggaaggcggagctcatgaggtcggagttggccgcggcgaagaacgcggcgggatcgagctcgatgctctcgtactgcggcacgggcaccgcggcggcggcaacggcggtggcggtggcggcggcgtcgtaggagttgatggcggcggaggtgtcggaggaggaggtcggggagaggcgggggtcgtcggagttggaggagcgggagttggaggagggatcggagaggatctcgaggaagggctgctgcgcctggagcagcgccgggttgtcggggtagtcgtagaagaacttgtcgtcgatgtcctcctccatcagcatcctcgagatgaacggcagcaccaggtcctccggcgcctcctccccctccttcaccatcgtcgtcgccgtcgtcgtcggcggcggcggcgagggggggaggtcgaggtaggcggagggggagacgggggcgaggtcggagaggtagaggaagagggacggatcgtcctcctccccaccaccaccgatgccgtacacgtctcggattgcatcatctccacaagcggggaacgagtcggccgccgacgagcccatggcggcggcgaggcggaggagggggtttagtggatttgtagaggcggtggcgcggcgagaagggtggggggggggggaagcgcggacgcgtgggcggacgcgtggg

SEQ ID NO: 8690 - DNA, 109 bp, Oryza sativa
  Clone ID: PAT_MRT4530_15176C.1
tgatgcaatgatgttctgtgcttctgtggcaccactggccaccattgccaatgaccatgcctgccccatgcaccactgtgctgtgctgtgctgtgctgtgctgtgctgc

SEQ ID NO: 8691 - DNA, 552 bp, Oryza sativa
  Clone ID: PAT_MRT4530_15177C.1
atgcagaaccctggcggccaccacgctagcccggcctcggcggccaagtccaagtcctcgaccgctgccgccgcgtcggcgtcgggccaggggagctcccaccaccaccaccaccaccactccggcggcggcggcggcggcggcggcggcgccgacgcgtccgccaccaccctcaagcgcaagcgcggcgtcttccagaaagacctgcagcacatgatgtacggatttggggatgatccaaatgctaggaattgtttggggataggatgcaatttgtgtactttgtgttgtggaacattggagccgcttccagaaactgttgcacttgtggaggacattgttgtagaatatgtcactgacctggtccacaaggcccagaacgttgcatcaaagaggggcaagctcttgacagaagattttctttacctcattcgcaaggatgtgcggaaactgcaccgtgccactgagctactctccatgaatgaagagctcaagcaggcaagaaaagcttttgatgtgaatgaagagacattggcaacaaataacgagtga

SEQ ID NO: 8692 - DNA, 1300 bp, Oryza sativa
  Clone ID: PAT_MRT4530_15178C.1
atggcggctttgctccgccacgccgcggcggcggcggcggccgtggtcctcctcatcgcggcggccgcctccaccgacggcgccaccagcttctacgcctcggacccaaacctcggatccgcccgcgtcgtcttccagggaggaaaggagcggtttttaccggggttcatggagaaaacggggccaaaagtcggattttggcacggtcagattcgtaggctcatcaaagatttcggaattacaactcatggtgacattgagtttggcttctttcctcatgttgctcctaagacagttgaacacatttacaaacttgtgaggcttgggtgctacaacacaaatcactttttccgggttgacaagggttttgttgcacaagttgcttctgttgtgggtggtagaactgcccccatgaatgatgagcagcaagaggaagcagagaaatcggttgttggtgaatttagtactgtcaagcatgtcagggggattctgtccatgggaaggcactctgatccaaacagtggtggttcttccttttccatccttcttggagatgcaccacaccttgatggacagtatgctgtatttggaaggctcacaaaaggtgatgatacattaagaaaacttgagcaacttccaactcgtagagaaggcatatttgtaatgcctattgagcgtatcagcattctgtcaacatactattatgatgttgatttagagagctgtgaagcagaaaagtccattcttaggaggagactttctgaatcagcatcagaagttgagagatgggagaggaataacagggtcttcaaccaacaacagaagccttgggtcgaagtggcgaaggttatggctgccgaggcggaactatggcacttagtaaatgcagcggtgccagaattgcctcttcctagcttggttccacggtcgcaaaatctagtcggagattagagaagattatcagtttgccaatttttagacaggagagcatatctttctttaattttggttaatcaaaagtgatcttgttcatgtaaaagcttcggtagcgcttaaacaattagcttggctaaatttcatttaaccaccctcaactcgacagtttaatgtcatgacaaaaccatgtaataatcttccctaaatcttaatgaaattttgtcggccaatctttcagccgcccgccaaaaatataacatataagtgaacatgtagtttcatcttgtatctctgtagtatttccttaatgattgatctcaccactgagcttgtgaaatagtatcctcattgattaattacttct

SEQ ID NO: 8693 - DNA, 1829 bp, Oryza sativa
  Clone ID: PAT_MRT4530_15179C.1
tttactcacacaaaccaacgcgacgcacgagagattggtacgtgaagcacctgcagcgggcgacccaatggagaccccgactctgaccacgctgctcaaggcggcggtggccacgttcccctcgcgccgcgccctcgccgtcccgggcaaggtcgacctgtcgcacgcggcgctcgacgcgctcgtcgacgccgcggccgcgcgcctcgccgccgatgcgggcgtgctccccggccacgtcgtcgcgctcgccttccccaacaccgtcgagctggtgatcatgttcttggcggtgatccgagcgcgcgcggtggcggcgccgctgaacccggcgtacacgcaggaggagttcgagttctacctctccgactccggggcgcgtctcctcatcaccaaccccgagggcaacgtcgccgcgcaggcggccgcctccaagctgggcctcgcccacaccaccgccagcctcaaggacgccgccggccaagtccacctcgccggcttccccgcctccgccgccgccgcggccaaggacttcgccaacgacccgtccgacgtggcgctgttcctgcacacctccggcaccacgagccggcccaagggcgtgccgctcacgcagcgcaacctggcggcgtccgtccagaacatccgcgccgtgtaccgcctcaccgaggcggacgcgacggtgatcgtgctcccgctcttccacgtccacggcctcctctgcggcctcctcgcctccctggcgtccggcgcgtccgtgacgctcccggcggcggggcgcttctcggcgtccaccttctgggccgacatgcgcggcgccggcgcgacgtggtacacggcggtgccgacgatccaccagatcatcatcgaccggcacacctcgaagccggaggcggagtacccggcgctgcggttcatccgcagctgcagcgcgtcgctggcgccggcgatcatggagaagctggaggcggcgttcggggcgccggtggtggaggcgtacgcgatgacggaggcgtcgcacctgatgacgtcgaacccgctgccggaggacggggcgaggaaggccgggtcggtggggcgcgcggtgggtcaggagatggcgatcctggacgaggaagggcggcgggtggaggccgggaagagcggcgaggtgtgcgtgcgcggcgccaacgtgacgagcgggtacaaggggaacccggaggcgaacgaggcggcgttccggttcgggtggttccacaccggcgacatcggcgtcgtggacgaggaggggtacctgcggctggtggggcggatcaaggagctgatcaaccgcggcggcgagaagatatcgccgatcgaggtggactcggtgctgctcgggcacccggccatcgcgcaggccgtggcgttcggggtgcccgacgccaagtacggggaggagatcaactgcgcggtgatcccccgggagggcgtgtcgctcggggaagaggaggtgctggcctactgccggaggaacctggccgcgttcaaggtgcccaagaaggtgtacatcgccgacgagcttcccaagacggccaccggcaagatccagcgccgcatcgtcgcgcagcacttcgtcgtgccggtgctgcccaccaaggcgtaataaaagtctctacctcccgaccaacccatcgcatgccatcgtcctactgtatctatcaagttcgtgtcttgatttgattttttctggttacttcggctacaaccagtagcttcgtttagggttgggtttcccgtgctaacgagtagtaaaatttcggtttcccgtccaaaaaaaaaaaaaaaaaaaaaaaaaggcggccgcaaga

SEQ ID NO: 8694 - DNA, 180 bp, Oryza sativa
  Clone ID: PAT_MRT4530_1517C.1
atggggcttgttgctaactcttatgttcaggtaagcactgttggagttacagatgcaggtgcaaatggcggtggcaaggtgcaatctcttctccaggatatcaagcaggtgttcgataaaatggtcagcccgacaacagcagcccaacctccacctaaactttggcaaagtctaagttag

SEQ ID NO: 8695 - DNA, 234 bp, Oryza sativa
  Clone ID: PAT_MRT4530_15180C.1
atggcgtcaaaaccagcggatgatgatggaggcaagtatggctgcagtacagaggaaggacgacgggaggacggcgagccagtgctgttggatggcaacaagctaggccacccaccgctggcgctgtcctccacgcccctaggtctccaccgctcaaggacgtcacatgggacctcaccgatgctagcaccgttgggacatctccgtctacgtctccacccgattggctgctag

SEQ ID NO: 8696 - DNA, 440 bp, Oryza sativa
  Clone ID: PAT_MRT4530_15181C.1
ttttttttttttttttttttttttttttttttttttagtgaacaaaccacacatgcaagcaagaccttgcactaatttcttttcgtgcacctccccgtgtacattacaattcaatttctttcacttctagaaactatgaaacaatggcacataaagcttgagtgaacagacctaacatgcaaacagaacctcacacaaacggttcttgctggcatttagcacattctcatccttgaaaattgcatccatagctcgtatataaaaagtcccttcatctaaagtgcagctgtgtatcccacatacccccacagaaaaacggatcaaatagtttactcggtgtactcccatcaaaatggttctgttttctgaactctgattgctgcgagattaaatttctgcctgctttcataaagttccccgctgtcaaaaaaagttccccg

SEQ ID NO: 8697 - DNA, 280 bp, Oryza sativa
  Clone ID: PAT_MRT4530_15182C.1
ctaattccactgcaagccaagcgaagaggagtagttcatgttgaggcggaaagtggtgacgcccgcgccgaacaccccgtcgggccccgtggccgtgcggcactggaactgcatcatcgcggtgccgtccgcgcccggccgcgccgccccccacgcccctttccacaggatgcggtctccgaggggctgctcacgagtcattgatgtcacccgcgtcatcgcccggctgcacgccactgatgacaacgagcaacgaattcagctccgcacggcacgctga

SEQ ID NO: 8698 - DNA, 2808 bp, Oryza sativa
  Clone ID: PAT_MRT4530_15183C.1
gacaccaccactccattcctcccatcccatcccaccacctcatcgcctcgtctcgtctcgcctctcctctccaccctcctccacttgtctcccctccgactcgccctctcttcctccgcccacttcgccacagagtgaggttgctgaacttctcaaccagcagctagagtttttcacaattagatgggctgttcctgtttcttcactcgctgaatctaacttccttgatttgatcggatgaaagcagcgacatttgcttctgattgtagctttactgtcttaatttgaataagaagcctttctcttaattataaacctggaaatggatcgcaatgatacttataggcaaaggagtgggggatgcaaaaaggcaaaggagctgcttatatttctgacttcttagtttctttgtgtattatgtaacccagaagcgccactgactgtacttttcccttaagattggtcaaatttgagtcttaatattctcagccacctgaagcagttgaattacaacttgggctcccaggatttactgcatatcctcatccactagaggcaatggataaacagcttggattcttggaatttactggcacgaatccaagaaatgctgaaaaatggaccaccgttagtccaccagtcagccaaccaatggcttgttcttcacaacttgatgtgcttgcccaagatagcatgcacaatcctttgtcaagagggatcaagcggaagtgggttgacttgtcattgggtttaggtaactcctcaagctcatcagactcgagcaagcagagcatgggaacatgctgcaccatgtcttcagcaaaggacagggacgatggttcatctgttgatttggacatgaattttcagtttaatctgtataatgaaggcacttcaaaactggatagttatgattgtaatggcaagaaagttttggagaagcctgtggatctcgagttatctttgaattttggaccctgtgaatctgctgtgacgaatgtggacttctctgcagcaaccaaacaacaggccgtatttctgcaatcatgcaatatgtcctcagtgcctacagtggacgaaggatcaacatctgctcgctggaaatctggtggtaagctacttccttatctgtatcagtccaggaacaacactggtcatttttcaagtaaagagttaccaggtagctccaaccagtctcaagatcttgccccactgccaaaaatgatacaaacgccacaaagtccagtaaccagtacttctggtgttgtcagctttcaacaacgctgcaacagcacaaaaatctgttcacaaccaggatgtgcaaaaggtgctagaggttcttcagggcgctgcattgcacatggtgggggtagaaggtgccagagagaaggttgcaagaaaggagccgagggaaaaactatcttctgtaaagcacatggaggtggcagacgctgcgagcaccttggatgcacaaagagcgctgaaggccgcacagatttctgcatagcccatggaggtggccgccgttgtagccgtgatgggtgtagaaaggcagcaagaggaaaatctggcctttgtattaagcatggtggggggaagagatgccaaaaactgaactgcacaaagagtgcagagggccaatcaggcttttgcatcgctcatggtggtggccgtcgctgcaaacatgatggttgcacaaagggagctcagggcagcactaatttctgcaaagctcatggaggtgggaagagatgcacacatccgaattgcagcaagggtgctgagggaagcactgctctctgcaaggcccatggaggagggaaacgctgttcagctgaagggtgccctaagagtgtccatggtggcactgagttctgcgttgcccatggaggcggaaagcgatgtgtggtaccaggatgcaccaagagtgcaaggggacggactgactgctgtgtccgtcatggcggtggtaagcggtgccagtttaccggctgcagcaagagtgcacaggggagtacagacttttgcaaggcacatgggggaggtaaacgctgcttatggggccaatcagggtctggccttggagacggcagcggtacttgtgagcgctttgcaaggggtaagaaaggcctgtgcgttgcacacaatgcgctggtggaagatagtcgagtccgtggtggtcagacagttggaactattgccctgcctggttctactggtgctgattctgatgttagtcatgggacccttcctggaaactctttcaactttggtgagacatttgccgctaacaccaagcaggctcttcatcatgttcaatcacctgttccagaaggcagggtgcatggtggcaacattgcggctatgcttgctaacagtatggattatcagaagcaattgaactttagcaccggggctagcacctctgatcgcaactggctgtaatacagttcatgcattaaaaacaccaaccattcccttcgctgggccctgtttcatttcaactggcaagtaacttatatgttcctaccgtgctgtgtatttaggaactgtggatcctgatgatttagtggtgctgtgttaatagggggcttctagtgcttcgtttgtagccatcttgtgtcataaataaaaggggaaagtagtgtaatttatattagtgcgcaattgtaaaattctaatgtttgttgaagatgtaacatatcttcgaaactcatgttgagtgtttgtgattgcaatattagcattatggttggtacaaaaaaaaaaaaaaaaaaacctcgagactagttctctctctctctctcc

SEQ ID NO: 8699 - DNA, 175 bp, Oryza sativa
  Clone ID: PAT_MRT4530_15184C.1
ttgttttggcactgatattatgctatattaagttgtgatgtcacttatggcagtactttacattatacaagcagcttatttctgaagagccgctaggctgtagaattgctcctttcttactcatgaggggaggatacagcactcacgttccactaccttaccctttttctaagaa

SEQ ID NO: 8700 - DNA, 937 bp, Oryza sativa
  Clone ID: PAT_MRT4530_15185C.1
tttttttttttttttctccacaaacaattataaattttctggttgcaacgaatacacgacaaacatttcaaaacgaaggggcaccagcaatttgatgacattagcttagctgctattatcaagtgcaacgtgaacaatgacacagcagaccaaaattgtagcgagtacaaactagagtagatttgtagcatagttgatccaattctagcatagatatcaattcaagtctcaatcactgttacgaacagaggtagctggaaacatgaacaccacgaggccccttgacaaaaaaaaaagcgagctttaagcgatttacagcttagttggctgcctgttcttcttcttggcaccagacttggaaacctggaggctgcggtacactgagctaagcctcgcaagagccggcttggtcaggtcaggcctgtagtagttgtcactcacctggttcttgacagccttagccattttgcggaactccttgcgcatcacagacttgtggtagagcttcgctggggcattctgcttcttggtcttggttgtggagaggaccacggccgcgtccttcacgcctgatggctggatcgtcacggtcttcttgttcgccaagccagagtgcttgtaggagtggacattgtacaggttgttgggctccttggtgaactgcaccttggcattgctattcccgaactgcttcaccaggaagcagttgttcttcttgacaatctcccagatcaaaggctccggaaccgtcgccatttcgcttcgccggagaagatggggctgcggcgccgcctcgctgtgctccggtgtgggggtggtggtggtggctgccggggccggccgacgatgaagccgcggcggcgcgtcgctgtgctccggtggcgtggtggtggctgcggcccgtcgcgccggccgacggcggcgcggaggctcgctt

SEQ ID NO: 8701 - DNA, 201 bp, Oryza sativa
  Clone ID: PAT_MRT4530_15186C.1
atggtgcacctgcttctgcattcagggatcaaaacttcacggacaaacatacttgaaagtagctgctggagctgtgatgtgcgacgacagaggaagatacaagacagcggcagcccaattttgtacgcaaggcgagatgatggtggaagttatggcattgctgtagagcagctgaatttacagatccggatcctccctgcg

SEQ ID NO: 8702 - DNA, 2268 bp, Oryza sativa
  Clone ID: PAT_MRT4530_15187C.1
atgttgcaccatgctgaacctgaagttgtggctggctctgctcgtggtttggataatttcaatgcattacaaaaggcatcaaaggaacttttctacgatgacgcaaaggagtacgaggatttggacagctgcccaacatgcaagagtagtcgatacaaaacaagccgtagccagtccgaggatgcaagacagtggaaggaatttgacacaaagtaccataagtttgcagaggacccaagaaacatcaaggggaagacaggttgtgttatttgtgtggatggtactgtgtacaggtatcttaagggatcgaagaagctagtgtacatgcggcaccggcgtttcttaagaaagaaacacccgtaccgctccaaagcagaatatttcgacggtactgttgaggaaggtgatgcaccagaaccatggaagggtgataaagtgttcagaatgaccaaaaacctgaaggttgtttttgggaagtacctttcgtactggaaagatttagacatacgccattccattgatgtcatgcacctagagaaaaatgtcttcgatagcaccattgggactatactggacataccaactaagagcaaggataggctgaaatcacgtaaggacctcgtggatatgcagataacgataaagcttcatcctgtggatgaagtcgaaccagttcacgtaaagctggtcatcacaaagctgtgctatttcttcaattccatatctcagaaagtaattgatcctgaagagttagccggcatgtctgtggacaactttgggctgacaattttcgacttcgacaacgtaggccacaaggaagacccatgggtgcttgccgatcgggtcgctcaagttttctatgtgacagacccatctaatttgaagaaagacatagttatttcgggaaaacaaagtattttgggagttgatgatgtcgaagatatcgaggcatacaatcaatatgagaacatgatactatttacagattttcgaaacaagatactacgcgtcgaagaatcaattggcgaatcgccgaagccatacatgagaaatgaaggcgcgaaaaccctagcgccgctaggctgcccaaattttgtgcgccagcgaaaaaccctagcgcctcctccgccaaccgccgctgcctcctccaccgcctactccgccgaccgcctcctccgccaacctcgtcctccaccgaccgccgccacctcctccagcgcctactccgccgaccgcctcctccgtcgaccgcgtcctccgccgaccgccgccgcctcctccgccgcctactccgctgaccgccgcctactctgccgaccgccgccgcctcctccgccgaccaccgcctactccgttgaccgccgcctcctccacaccggctactccgccgaccgcctcctccgccgaccgtcctcctcatccgtcgacctctgccgcatcgtcgctgctatggaaaaacacaatgaagcacaacccgcgggtgacaagtccaatgaaactgaacttatcggcttgcaagtaatcgcggaagaattgtcgtcatcaagctccggtgaagcagggagtgactcttatcactcaccgagtgaccctcatccttctcctccaagaaagaataagggcggtggtgaggacgacgaggttgactcggattacattccccctgagccggtgggcgatgtagtcttcaaagatccaaagctccagcaggtagccaacaagatgaaggagatcgtcacacaacagaaggatgggatattcgtgccagacagagaagtggaccaactgtcagttgctttgggaacctcggagcacggaggccgcgttcgaggagtctcctcaaaggctagttggaaggatggcttcaaagaagatgctgctagctacaagaaacgtgatcgatataaggaggaactgcttattccggttagaaggacaggaaagacaattcaggttgcaactggaagggcaatgccagggcgcagatttcattgccaagatataccagatgactatgccaaggtagaggtgcggacggatcaacggattctccgccaaggatactgcggtcactatgtcatgccttgcgtaacatggacgaagaaccgggggatcctccagaagatgcatcacctcggcatcaacctgaaaagcaagccgatcagcctgaaaaacaagcagatgaaccagagcttgcaaagcaatccaatcagcctgaaaagcacgcagattaaccagagcttgcacatccaatgcctgagcaactag

SEQ ID NO: 8703 - DNA, 626 bp, Oryza sativa
  Clone ID: PAT_MRT4530_15188C.1
tctgtgatttcaactcatgacttgattttctccctactattagcttccctgggaaacatataattcttatgtacacaattggatatatagttttacattgcaaatatgaactgagaaatataaccagttgaatcattggatttagtacactactcaaaacctatgctttaaactagctggattctttattggttagcttatgtgttatttttggttttgttggtggtgtgaaatcggggataataattaaccttccaaatgaagttcactgcattagttcaaattcttattctcaattaacatttaggcatgaaaggcgaaatctataatatgtagatgtgtttcaacaaactggagtaactaaatgatggaaaagttatgttgcaagcaaaaacgtgaaataaaactctacttacatatccaagacctgctgtcttataaaatggtccaaccatagtgtactctttgcagtgctttgcaagaaacaattttatgcacgggacttcgtgcacgaaggcagctataccaccgtttttgcttcctttcgatagcgcactataaaaatcatcgggggtatcatatgccttgatcttcgatgtgttaaaattaagatcttccaaaagatt

SEQ ID NO: 8704 - DNA, 1668 bp, Oryza sativa
  Clone ID: PAT_MRT4530_15189C.1
atgaaggagatcgtcacacaacagaaggatgggatattcgtgccagacagagaagtggaccaactgtcagttgctttgggaacctcggagcacggaggccgcgttcgaggagtctcctcaaaggctagttggaaggatggcttcaaagaagatgctgctagctacaagaaacgtgatcgatataaggaggagttagtggctagctgtagggcagcaacattgcaagaatgcataagattttttaaccgaaacccggaacttcagcaacgcgttgataggatgcaagatgcgtttcctatgcccgatgtccctagctatccagtcgatgatataaaggaagatactccttgcagactgcttattccggttagaaggacaggaaagacaattcaggttgcaactggaagggcaatgccagggcgcagatttcattgccaagatataccagatgactatgccaaggtagaggtgcggacggtaaatgaggatcacaggatgtacgagatagactttccaacacccgaggatatcgtgtaccttggagatgcagttgaccagataatactatggcacaaaaaggatattcaattaggatcaacggattctccgccaaggatactgcggtcactatgtcatgccttgcagcttgcacatccaatgcctgagcaactagagcctgagcagccaatgcttgataaagcagagcttgaaagggaagaagaggttgtacaagaaagggaaaaggaggttgtacaagagagggaagaagaggctgtagaagagcacaaagaaaaaagtgcgcccaagaaaaagtttgtggtaaaggcattcccaggaaggaagagagatatcaaggggaaagcaaaggatgtttatgataaaaggaaagcaaaaggcctgaaaataagcttggataaaactttgagttttattcctactgttgatgtgccagaactatttgagaatggcaaagcattcctccccacatgggaattagaagaaggaccttggcaattaaaaaggtggcatgaatggatgaattacgtcatagcagaacagatgcgtgagactgtcggcttcctagacccttgccttataagtaagccgaaccacaccttcacgctagatgagaagagggtaccggcacatgttgcggccatgactcccgaagagagagatgcatacctgacagaaaggcatcaagctaaaattcgcgatgtggctacttacgtagctatagcacttgaatcaatgcagggcaaagaatgcatctacgccccatacgcctttgacgaccactggattacttttcttctatatccaaagtataacgaagttatagtcttggattctcttgataaagacatacaatcatatcaggaaatcctcagaatcttcgatcttgcatataaaaggtattaccaggtaggcggacaacggcgaaacgacagagatcaaatatacatccgcaataagtggccgcttctaaaattccccaagagtgatagggagctggatgataaatccattcagaatatacaacgagacttgtgctatttcattcacaatgaatgttgtcaccagcttgggaggttttttgataaagaagggcttttgggcttgccagaaaacgatattctttctaactggagcaagcatgcaatttaa

SEQ ID NO: 8705 - DNA, 373 bp, Oryza sativa
  Clone ID: PAT_MRT4530_1518C.1
attattatacgggtggggtttttttttatttttttttttttttttttttttaaggttctgcaactaggatcattcatttgggacatatatcccgcaggggactacacacacttttgaaacttttatcaaattacatgaacttttcacatgggaaattttcaatcccaaaagaccaacccaatgcttccggcatgtccctattaataattactcccatccccaaggccaacacaataggaccggaatcctatgatgttttcccatgctaatgtttccaaagcgatggcttgctttgagcactttaatttttttaaaaaaaccgccccggaggcaccacccggcccgttaaagcccggagcccatttcccgcaaa

SEQ ID NO: 8706 - DNA, 2295 bp, Oryza sativa
  Clone ID: PAT_MRT4530_15190C.1
atgaagctattttcactggcggcgctctttagccaccaccacctttatcgttttttatggcggggagaagtttttgaactcgaatggtttgatagatcttttgtaccaaaggatgaagtgttcaatgactggaatttcatggtagtagaagaagaatcggttgatgatgatggttatgacacagctaatgatgttgatgatggtcatgtcacggtagatgatgctgatggtagtgatggaactgcttttgatttggaggagatgttgcgccatgctgaacctgaagttgtggctggctctgctcgtgagtacgaggatttggacagctgcccaacatgcaagagtagtcgatacaaaacaagccgtagccagtccgagggtcaggatgttgtccttgacgatcttgaagagtccgatccatgcaaagacagcaacaaaaagaagatttcccagctggtcatgtggtaccttccggtgaaagatcgtttgaagcgtttgttctcgaacccgagggatgccgaattgatgcgctggcatcatgaaaagcgaaaaaaggatgggatgattcgacatcctgcagatgcaagacagtggaaggaatttgacacaaagtaccataagtttgcagatgacccaagaaacatcaaggggaagacgggttgtgttatttgtgtggatggtactgtgtacatgtatcttaagggatcgaagaagctagtgtacatgcggcaccggcgtttcttaagaaagaaacacccgtaccactccaaagcagaatatttcgacggtactgttgaggaaggtgatgcaccagaaccatggaagggtgataaagtgttcagaatgaccaaaaacctaaaggttgtttttgggaagtaccttccgtactggaaagatttagacatacgccattccattgatgtcatgcacctagagaaaaatgtcttcgatagcaccattgggattatactggacataccaactaagagcaaggatgggctgaaatcatgtaaggacctcgtggatatgcagataaggaaagagcttcatcctgtggatgaagccggcatgtctgtggacaactttgggctgacaattgtcgacttcgacaacgtaggccacaaggatgacccatgggctgcccaaattttgtgcgccagcgaaaaacctagcgcctccaccgccgaccgccgcctactccgccgaccgcctcctccgccgaccgcgtcctccgccgaccgccgccgcctccaccgccgaccgccgcctactccgctgaccgcctcctccgccgactgccgcttactccgccgccgcctcctccgccgaccgccgccgcctccaccgccgactgccgcctactccgccgaccgcctcctccgccgaccgcgtcctccgccgaccgccgcttattccaccgcctcctccgccgcctactccgccgaccgccgcctcctcatccgtcgaccgccgccgcatcctcgctggaagaataagggcggtggtgaggacgacgaggttgactcggattacattccccctgagccggtgaagaatgctccacgccgctcaaaaaggaaagcgcaagctgcacctacagaaagggaaccaactgtggaagccgcatctgccgtgtgcccaacagcttctatcttcaaagatccaaagctccagcaggtagccaacaagatgaaggagatcgtcacacaacaaaaggatgggatattcgtgccagacagagaagtggaccaactgtcagttgctttgggaacctcggagcatggaggcagcgttcgaggagtctcctcaaaggctagttggaaggatggcttcaaagaagatgctgctagctacaagaaacgaaagacaattcaggttgcaactggaagggcaatgccagggcgcagatttcattgccaagatataccagatgactatgccaaggaagaggtgcggacggatcaacggattctccgccaaggatactgcggtcactatgtcatgccttgcgtaacatggacgaagaaccgagggatcctccagaagatgcatcacctcggcatcaacctgaaaagcaagtcgatcagcctgaaaaacaagcagatgaaccagagcttgcaaagcaatccaatcagcctgaaaagcacgcagatgaaccagagcttgcacatccaatgcctgagcaaccagagcctgagcagccaatgcttgataaagcagagcttgaaagggaagaagaggttgtacaagaaagggaaaaagaggttgtacaagagagggaagaagaggctgtag

SEQ ID NO: 8707 - DNA, 318 bp, Oryza sativa
  Clone ID: PAT_MRT4530_15191C.1
atggcgcacggcggcgctaccgcggggcgacgacggcaaacggcggtgaccgacggcgagcgacggcggtgtgaccccgagcagcaaggggcagcggcgctaggaggagaggggaaggacgacggggttcttaccgaggattcggccggcatggaggggcaacggcgaacggcggcgaggaatgaccaggaggcgacgacgaacggcggacggtctccggaaccacctagcgggcatgatagagagagagaggaggatggaagagggcaaggacgccggccgaaggcggcggccatggcggtgctcaccggcacatga

SEQ ID NO: 8708 - DNA, 588 bp, Oryza sativa
  unsure (1)..(588): unsure at all n locations
  Clone ID: PAT_MRT4530_15192C.1
ctcaatcctggctgccgctgccgacgctgctccnaaagacaataananctgttgcantacgataaagtacngcggganngaaccacaaaagggctcccagcnntgtntgaaattntccaatccccggcgccccaaagganaagggggantttcttgattctnanatagggaaggcggggggaaaacatctacccccctccnaacntggggaaaaatncccaaaaggggggatngctccccccctcttccttgccccaaaaaaaaattccccccctccnttccccntttggggggatcttatccccggcaaaagtttgttggnaaacncccgccgggcggggggttttanccnggntttccaanccccggggaaaaanananggttcnctttcccctaaaaacttncccccaaaacttgcngggnggggggtccccccnaantttccccngttgggccccccgggngnttctctccnccggggggggcnaaaaggccccccccaaangttttttcccccnggccccaaattggggnnccccccccttttncccngggcggggcccccnggggggttccccccncctccc

SEQ ID NO: 8709 - DNA, 1083 bp, Oryza sativa
  Clone ID: PAT_MRT4530_15193C.1
tctcagcgggtacaccatctcttcattccgtattccttgtcgagatccaccaaccgttctcgagtgatcgagaaggcggagagtatggtggtttgtctctgcatgatccgacaaggccttatccgctctgggcgtccctagccgaagttcccttaggttcctcggaggccttgccaggatggcgtaaagggatagtaggattggtttcaactctaggtgtcgttatggtaagggatctctgggtaaaatacttggcaatattgcgtacctaatatcaactttgttggagtaaaggaaatgggagaatcgctatacctctggttggggaccaggtagtagtcgtaactcgaccacgctggtcaaggaccaggtagtagccgtaactcgaccacttaaagtggaaatagtgggagaatcactacactgctggttgagaaccaagtgcagccttaactcgaccacctaaagtggaagtagtgggagaatcgctacaccgctggtcgagaaccaggtgtagtcttaactcgaccactataattgaaggtagtgggagtatcgctacgcctctggtcgagaaccaggtgtagccttaactcgaccactagaagtaaatgtacgagagatcgctacgattgactggttgagaaccagtgagtaggtatctctcgaacatttggagttggtacaaggaccgctacgctgccggtcgaagaccagtcgtagctgtccctcaaccatctgaattcataacccttttctcaaatagcccagccatagccggtgctatgagataggtcatcggtcttcgttggtaggttgggcgcgacaactctgcatttgtcaagaacgttcttgataatggggtgtgctcgaccacaacctactcgagtgcttaaatgttctcgatgccgcacacgtggaggaatcggtatcgtattgctcttggatgctgccgacacagtagctctcctcgacgaagatggttccgattccgtcgggggacgtactctggtcgggttagatctcctcacagccgaagtcatcgagtagcttgttattggagaatccatctcttaaacccat

SEQ ID NO: 8710 - DNA, 5326 bp, Oryza sativa
  Clone ID: PAT_MRT4530_15194C.1
ccaccgtcgggtgccactccgtctccgcgctgcggaagaacttccccatcctctcgctgctgtcgtcgtccccgtcgtcgccctcgttcctccactccgactccggcggctcttcctccgacggctccgacgacgacgacgacgacttcttcggccggcccagccgccgatcctccgccgcgggggcgggggcgggggcggcggcgccgtcgctgcagcccgcgggctgcgcctcgttcgacctcgcctcgcatccggacctcaagctcgcccgccgcatcgggagcgggccgccgggccccgcggggcaggaggtgtggtccggcacgctgtctcgtggtggtgggggaggtggggccaagaggtgtaagcatccggtggcggtgaagagggtgcccgtgaccgcgggggatgtgcttgagggcgttcaggaggaggtggagcggctgaggcgcgccgcgacgtggtgccggaatgttaccacgttccatggtgctgtgagggtcggcgggcacctctgcttcgtgatggatcggtacgcggggtctgtgcagacagaaatgcggcagaatggcggtcgcctaacgttggagcagatcctcagatatggagcagatattgctcgtggagtagcagaactccatgcagcaggtattgtttgtatgagtataaagccgtcaaatatccttttggatacaaatgggcatgcagttgtttccgactatggtctttcggccattcttaagaacctcactagtcgtagagtgtctgatgattccaacatggttggcttggatgctacacttcttagccccaattatacagctcctgaggcttgggtgccattgaagaagtcaatgaatctgttttgggatagtgcaaatggaatattaccagagtcagatgcatggagttttggatgtacacttgtggaaatgtgtactggtgctgttccatgggctgggctaagtgcagaggaaatttgtaagtctgttgtaaaagagaggaagccaccgcctcaatattcaagggtagtcggtgtaggacttcctggggagctctggaagatgattggtgactgtttgcagttcaaaccttcaagaagaccatctttccaggacatgctaaaaacttttctgaggcatcttctagatataccaaggagcccacctgcaagtcctgaaaatgatttcacaaatgcaagcatgcccaacggtacggatgtgccaccagcctcagttctggacatggtccaggacaatccaaatgctttgcatcatcttgtatgtgaaggagatgctgctggtgttaggaatcttcttgcagaagctgcctcagatggaaatggccgtttaattcgttcgctcttggaagcacagaatgcagatggatatactgccctacatttagcatgccgaagaggctcagcagaaattgttgaagctattgtggcttatcaagagaatgtggacttgttagataagaatgaaaatcctccaataatatttgctatggctgctggctctccacagtgtgttcgcgcacttgtaaggagatcttctgatgttaattcgaggcttagagaaggtcttggtcctactcttgctcatgtttgtgctcatcatggccaaccagagtgcatgcgggaattgctcatggctggagctgatcctaatgcaatagacggagaaggcgaatctatcctgcatattgctgtggccaagagatatactgattgtgctatcgtcttattggaaaatggtggttgcaggtctatgggcataccaaattctgtgaataaaacgccattgcatttatgtattaaaacatggaatgcggatgtggtgaaaagatgggttgaagttgcatctgaagaggagatagctgaagcaattgatgtacctagccctgttgggactgctttgtgcatggcagctgctcttaaaaaagagcacgagaaagagggtcgagagttagtacgggtattgctttctgctggtgctgatcccacagcacaagatgacccacactgtcgaactgcactgcatactgcagcaatgatcaatgatgcagaattggttaagattattttggaagctggagttgatgtaaatataagaaatgctcagaacacaacaccacttctcgttgcactgaacagaggtgcaaactcctgtgttggtttgcttttagctgctggagcaaactgcaatctacaggatgacgacggcgataacgctttccacatagctgctgatgcggctaaaatgatacgtgaaaacctctcatggattgttcaaatgttacaacagccatcgccggctgttgatgtgagaaaccacaggcaagtttatgatgtatctggtgttaagctaaacttacttcaatacaacgtgatgcaaagtaaaagaggctggacattgcgagattttctggagaggctcccacgagaatggatttctgaagaactgatggaaactttagaagaaaaaggagttcatctcaccccaaccatatatgagttcgcagattgggtgaaatttagaagaacagttactgaaccagcttttggctggcaagcccatgctaggtttcgctctgtgctgatcatgattgttttaaaagtttacactgatgtactggatgttgtcaaaaatgatggcatcctggtcgtcccaaagaaagaaaatgatgctcgctgcaaatgttgctcttctgcctactgcaaaaaggcaaactttaaaaatctgataataggagccactgttctgattttcatgtcaatgttaatgagaattccttccatcaatatactaaccgaagatttgtggagaatgtctcatggatcaaataacaaattcactcatcttagtagatttggatggcgtggtcagtcacgagatagcattgggacagttctctgtgttgatgatgatggaatcttgagggttggttttccaggagcttctaggggatggagagctgatcctgctgaaattgtaagggttgaagaatataaggttggtaactgggttcggattcgtccctcattaacggttgctgtacatggcatggaatctattactcctggaagtgttggtattgtctactcaatcaggccagacagcagtcttctattgggactttgctatttgtcaagtccatggctttgtgaaccagaggaggttgaacatgttgatcccttcaagtgtgaagctcatgtttcttcaaatttccagattggtgaccaagtatgcgtaaaaaggtctgttgcagagcctagatatgcctggggtggtgaaacccatcacagcgtgggaaaaataattgacatcgagagtgatgggctactcataattgatattcctaaccgggctgtacattggcaggcagatccatcagacatggaaaagatagaaaagtttaaggtcggtgattgggttagagtgaaggcagcagtaccatcccctaaatatggctgggaggatgtgactcgtagcagtattggggtggttcatagtctagaagaagatggagatatgggtgttgctttctgcttcagaagcaagcctttttcttgctcagttgcagatgtggagaaggcacagccttttgaggtaggagaaaaaattcatgtgttaccttcaatatctcagcctcgccttggatggtcaaatgaaactgcagcaaccatcggggctatctcaaggatagacatggatgggactctaaatgtcaaggtgtctggcagaaatagcttgtggaaggtagctccaggtgatgctgagaggctttcggcttttgaggttggagactgggtgcggttgaaatctagtattgggagcaggcctacttatgactggagtgttgggaaaataagtattgcagtagttcatagcattcaagactctggttacctggagttggctggttgtttcaggaaagggaaatggttaactcataacacagaaattgataaagtagagcctctcaagattggtcatcatgttcggttccgtgctggaattacagagcccagatggggatggagagatgcaaagcctgattccagaggcataattgctggtgtccatgctgatggagaagtaagagtagccttctttggtgtgcctgggctgtggaaaggtgatcctgcagatcttgagattgagcaagtttatgaggtgggtgaatgggttaggctgagaaataatgcagatgattggaagtcgctcaaaccaggtagcattggcgtggtacatgggattggatatgaagatgatgtctgggatggaaccattcatgtggcattttgtggtgagcaggaaaggtggatagggccttcaagccagcttgaaggagtcagcaagtttgtcgttgggcagcgcgtgcgggtcaaactctgtatccaccagccaagatttggctggtctaatcataatcattctagtatagggaccatctcatctattgatgctgatgggaagcttaggattcatacacccgctggtgcgagagcttggttgatagacccagcggaggttgaaaaggtggaggaagaggaagaagtctgtgtcggggactgggtaaaggttaaggattgtgttgcgacccccacatatcagtggggtgacgtgaaccataatagcataggggtaatccaccgggccgaggatggtgaactttgggttgccttctgtttctgtgaaagacaatggttgtgcaaaaggtgggaagtggagaaggtgaggccattccgattaggggacagagtacggatacgacctggccttgtaaccccacgttggggatggggggaggagacatatgagagtaaaggtgaggttgtaggcgttgatgcaaatgggaaactgaggatcaagttcagatggagggatgggctttggattggagatcctgccgatatcgttcttgatgatatcccatcactgacagaggcttctaatggcttttgttcatagtctcgcggtattcttttgaccccattacctgatttcttgctcccttccattgtgcagtatttcaaatttagtaaggtcccaatcatgcaatggagttgcaagttgcacataggcaccatcgcataggcatggcgggttgtatttcgtgttgataaagcagggggaaaagaacgaaatgaaggctgaaaaagaactttgaaatagacatgataaccaccacctaggttttttacatgtataattatgggcctgactccttttgtatcatattacccgtgtacaggtttggacctgaacattaatttaattgatagtgtccttggatctttaaaaaaaaaaaaaaa

SEQ ID NO: 8711 - DNA, 346 bp, Oryza sativa
  Clone ID: PAT_MRT4530_15195C.1
aaaccaaagggccctggatccgggatttgggccacaaaaagggatgggggcaatgggaaaaaagggtcttgaatgaaattattgaaaaagcaaggttggccctaaaagggggaaattggcaaacaggacaatggggcttccctattttaggctcaaaatcagggcaaacaagaaagaaagcaaaaggggaatccccctttgggggggggaaacttttggacggaaggggggaggggttaaatcttttacgaacgggcacactcgggggtcttggcaccagatgaatcggcgatctttgggaaaaggaccaacccggcataggggtttagcaaaccaaccgggggac

SEQ ID NO: 8712 - DNA, 2163 bp, Oryza sativa
  unsure (1)..(2163): unsure at all n locations
  Clone ID: PAT_MRT4530_15196C.1
ttcaaccaattgctcaacctcaggccatggcggttggaaacgactttgatgcagctgaggctgatgatgctgatgaagatagagatgaggttgatgacgatgatgatggtggtacggacctgccctcgtcctcgcagggcgctaagcggaagagagatgatgatccatcaggcagtggagatgacgacgaggacgatgatggtgtcgaggacctgaggcccttcaagcaccactgaccaagcagcaatgtacatggatcccttcctccccctcttctcagctagaaagaaccaagcaagcagcagcaggagcatcagcaaacagaaatggtgggtttccccctgttttttcttagcgtttttcttgtaaagactttggattgagagagagcttcttcatccagccttcctcttcaaacatcagattttaggagggaaaatggagatacctgtgtagcaacttagcaagtagccatggcagctcagtttcagtttcagtttcattgtctccctagcctgcaccatctcttttgattttcttttttccctccagaatttcaaatggtagttacaaggcgtcgctgctcgagggccccgtgctggtctgggccgggaggctctgcctctactacgcgctcctccacatcggcctcgccggctccccgcgcaaccccttcctcgcccacgagattggcgatgatggcgcggctggtttcgattcgggggacgacctacgaagtgggcggacaagctgcgcggcggcgcgccaggcgaaaacgaagcccaggataagaggaagctagttagcaaatggaaaccaacaactaaaggcacgctgaagaggacttaccgagttcgttcagtagaagaaggtcggcggattcttaaagaaattgctttggttctctccgaagatgaccactttgtggacgcctccagtcacaagggttgtcaaataaggagggaaagtgcgcacggcgagagtgtgtgctgctataatgtgagagctctgttcgatgagcttcctacccctcacctagttctggagattacagctttccctgctggacctctcactgataatgactaccgcaaggccgagaggctcgaaatggtgctgaggatgagtgcttccatttaatttcagaacacccattttccatttcagcttacttttgcccaagctgtaaattttctaccgatggggctcgaaatggtgctgaggatgagtgcttccatttaatttcagaacacccattttccatttcagcttacttttgcccaagctgtaaattttcctaccgatgggcctgtaaattgattcagtcttgctaagaagttaagaactacttgtaaaacctgagttctgctcaatctttctcgcattcaatcattagtgtttcaaataaggagggactgtgccacggcgagagtgtgtgctgctataatgtgagagctctgttcgatgagcttcctacccctcacctagttctggagattacagctttccctgctggacctctcactgataatgactaccgcaaggccgagaggctcgaaatggtctgaggatgagtgcttccattaatttcagacacccattttccatttcagcttacttttgcccaagctgtaaattttctaccgatgggcctgtaaattgattcagtcttgctaagaagttaagaactacttgtaaaacctgagttctgctcaatctttctagaattctaatatttgtgctcagtctttctagaactctaatatcaagaagtgccccggcacccccctccccctttaggcccccctcttacttttcactggccgtcgttttacaacgtcntgactgggaaaaccctggcgttacccaacttaatcgccttgcagcacatccccctttcgccagctgcgtnatatcgaaaangcccgcaccgatnncccttcccaacagttgcgcagcctgaatggcgaatggcaaattgtaagcgttaatatttgttaaaattcncgttnaatttttgttaaatcagctcattttttaaccaatangccgaaatcggcaaaatccccttttaatcnnaagaatanaaccaagaatagggttgaatttttnttncnctttnggaaaaaagaattccctattaaanaanctgganccccacct

SEQ ID NO: 8713 - DNA, 339 bp, Oryza sativa
  Clone ID: PAT_MRT4530_15197C.1
atgagcacaaaagaatcacaaactctgggaatttatctagcacatgaacaagacaagaataactcaacaaggcccggcggcggcagcggcagagtggatgcgccgacgctgtgctgcgaccaggagcgtatcctttccacaccaggattatccacggggattgggccccgatcccggccgttcccggcccaaccgaacaagcccttggagttcgcccccacggacctcaacgaccgtgccactaaggtggacatgaaggaagacgactcgtgggagaaggttgagtcgcagtcgattgaggaggagtgtgaggccgtcgtggcagctgaggaaggctga

SEQ ID NO: 8714 - DNA, 3687 bp, Oryza sativa
  Clone ID: PAT_MRT4530_15198C.1
atgtctgatgttctatccgggctctcgctcttggcttccaaaagcgatctcgtggacctacgtcgctcggtggccgtcgtcacttcacgcctaacatccctggaacaacaccatggattgtcagctccaccgaacaattcatcggcgccacgcctcggtggcaccggcatcctgccgaacccatctcagttgccgtccggcgctgacaccgcgacagaacacagctccgacagtggcaacaatggtggtggcgttccacgctactacaagctggagttcccaaagttcgacagcaaggaagatcctctgaattggctcaatcactgtgagcaattctttcatggccaacgcacggatgctggcgatcgcgtgtggctcgcgacataccacctcaccggcaatgcgcaagaatggtacttccaccatgaacaacacaaggggccaccagattgggacaccttcaaggatctctgctacgcccagttcggcccaccaattcgtcacaaccctctcggcgaacttaagcgtctgacgcagacgacgacggtggcggcgtaccagtgtcggttcttagcccttgccagccggacagcggaattgctgactgaaaaccagcaagttcagttgctcactgcagggctccgagaagacttggcaatcgacgtcgagatcaaccgccccgacgatctccaggaggccatgagccttgctcgggctttcgaacgcaaggcactgaagcaggccgatgggacgcaggggcgaagccagcatttgagattaggggggggggggtgtagtgatagtggtgttgggataggggggtgttggcaccctcccccccttggctgcgccactggcgggacgcacccgataggacgaacatcgttccgcactgctcatgcgactgtgcctgccactccatcgggagccggtgcgaccgcgacagacaatgccgactctgccccgaagcaatttcatcagctctcgctggcggaattggtcgaccgacgtcgccagggtctctgctacaattgtggtgagaaattcgtccgtgggcacaaatgtgctcgtctcttctacattgagtatgacgagaccgcacccgatgacgacattccggtggccgatgatgaccacagcgccaacgagccacacgtgtttctcaatgccatctccggcattgacgggcacactatgaatcttccggtgatagtgggcgacgaacgcgttgtcgccctggtggactctgggtcgatgcacaattctgtgcagccacagctcgtccaacacctacaacttccactgtctccggtgcacagcgacttgcacgtcatcgtcgccaacggggatcggctggaaatcacgctctacagcttggcgggcagccggccactgctgtgtgcagcgctcgccaacgacgacctcttgccgcgcctcctggcggaattcgacgaccttttcgccgagccacaaggactgccgcctgcctgcaccatcgatcaccggatccatttgaagacaggttcggtgccggtcgcagtacggccatatcgctacccgcagcttcaaaaggataagttggagcggcaatgtgcaaccatgcttcagcaagggataatttggccaagcacgtcgccattctcgtcccccgtgctcctggtctgcaaaagcgacgccacttggcaattttgtgtcgaccactgggcgctcaacgcggttacggtgaaggacaagttacccatccccattgtcgatgagctgcttgacgaattgcgcggcgcatgcttcttctcgaagcttgatttgcgcttcgggtaccaccaggtgcggatgcacgacgccgacatccacaagacggcgttccgcatgcatcaagggcacttcgagtccctggtgatgccgtttggcctcacgagtgcgccagccaaattccaagcactcatgaacaccgtgctcgccccattcctccgccgcttcgtccttgttttcttttatgatattttgatctacagctcaacgtggtcggagcatctgcaacatatccgcgccgtccttcacgtcgtccgcgacaacaagctggtgctcaagcgctccaagtgtcgatttggcgaacgcaccgtgcactacctgggccatgtcgtgtctgctgagggagtggcgatggatgaacagaagatccaggcggtggaaaactggcctccgccgcgctcggcggtgcaccattggcgggcatatttgtggggacgcacgttcactgtatggacgaactcctacagcctcaagttcctgctcgaccaacacctcttcaccatcccgcaacatcattgggtaagcaagctaatggggtttgattttacagtggagttcaggccagggcgggtgaacgtggtggcagacgcgctctcacatcgtgatcaggaagacgccacggcttcgctcagtgcgatatctgtgccgtccttccaagtgttaaccgatctgcgccaggaagtcgcgatggacaccgacctgtccgctctccgcgacaagatccgtgacggcacccagggactagcgtgggcagtgtgtgacggtctcatcacccacaagggccgcatcttcgtgccagcattgtccccattgctaccaacgctgctggcgacggcgcacgccggacatcgccatggacttcgtcgagggtcgtcgagggtctgccgcgcattcacgggaaattggtcatcctcacggtcattgatcgattctccaagtatgcgcacttcatcccattgggccacccgtacacggcgacctcggtggctcagggcattcttcggcgaagtggtacgtctccacggcattcccagctccatcgtcagtgaccgcgacccggtgttcacgagcatgttctggaaggagctctttggcctatccgggttgaagctcaacctcagctcggcgttccatccgcagagtgacggccagtcggaatcagccaaccgtgtcgtcgggatgtatctccggtgtctcacaggagatcggccacaccagtggcttcggtggttgccgtgggcggaattttgcttcaatacggtgttccaatcctcgcttaagatgacgccatttcaagtcgtctatggccgtccaccaccggcgctgcgtacttatgatcgtggatcagcccgtgtgccggcggtggaacaggccctggcggatcgcgatgagttcctcacggaaattcgtgatcgcctggtcctggcacaagactatgctaagctttactacgacgacaaacaccgggatgtagcgttcggcgtgggtgactgggtatgggttcgcctcctgcaccatcaggcggcatccttgcctggattctctcgcgggaagctatcgccgaaattctatggaccgtttcaggttctcgacataatcggtgaggtggcttatcgtcttcgattgccggccggcgcgcgtcttcacgacttgttccacgttgatgtcctcaagcagtaccatagcgaaccaccggcgtcgactccaacgctgccagccaccgtcaatggcagggtgctaccgcgtccggctgccgtgattcgtggaaggatagcacgcagtgaacgtgaagtcttgatccagtgggacggcatggctgcagcagatgcgacacgggagaatgaggctgcgtttcgccatcattacccagagttctag

SEQ ID NO: 8715 - DNA, 484 bp, Oryza sativa
  Clone ID: PAT_MRT4530_15199C.1
ggacagattattgtgctcctatatttgaccttgcaatgcatcaatggacagaacaaagtcaacaacagcaacaacaacgataacaaccggtatatcatgtatacattgcatttgacatacaacaaaagtgctggctgtcacaggaaaccgaaccatcatgaaacaaattacagaaagtagctgacaacttgaaaattaaagtacaccgccgcggcggcgtggcggcgcctcccttggatcgatcctcgccgccgtcgtccaaaaaccaaaccgggccggccgtgatccggcagcagggagcacacctgaattaaagagagaggatattttcgttcttgtggcctgtacagtacacacaccaatttggctcatcgatcactgatcctactacggtataggtacatatgcatggaggacctgtacagccaagcctcttccattgcacacactttcagacgaactaattcagacagacagacagaca

SEQ ID NO: 8716 - DNA, 549 bp, Oryza sativa
  Clone ID: PAT_MRT4530_151C.1
atggctggcggcggcggcggcggccgggaccaaagcgacggcggcggcacggcgcgcgcaagcacgggaggcgcccggctaaggggagaaagagggaaggggagaggagtgctcaccgagggcggcgacggcgagacgaccacggagaggcgcccggcggcggaaaggatggcggcggtcggcacgggaggtgacgagaacggcgttccgacgacgcccgaccacggcggagccacggccgaggggcggtgggatgcagcgaatgcggtggaggcggtggcgcggcgtgaggtggatggggatggcggcaagaggcggccggttggcggcaggaaaggggaaaacggagcggtggccgagctagcccgcgcggcggagaagctggcgatgttggcggtgcgaagcggcgacagctatggtggcggtggtgcgcggctggagttggcgatggtggaggaaagagatggtgcgcgtggcggcggtgcttcggaggcggggaggggaaatggagcggatgccggggtgcggtggggcgatgcgatgctatag

SEQ ID NO: 8717 - DNA, 302 bp, Oryza sativa
  Clone ID: PAT_MRT4530_15200C.1
atgggctcacttgtcaggtgcaaccgtcccggaaaccgccataattgccacaaccgtcatagggacccacctgtcagtgaccctgggaagtgtggaggcctgctgggccggcccaggttcgaccgaaccctggtgacgccagctccagttggccttacatgtggacgtccaggattgcttgctgatggtggttgtggggcatttcatacaattcgcatcaattacaaccgtcatacttgcctatttcaggaggagctcattttactttcaacacgcactcaagcaagacttgatctcgatct

SEQ ID NO: 8718 - DNA, 182 bp, Oryza sativa
  unsure (1)..(182): unsure at all n locations
  Clone ID: PAT_MRT4530_15201C.1
agcaacagctgctgccctgttgtgattagattcctgcaagaggacagagtgccaaacatacatatatatgcaatgttcgacgcaagcagttactgatcgagctgacatacgtgtctagtagccgangtgttgatgaatcctcgttgtggagaagaacagctgaaacgcgattgacctcgttg

SEQ ID NO: 8719 - DNA, 1323 bp, Oryza sativa
  Clone ID: PAT_MRT4530_15202C.1
ttacaacctgttggtttcagtgggggcgacaatgccctgcaagtgacttgttttctcttggatttgagctttctgtttttgcctcgtggctccccattcaatggcctcagtaactgctcgttgacgatcgaatgatctttgatcttgcttagtgctaccagtaaatgagggatctttatcctgtttgttttggggcacagtgttaatcttctctttatagcctgagggtacttctgcgaggaatcccaatgcgacaacagtgtcactcatgtatggccgaactgaggcttcctcttgtaggcacattgctgccacggccacagcctggttcaaatctccccttgggtagtcacctctaagaagtgggtccaccagctcatggtgcctacttggatttttgagcatgggtttggcccatttaacgaggatttgatcacattctggtctggatgaatctacagctcttcttcctgtgatcaactcaagtagaaaaaccccaaaactgtagacatcagtcttggtagttagctggcgtgtctttatgtattctggagcacagtatccatatgtgcccatcacccgagttgagatatgtgccttccccccaacagggcctagctttgcaagcccaaagtctgacagcttagggttgtattcgttgtcaagaaggatgttgggtgatttgagatcccgatagatgacaggtggattagccttctcatggaggtattcaagccctttagcagttccatgggctatcttcatcctgatatgccaacttagtggtacttgatctggggtgttttctagcaagtggtctgcaagtgagccatgggccatgtactcatacaccagtaatctttgatctccgtctgagcaatagccaaccaaactgaccaggtttggatggtttaagaggctgagcatcatcacctcaactaggaactctttgttaccttgaaatccactaagatccagtcgtttgacagctacaagctggccattttcaagctgtcccttgtagaccctgccaaagcccccctctcccagaagacggtcagaacggaagttattggtggctgtcgctagctcacggaacgtgaatttttttccagttctggcagtaactgggcttccattgtgtggttcagtatttgctgctgcttcagatgattgcttgtggtctgaggagacacatggcaacttttccgattcagaattcttaagggatgctccatgtttcttcacaactgtgacctcccttgcctccatcccctttgacttcatcttcttttcaggcttgaagcatgaaaagcagctcat

SEQ ID NO: 8720 - DNA, 294 bp, Oryza sativa
  Clone ID: PAT_MRT4530_15203C.1
taaaagggcctacccatttttttagaatttcaattactctgggatccacccgttattttgccacacccgggaaatttggtccaaaacctgttttttttttaagaccttactttaaggcaggcaatttattccggggcatttaaccaaactgcagaaggactgcattccccaaaaaaaaaatgcttatattggcctcccatggccatgtccatatccaatgggaccctgggctttcccatccgtcctttaaaggggacaccaccaggccccttatctgaatgataaagccaaaac

SEQ ID NO: 8721 - DNA, 600 bp, Oryza sativa
  Clone ID: PAT_MRT4530_15204C.1
atgcacacgcgtgtcgctcctaatgccgcaatcacgggctcaccgcgcctcctccgcatcggcctctctcgagcagcacctcgcgcgcccctctcccgcaaccgccggacaccctcattggctccacaaatcacactgccatcgcggcgtcgccgtcccgctgctcgcacccctccgcccatcgcgccgaaccgcgccggagtcgccctccccagccctcagcgcatctcaccgatccacgccgccaggccagagtcgccgtctccgcccctgatctacgcctgggcgctcgcctccgcgcccccagatcatcttcggtcggagtcgccgggcttgtcgccaagccaatcccctccgccaccgataggagcaccccgccgcggctcttgcccccgtcgcgtcggcgcactcctccggttattcccctccgccaccactgcctcctccgtcgggcctgacctctccgacgtgttgaggcactacataagcactctgtacttttcagttttcactactgctcgatggaaagaagccttcaactgcctgttagctgttagtttttacattctacggtgcaaggatccttggacacttaattag

SEQ ID NO: 8722 - DNA, 307 bp, Oryza sativa
  Clone ID: PAT_MRT4530_15205C.1
ggagatgctactttccaaatacccaggctatcatttatgttgtcgattcaagtgatacagataggcttgtaacggcaaaagaagagtttcatgctatccttgaggtatgggccacctgtgcttgagggactcggtatatatatttactgtgtcatatgtaaccattacatggaagaaacaaatgggattttgcacatatttctcaaagggtgattatgactgcaagtttagtgaagcatgctgcttgctcattctttaaaatcattaattgggtataaaaaatccatgtatttttgtcaggatttaa

SEQ ID NO: 8723 - DNA, 315 bp, Oryza sativa
  Clone ID: PAT_MRT4530_15206C.1
atggggaagcagataaggaaggagtttgaggcccaagcccaacgtgtaaatagaaagaggtgccatggtgaaaaaaaaaaaccatgggctcccacatcatcagtcctccaagatcttgacgggtgggacagggacgagttgaacaagaattcccccgccccccgcccccgtattgtcaaccactggggctttgtgggggctcccatggtccacgcgccagttgtggagtctcaagaccctgccatccccatgctagatccgccctgcctagagggtgagcgcggctccgcaccacccgaatggcacaacaactag

SEQ ID NO: 8724 - DNA, 134 bp, Oryza sativa
  Clone ID: PAT_MRT4530_15207C.1
ttttccctcactaacatgggacatactgcttgctggctttggcatgtgcctgcccaatgcccaactgactgcctgcctgcctgcctgcctgcctgcacctgtgctgccctgctgccctgctgtgctgcctgtgc

SEQ ID NO: 8725 - DNA, 192 bp, Oryza sativa
  Clone ID: PAT_MRT4530_15208C.1
atggggctcacatgggccctacatgctttgtcgagcccgcccaagaccgaacccaggggaggcgtgggaggtggcgagggcggtcgtggtagtggaggcgagggcgggctcggcaagcatgtgtcgctcgccagcgaggcgctcgacttcctctcgcatcacagtcgaatctggagcagggatccccgatga

SEQ ID NO: 8726 - DNA, 486 bp, Oryza sativa
  Clone ID: PAT_MRT4530_15209C.1
atgggcgggtgggcggcggagcaggcaagcgaggcgggctgtccgacctccggcggtggcggctcggcatgcgccgcgacggggatccctaagatggtgtacaattgcgccggcgacgagacccttgactgggggagaggaggcgccgcgatggttggagccgggttggcgggggtggttgtcgcggcggtggttgcggtggtgatcgacactgccatcgcgacggcactaagtgagagcaagcccgtgtatattagcgtgggctgcaacctggcgggcctctctcacccgacgtttagccgcgagccagtgcccttgttcatctcgccaagattgagcaacaaggcgaacttggagtacgccgtcgaagccgctgcggacttcctgaacaaggcggtgaagccgatgatggtcgggggaccaaagttccgggtggccaaggcgaagaaggcgttcgccggcatcgcggagtcgagcgggtattga

SEQ ID NO: 8727 - DNA, 2697 bp, Oryza sativa
  Clone ID: PAT_MRT4530_1520C.1
atgaagaagaagaagaagaagaacaacaacggaacggaagtgtctatgacagcgggacccacctgtcagcctatatacgtcgtcatcctgctcccccctcttctccaagccccttttgcttgcggcgacggcgggccaacggtggccgtgcgcggcgacgacaacggggcggcggtgtcgctggcggaggtgggggcgacgacgggccagtggtggccgtgcacggcgacggcgagccaacagtggccgcgcggcggcgacgacgacgggccggcggtggccgtgcgtggcgacgaagacggggcggcgatgtcgccggcggaggtgggcgcggcgacaacgggccagtggtggctgtgcgcggcgacgacgacggggcggcggtgtcgctggcagaggcggtgggggcggcgcggcgcggtggggcggcgcagagggcggcggacggcgcggcagcgtcctgggggcgacggcggcggggcggcggcctggggacgacgaaggtggagggcagaaacacctatgcaacaggtggagggcaggaactgtcttcctgcggaggtcaggattggcctcgagacgctcaagaggcgccggcttgagaggatgcgtttgactgctcagaacaatgccggcgacggtcctccggtgcccgcaaggagcggtggggatgcgctaaggactcccgcaaactgcggggtcaggttgcatgctaacaatggcacagctctacctagcagaaccacccagaacaaggacccttttgcaaagcgcagggtggacaagtttgatatgtctagcctagaatggattgacaagatcgaagaatgccctgtgtactatcctaccaaggaggagttcgaggatcccattggttatatacagaagattgcacctgtggcttcgaaatacggaatttgcaaaatcgtatctccagtaagcgcttctgttcctgctggtgtcgtgttgatgaaggaacagcctggtttcaagttcatgaccagggttcagccgcttcgcctcgccaaatgggctgaagatgacacggtcactttcttcatgagcgaaagaaagtacactttccgggattatgagaaaatggccaacaaggtgttcgccaagaaatactcaagtgctagttgtctcccagctaagtacgtggaggaggaattctggcgcgaaattgcttttggtaaaatggattttgttgaatatgcctgtgatgttgatggtagtgctttctcctcttctcctcatgatcaacttgggaaaagcaactggaacttgaagaatttttcacggctttccaattctgtgcttagacttctgcagacaccaattccaggagtaacagatccaatgctttatatcgggatgctcttcagcatgtttgcttggcatgtggaagatcattatttgtacagcatcaattaccatcattgtggggcatttaagacatggtatggcataccgggtgatgctgctcctgggtttgaaaaggtggctagccagtttgtatacaacaaggatattttggttggtgaaggagaggatgcagcatttgatgttctcttggggaagacaacaatgttccccccaaatgtcttgttagaccacaacgttcctgtttataaagctgtgcaaaaacctggggagtttgtcattactttccctcgttcctaccacgcgggtttcagccacgaacaagaactccggagctgcccttgtaaatctaaccaggttgtctacgttagggaggacatacaggagctagaagctctatcaagaaaatttgagaaggatatttgcttggataaggaaataagtggttttgactcatacaagcaggccgaaaagaatgagccattttttgagataactcggaacctcaggaacactgaagtaaatttgatagaggatgccttctcaggagcaactgctgctgatgctgcaaagagttctcctgcaacgtcaacactgacatcttttgcacaacatgatgtgcctgttcttgctgaagcaattgtctgtgctaatcaagccgaccaattatactccaccaccgagcaaaccatcagctcacctttagtcaaaggaactgatgctgtgggtgcaaattcatccagcatggctgatgctaataacggaactggttcttgtaatgcttcagctgtggaatacagtggaaattcagattctgaatctgaaatatttcgagtcaagcgcaggtctggcgtatcagtaaagcctgcatctgatgccaagacatcaaacttgtctgatcaacaggttctcaggcggttgaagaaggtgcgccctgaaatacaacagcacaataagcgaccagaagactatggtcactgttcagttccctcaggtcgtatgagtatgaagaatttgaattcatcctcctcatgtggtgaagaacactggaggatgaagcggcggcagttggagactcagcaggatgagagcagttattctgcaaagcagaagtcgtactcgtatccatccaccagctattctttccgaggagagtttgtggaaatgagtagagatgctgctgcagaagtccgaccaaagcgactgaaaatccggctaccttcttctagcacgaacagagtggttgagcagggcagttcagggcaaagatttacaagggatgacaagtcgcttggttgttggcctgcaatttag

SEQ ID NO: 8728 - DNA, 211 bp, Oryza sativa
  Clone ID: PAT_MRT4530_15210C.1
tgttttgttttttgttagggtaggggcactcaagaaagaagcttgcttcagttgcacttgaagagaatgaatggcaccatgattccgaataccagaagatgtcttagctcaccaggttttcaggactgagcacaggcccagcaggagattacaccttacgacccagggagtattcagccgcttacccagttaatgtgccaccggccttttt

SEQ ID NO: 8729 - DNA, 6439 bp, Oryza sativa
  Clone ID: PAT_MRT4530_15211C.1
ctctcctctttttttctcttccctctctctatatatatactcatctccaagctgttcttggctcctctctcttcttccaacacctcctaatcaccacaaaggcttaaaaatctccagtctccatagagagaaagagagagaagagaaggcagcttgatttggggcgaggagacgcgatagccgcgataggctaagcagctggcagcggcggctgctgcgatggccggcgccgacgtggacgtcgggacggagctccggctggggctgcccggaggtggcggcggcgccgccgaggcggcggccaaggccgcgaagaggggcttcgaggagaccattgacctgaagctgaagctgcccaccgccggcatggaggaggccgccgccggcaaggcggaggcgccggccgccgagaaggccaagaggccggcggaggccgccgccgccgacgccgagaagccacctgctcccaaggcgcaggcagtgggttggccaccagttcggtcgttccgcaggaacatcatgaccgtccagtcagtgaagagcaagaaggaagaggaagctgacaagcagcagcagcagcccgctgccaatgccagcggcagcaacagctctgccttcgtgaaggtcagcatggacggggcaccctacctgcgcaaggtggacctgaagatgtacaacagctacaaggacctctcccttgctctgcagaagatgttcggcaccttcaccgcaactgggaacaatatgaatgaggtgaatggctctgatgctgttacaacttatgaagacaaggatggtgactggatgcttgttggagatgtcccgtggcagatgtttgtcgagtcatgcaaacgcttgaggatcatgaagggttccgaagccattggtcttgcaccaagagcaaaggacaagtacaagaacaagagctgaaaatgttgcagtattaagatgctgagcatggtgccataagaatggtgttcttgcagtgtgttatggtttccttagaaatataaggttttacttgtttagctggattaaaagaaggaagagttgtcatgtttaatttgtttatggaccagaagcaataatctatttgtgtgtagctggattggtgttatgtgatgtcccctaccgtgtgtcccaagatctacttgatgattttattccaatgttgttaatttaagtttgtgtgattgtgaagtaaagggtatcaatgagactattattattatggtaaaaaaaaaaataaaaagttaaataaacaaaaacaaaaatatatgcatagcaaaaaaaactcagcaagggcttcctgagtaaaatatttttgggtagatccatgcccttctgggcttgtacccacatttagcgacttcctattactggattttctagaatcaatcaagccatcaacttctctttcctcaattgaagtaacttctaacttccttttggagcttttattagcattagcatatccgactaattttgaccatccccatggcttccaaaactgtgtcttcattggaaatcctttgcgctgagtcaagttaacaagctgttgtcttacagagttgtttcccaaaagaacatcttgcccttgtaagaaccatttgatacccatcacgaatgactcttgtagctttccaagaaggtgaataagttctgagtatagaggagcagcatcaggtctgacaagtagcctagacaaaataacttcagtaagccccttttccctttcagagagggtaaaattctcagcattaggggatagggatcgaagtgcttttacatatggcacattctttggtttctcaataagagattgctcatccaaaagcagcctcaactcaacccattgccaatggaactttgcaggctgtaggacattcagaatttctataagcctctctggaaactttacatcattcttggtactagcttctgcacaaccaggctctaaagcatatgtaccatcgtctctcattgttactggtatttcacaatcaagaagagcattcaggaaaacccgggcacgaagaggtgaaagagctttcaaacattcatcagggcttcgaagttcaacgattgcagcaaactctgaatcaccaacatccgcagccagaagatcatagaaaagatgcatgttacggaagcagacatctcgaaaaggctgatgtcttgtgatatcactaattgcacccagtagagactgataaagctgaatgtcttcatgattcgatgtactggtgtcatataaatatggtcgccaaaggaccatagcaaatattgaataagctggaggaagaactatacccaatggaagcgtccgttgcaaccttgaaaaggcaaggacataagaatcacctagaatctctgcgatcactccattataaactgtcttacagttccctattagaatcttaaaccaatgtaccaaaacttcagtggaactgtcaattttgaaatttccaatggagtgggtcacaccatttgtgctagctttggaaattcttaagaactgcagaatgtccaaaccttcttttaatcttaggaccaccatcatccgctctagactgacaaccccataaataatagctccaacaactagtgcagaaacagcagcagaaacttttacagccttaacattaaaacattttgacggattacttggaacttcatttgcatgatttccactttcatcatgggtctcagaagactgttgactgcggtgagccttaggaggagcaaaagatgctgcaacagctgaagaagcttcaacagcaagagatatttcaaatattctactaaatcgatcacctaaagtttctcttagcaaggccagagagtttatgtggatatccaaaatgtgttgaatcaagtttaatgaattaattgaggtaacacctggattgttaccacctgaaatatccaagtgtttagctattgcatgcccagcattgtcaacaattgcagaaacagcagaagcaactaaagaatgatctccatctggatttgctcctccattttgtctgatacagtctgatgaaattccagaaataattgaatcaccagtgattgactttccactatccagttcagcaagcagccttttatcagatgtggacctaaaatttctttcccacctagcaacactagtcacatctctgtatttccttaagaaatatcgagcataagcaaaagctactgaagtagactgcctttcacctgacttatgaacagttctattcattgaaacactcaaaacctcgggcaaaagatccattgcaataaggatgttctcatacctgagcaaggatgagaacagaaaagcttcggctacttggaaaacttggttttctttatgttttgggtgcataacacctcttccaacttgaccagatgtggtccttccaatataaatctttgatagaagccatataagcaaccttacagaggagagtaaatcacaacatgtatccattatgtacagcactgacagaagttcatcttctccaaacctccatccagatgcaattttaccactatgctgcacagtggaggcacttatggagttattagccttagaatgtttcacttcatctccttcaattagttgttttatggacttcagcagccagattgaaatggatcttctttcaagcaatctaagtctcttaagtgatttgccaacttcagccagagtcaacatactcatatgatcagcgtctttaagaatgtcagagttagtgccaggtttatggtggggacaactcagattgttatcacacacgtgactagtagatgccccctggctaccatcgattctagcagctgcaagttgtgctatattttgtgtcttttgcactactgttgccttacctccacttgtttgttcaattgactgatgtattgtttcaacagtaaacaattcctgcttctgctctttccttacccaccaaaaatcttcctcatctgattgaaccaatggggacccttggaaaggaaacacgttcttatccaacttctgtctcttggtcctactactatccttacagccagtttttgcatgcccaacatcttcttctgagtctaccaaatctgtttgtcctttcttggttttttttgtttcttctcttcctgatatcataagttttacctcttctacttgaactgccactctgccatgattatcatctgttgaatccattagaagatcaggctgtttctgaaggcaggaactcaaagggaccctgccttcaacatttgcatcagtagccagaccacttgaaagctcagaaagcacaagtcgacgctcactagaatatgttgacacaatttcataaaggacttgatcttcagcaatcttagcttcctcaaggatattaaataagcaaaaccctggcaggtgcttcagaattttgtaatgcctcgttttcttttccagatcaaacaagctatcattccaaatggtgattccactaacaattagttgtctcacatatgtctgaggataaaatataccactgcgaataagttcagtcatgaaaacatccacacttttaaatcccgaagcatcactaatctcatgttgatccaaccagcatacaataatgtcatgcagtggacctgggctgctgaagatatcctttttgttattctcatcaatgctacctgtactgtctctaaatccagaagcagtctccattgctgtcaccttgatagaagaatgattcagagtagcacttttaaggtgatccttcattgcaagctgactgctgctcttggaagaagataaattatttatctcattcattttatccttcaacagggaaactgccatatagacctgagagaaatctttgcttcctgaaaattttacattttggcattgtgatgtacggcaatcacggaaagtacatgttgcccactcacaaatgaaaaacacagagcagacaagggataactcaacagctcccatccacatcagagaagatcgcaagcaagggctgacttctttaatccatgtttcttccatcagggtatctgatagataattgaatactgatgtatatgctgctgtcaagtttccagttacaagtgctttgtccaaagcttgcactacgttggctgccccacgaacttgaagattaggattagcaactaaagaaagatcagatgcacgtctttgaactgaacaaatggcataaccacaagagaggtgtcgagatgcattctgtctcctagagctagcaattttaccaccacctgctattttcagaagagcacctttaccgtatacatcaggagccacaactgatggaagtggaaagcaatccaaagaaacaaatgtatcgggaacagcaagtatcaagtactgcagtaactcaactaaagcagaggtaatggatgacctttttgggttattcttaacacttaagctgccaggagaagcatcactgagacgttgaatcagtatttccaccagcatgtggatatatgtctgtgagagggttatggtatcaaccaaagaaagtacaataggcaagagtaattctaaaacctcagttgagtctctctcctggagctgattaaatacccattcgataagtaacgacggaacaagtaattgttccatgagatgacattgaacaatacgaatcatatacgaccatttaaagtgtagcgaaggctcctcaacatctgcactagcaggtgatgccccggtttttaacttaattgggctgtctccagcaacaaggcatggcaatgactgttcttgagaagatggaagtccaaaaaagccatttttagaacacaattcgtccaaaagcagctgcaagtattcaataacatcctttgtccagtgctgagatcgcaaactatcaggagcagcagatgaaacattattggatgatgtttgaacctgattaaggtaagtaaccttcacaagccatgatgctcttaacagtgggacattatatcggataagataattaaagagtaacttcctccgaaaaccacgaggaacttgctctgctaatgaccatagacgcctgtttggttgcacaagggcctcgatccattttctgcgtgtgtcttcattgctatgcatttgctctggatacatcccaggttttgtcagcaacgagccagaaagagggaccccataaacttggccagccttcctcttctgagcacgagattcattgatcgctctgaaccgcttctttagtgcctccttgcattttgtagcaatatctggtttgctcaagtatggaatctgactgagtacaatctctctggcttcctcaattccttcaacggtatccttgtacccagattgcacatattctttggttaaggtctcttctgcacaactcaatgtctggggatagaagtcaggtgcaccaagcccgccactaacaaataatcttcccat

SEQ ID NO: 8730 - DNA, 129 bp, Oryza sativa
  Clone ID: PAT_MRT4530_15212C.1
gggtgtactcgcgcaagccggcaccaccattggcacggctcacaaattacacgtgtggactcgctgccttacatgccaagggacgtaccggatacacggggacacaagtgaaccgcggacaaggacagg

SEQ ID NO: 8731 - DNA, 239 bp, Oryza sativa
  Clone ID: PAT_MRT4530_15213C.1
cttcacaacaatatagtagcctaggcagctctcgtgcccgttcgcaactatcgtcattcgtagtccttcctcgtcgagaaagattaagggatattcatggccctgtggagaaacacacttcaggagcaggtgcatggtgtgaacgtgtctgatgcagtcggtgccgagctcgtggatctaggcacccatccgatagaggctgccaatgcttctcgacgactggcggctgagggcaacct

SEQ ID NO: 8732 - DNA, 727 bp, Oryza sativa
  Clone ID: PAT_MRT4530_15214C.1
atggatgcagggctggggagggcgaggagggaggcggtggcggtggctggggagggcgaggagggaagcggcggcggcgagcagcgggggagagaggaggaaggtggcggtggcggcgaatgggcgacgagggcgagaataagccataagagagaagaagcgaggaagaaaagagaaggaaaaaagaataatgggctggagaagggggatacctcccattgcgagccgagttttctacgagtgtcctcggttagtgaggacactctaggagtgtctcacattgtggatgtcctaaggagctcagcagtggcgggagatagacgtcgtcctcactgcccccacgccttgctgccatatagattccaaggagcttcggagggaggtagacccggcaacatcacgacccttcgccactagtgagctcgactagggaggtagacccggcaacatcacgacccttcgccactaggcggacccaccattcagttgttgttgcaaccgatgagaagctgttggacttgtgtgggggcactaccgagcctgactctgactttgcctcaccgtcgccatcgcccttgaccatcccgagtggtggactcctcgtggtatcgaccccttcccctccccttgaccatccccgccggcatttccacccggtcttcttcttggcgcagaggatgacgctagagaaggtgtcagggataaagttgacaatgaagatggccat

SEQ ID NO: 8733 - DNA, 432 bp, Oryza sativa
  Clone ID: PAT_MRT4530_15215C.1
atgtcgtggaaggacctgccacgtgaccagtggtggaagcacttgagaaagacggctaccacgtcaaaaaaaccaccctcaaaaacgatacccggttttacggttgagggatgcgatttgaccgagggcaagagcacaagggagttttcagttttaacgcatgccacatttatcctcatggctgtcatcagtgaaccatgggtgcatgtacacgcatgggttagcttgagtgctccacttctgatgaagtgtgaatttggtcagaatcgtcaaaaatgcatgtgtgactgcaaaccttcaccttacgcagtattgttagcgaattccacaggcactgttgccagatcagcggataacagagtacgggaaggcatggcaggagagactgcagtgtacagtaagcagtactccgtactggtctccggcgagtga

SEQ ID NO: 8734 - DNA, 389 bp, Oryza sativa
  Clone ID: PAT_MRT4530_15216C.1
cgagtgagtttaaactagttaaggcccactgttccaaggggggtttcccatgaaacgaatccttaaaacagctttgaccacattgccaattgcaaaaccttttaaacccccaaatttaaccttctccagccttatttttatttcaagctccctaacatggtgccaaaaggagctccttaacccaacttgtaaggccaacctgttagatttctaaacccatataggcaatctacaaatttggcccccagtttctcaacacaaaaagttttatgatcattacggaaacaactagttgcaaacttttttctaattcttaaatttcccttcacacaatcaccgacaccggcgttggcttttttgtggtttttcctttacaccataccgggggg

SEQ ID NO: 8735 - DNA, 1386 bp, Oryza sativa
  Clone ID: PAT_MRT4530_15217C.1
atggcgtcggcgcgcgcgcacgtgaaggacccggcgcaccggaccaagatggtgctccggaggctgcggctgttgatgtcgcagcaggccgtcatggagcaggtcgacgcgcgcttcggaggcctgtacgacttatcctgattccgaccgtggagtgtctggtaaaaggatgaccgatatcctctaatagggcttaacttcaagggcggagctgaggttcgaggcattgtggtcgtcgacagtatgcttaggtgtgtgcaagttatgtgtgagtgccaaagagagacgagcaaatgcagagcgaaacagatggtaccagtgtcgggctcgctggttctgctcatgcaacggaaaataaaaaagagaaagttgtgctttgggatggaagagccagggtcaattctagcacatcatctgtcacatgccagaagaagtcagggaccgccagaaattgtgctgcccactgtagtactgggcacgctccgcgtgacgtcggctatggtggaatttttccaactatggtttccaacaaggaaggacgggcaatatgtgcatctctagattattaagcaggacccaaaataacacttgagaccaaagcgccacgagcatgcgcagcgggaaaaagatgttacaagtgggtggatttaaatttctgctcaagccgcggagaacacaaaaatgaaaattgtgcttttgaaaggaagagcaagggtcgattctaatacatctgatgtcacatctcagcagcagtcagggacccctatgaaaaatgctgcacaatctagttctaggcaagatccgcggcttgagggcagtggcagaattattaagactatactttcaaacaaggaaggacggcatgtggttacgtctcaacatgatcaggaaggtcacataattacagctgagaagcgcccaccacggattccaaacccacgttccgttgttaaagatcaggtagttgaaaatgctgagaaaaaccatttggatgacaaacatagtcatctccatggttctgggctcatcagtgaaaagactgaaagacatgctagaaatagagataggcctgatcgtggtgtatgggcccctcgtcgctatgacaaatctgcatcaggtgggacgcattcctcgtcatctgagttctcaccaatgcagcaacattctggtgaaaatttctgtcagcaagcagatggacatagacatgctaaccgccgtggtcctccacgtggtctgaaggagatggaaatttctgcaagcacatctgatggaaagccttcaaagagagcctctgccaatatggtgctcatgagatactcatcaaaacaaatattgcaagttgtggagttctggattttgcagcttgatcctgtgaagtactgttaa

SEQ ID NO: 8736 - DNA, 352 bp, Oryza sativa
  Clone ID: PAT_MRT4530_15218C.1
tatgccctttcacctggcaatggaggcatcattttcgattgcgtgcagttgaacatccatctagttttctcatttttattttaaattctcatttccagtgaagatggtagtccgtacttatacccgatctccacctcaagtagtatcacggattggcatttgacagctgtcagtttttcacctactcaaggaatgtgtatttctgaaaccacggtgagtgtgttccaggatttcttcatccagctccaccttccctactcagttgtcaggctcgaacagacgcaagtcatcgccactattttcaactatggtatcaggggttttgaggtttgtgcattgtttagcacttaat

SEQ ID NO: 8737 - DNA, 783 bp, Oryza sativa
  Clone ID: PAT_MRT4530_15219C.1
tctgggctcatcagtgaaaagactgaaagacatgctagaaatagagataggcctgatcgtggtgtatgggcccctcgtcgctatgacaaatctgcatcaggtgggacgcattcctcgtcatctgagttctcaccaatgcagcaacattctggtgaaaatttctgtcagcaagcagatggccatggagagagaaaaatagacccaaggggtcatggtggtattcgcggaggccctgtggaaaatggacatagacatgctaaccgccgtggtcctccacgtggtctgaaggagatggaaatttctgcaagcacatctgatggaaagccttcaaagagagcctctgccaactatggtgctcatgagaggcaagtgtgggttcaaaaatcaagctcggcgacgtgatcttgtccaatgatgatactcatcaaaacaaatattgcaagttgtggagttctggattttgcagcttgatcctgtgaagtactgttaacaaaatgcccccgatcatatgcttccatgaagtgcaatctcagatttgtcaatcgaaatctcagctttagctgaaaagggagcttatatgatttgattcacagcaatagtgaattaacataacccactttaggtagctcttgattgctttgggtgagacttgatttgggcccaaggttgctattctggagcaatggaaggatttaagttggcatcattaccctcgtgacagtggtcacatatttctgagacccctggagaatatacacgaccttaactaatcagagatgggtg

SEQ ID NO: 8738 - DNA, 1203 bp, Oryza sativa
  Clone ID: PAT_MRT4530_1521C.1
atggccttggttgatggaactcgtcatgaaaagctcgtcgaccttccccccacacttggacttttgtgtcgcaagacatcaaaaccaagcacgaacacactagctcaaaatctcgaagatggaggtatgggtttccaccgatactaccagagaaggattactaggacgggattcagggctatcaccacctgccgcctacctctgacaaattcgtgggatacacaacaaacaaaggttttgacggtcaaatattatgatttaaggaccgtcaacaccctcaccaagcctagcaacttaggctttgctatcaccggcacgcccttgacggagattgatctccacaacctccaactcaatgctcaagccatgaatgcttggttcaactctttgagccaagaggagttcgatagagtgagcaaccttgcgaccgcatatgagatttggaacaagttggcggagatccatgagggcacaagtgaatacaaggatgccaagcttcatttcctcaagatccaatatgtgacattctccatgttgcctcatgagagtgtgaatgacatgtatgggaggcttaatgtcattgtgaatgatctcaaggggcttggggcaacctacaccgatcttgaggttgcccaaaagatgcttaggtctctacaagagaagtatgagaccctagtcaccatgctcatcaactccgacatgtcaaggatgacacccgcaagcctcttagggaagatcaacaccaatgacatgtacaagttgaagaagaaggagatggaggaagcctcaccatccaagaagtgcattgctctccaagccaaagtggaagataagggcaagagcaaggtgaatgaagccaatgatgacttggaggaagagattgcctctcttgctagaagtgagaaggggcactttgcttccaagtgtccctccaaggatgatgatggagacaaatctttcaagaagaagagtggaggcaacaagctcatgaagaagctcaagaaagaaggaaagaagattgaggccttcattgggcaatgggactcaaatgaggagagctccgctgtcacgtcaagaaattcccaaatagaatttcaagcagaatgtgtattaaaacccctatctaggaccggccagggtacacaaacgacaaagttgacatacagatccacatcttacgaaccttatagaagtgttacataa

SEQ ID NO: 8739 - DNA, 1182 bp, Oryza sativa
  unsure (1)..(1182): unsure at all n locations
  Clone ID: PAT_MRT4530_15220C.1
gcacgagtcccctctcctctcgccccccgcacgaggcccattcccaatccccaccgcctcgattccgattcccatctcctcgattcccgagcttggcgcgggcatgcgtcgcggcggcgcggcggaggaggacgcggaggcggcgaggttccgcggggtgcggaagcggccgtgggggaggtacgcggcggagatccgcgacccggcgaagaaggcgcgggtgtggctggggacctacgactccgccgaggacgccgcgcgcgcctacgacgcggcggcgcgggcgctgcgcggggccaaggccaagaccaacttccccctctccctcccccacgcccaaccccagctccaccaccaccaccaccaccacctcacctaccccgccgccgctgttgtcgccgctaggccggccactagcagcctcagctccaccgtcgagtcgttcggcacccggccgcggccggtgctcccgccgcggccgcccccgccgccgccgatccccgacggtgactgccgcagcgactgcgggtcgtcggcgtcggtggtggacgacgactgcgcggacgccgccgcctcgccctcgtgccggctcccgttccagttcgacctcaacctgcctcctggtggaggcggcggcggcggcggcggctttggctgtgcctacgacgacgaggagctgaggctgacggcgctgcggctctgagcccccaaccccaccggtcgttggagaaagaggaaaaggagaaaaatatttggttcttcccttctctcgtagccgacatgatccttccgcgctttgtgttgttcttgtttacttgatctgatgatgattaatgtggcccgatctgcgtatctgcctgcttgctgctggcgatagatgatgattgctgcgtctcgcagcagctcgctgtggttgtgctgttgtaatatagcaacattttacttgcttccttcctgtgaggaagcagacagctaaagtaacttattttcaatctttagctacatgtgctcatcttgttcttaccctttatactctttccgcgtgccgttctttttggaattgggaagcttgaaacatcccacctatttactagaatagtcagaaggcttgtagcaaacaggaagcttaaatgccanaaatatacagctgaaattcgttctgttaaaaaaaaaaaaaaaaaa

SEQ ID NO: 8740 - DNA, 495 bp, Oryza sativa
  Clone ID: PAT_MRT4530_15221C.1
atggtggtggtgcccctcggcccggctacgcgcacgcacagcgcaagcggcaagcggaagccgatcgccgccacgccagcgggtgacccacacctcgatcacgttggtacaacatttggtccgctgataatcaaccacgaagagccgacgccaaccaatgccactgcattatcaaatcatgttcatgttcgggaaggcaaggaaagggacaccaggagggagaggaaacggaagatgccccgagcacagatcaggtgttggttctcaagtatgcagcaattatttagcgaggctattgctgtagatccacaattcgtgatcgtgcctcttcatggggatgccatgttattggctcattgcatcttaagctcccaagcacaaaagttgtcctcagccattcctagtaggatcaaggatgcatacatgcatgctcgaatttgtgttgtatttggagatgatcgatttgaggatttggagataatttttgttatgtga

SEQ ID NO: 8741 - DNA, 534 bp, Oryza sativa
  Clone ID: PAT_MRT4530_15222C.1
tcagcctctttgatgctgagctcgatgctgtttacgccgcaataagtaaagtttccggtggtagcttgtgcaagctggtgtgtggcgaacccgaatgttgataatgcggcattacagagagcgttggactgggcgtgcaataatggcgcagactgcagcgctatccagctgggcaaagcatgctatgagccgaacaccttagttgcacatgcatcttacgcattcaatgattactaccaacgcaagggccaggctagcggcacgtgcaacgcgagttggtgtgtggccaaagcaggtgttgggcacatggtgttgtaggcggcattagactatgcatgtagtaagggtgcggattgcagcactatccaggtgggcaaaacatgttaccagccaaacacattggtcgcacatgcgtcttatgcattcaacgactactaccagcgcaagggccaagctaatcgtacttgttacttcgaaagcaccgctttgattgtccacaagccatcatcgagtaattttccactcccaatcttt

SEQ ID NO: 8742 - DNA, 644 bp, Oryza sativa
  unsure (1)..(644): unsure at all n locations
  Clone ID: PAT_MRT4530_15223C.1
tgggnaatgaatgacatgcgacaccaccnnacananggngnatggcgactacctccgccgtcggattgcgccgatccagcggcgcgctcggggcgcctgggagtacaccgtgttctaagactgcatgaggacccaccagggagtgagatgggactgggctcctgaggactttaagatattggtccaaccgatgctgaatatcaactacgtggaggccgccctcattacccaaggaatgcttcccctctgcagcgatccaaaccgcgccttcatattgaccattatgatggcggtcggggcctcagaggagcgagctccaaagggccactacggcgcaagcaggaaccgccggggggaacaatctaccccgagagagggtcgtgcttctgtgtcccggggcaggggcccggggagcaaacgtcctacctacgcccggtggaagatgaagcatggaggaacaccttccccatctgctttccgagggggcggtgcagagcgtgccagcagaaaagcgccatatgtgtgccccccagcataagtacccgagggggagcgcaagaagaaacggtccctcaagatggaggagacagaaccatctctgggaaacccttattccccttcaaagtgggcgataaccgaccccc

SEQ ID NO: 8743 - DNA, 355 bp, Oryza sativa
  Clone ID: PAT_MRT4530_15224C.1
atgtcatcctcgtggttgctcacctcgccattcaccatcgacaccgtggaatgcaagaacctggttccagcctcggtggcgttgccggaagcgcaggagccccgccgacgcgtgggctggggacctccacgacggcgtgctggagcgcgtcctggcacgcctcccgccggacacattcttccgcctccgcgccatctgctgccgatggagcgcggccgccgcgtcaccacacctgcggccgcatcccgtctccgactccgaccgcatcgccgcagtagcagctggtccaggtgccgcatctccaaggccgatgctcccagcgctgctggtgaagaggacctggtgctggccatga

SEQ ID NO: 8744 - DNA, 150 bp, Oryza sativa
  Clone ID: PAT_MRT4530_15225C.1
atgagggtcgccggtgatgcgagcaacctaccggggcggcggctgtccggcagccggggagggagtggaacctctcgagtccagcagattactaagtttggtaaagataatctcaaagacctcaacgataaaggccataaaccaagataa

SEQ ID NO: 8745 - DNA, 365 bp, Oryza sativa
  Clone ID: PAT_MRT4530_15226C.1
gtgaacgcccgtttgtggcttcagtactgggtttgttctgaaaaaaaaaaaaaaaatacatagacagtaaaaagaaaagacgccccgatcataaatcctcttcgaggaggaggtgacggtgcgtaagacttccggccatagatgcggtcgctgatgaggataggttgacgtatcttgtgttcatgctgcatgtatttgcgggggtgctttttttaggggtccaaggttttctccctccgccttggcaatcttttttcttttttgggcgaaccttaattcacatccagggcccccgtttattccgtcgtttgcccgggaaacacccggtgccatcgaatttttttctttttggagaatttcctctt

SEQ ID NO: 8746 - DNA, 718 bp, Oryza sativa
  Clone ID: PAT_MRT4530_15227C.1
gttgaacgattgcaaacgaatggtgcatcacaagttgctggtcaggttcctcaggagtataactttgtcatgtttccgaaattgtatcaggattagctatgaattggtctttgctcttgtgattattgtagagttacacttcaagctcgtggatgccgctggtccatattctgtgattaacaacatgattaaaaaaagtaaggttacttcgattatgtactgctgcttgaacttcatttactataggtttacaggtacctgtggattgagagggtcactgggtcatcttttgaagttggtttggatgacctgaagctatcaggtagattgtggtgttcttttcctcaattatgtagaggggagttctttttctggtattggagttcttatgaaagccactgaaagacaatctttacattttgtaacgtattattacatttctcaatacattttgtaaatttcagtatatttcactgaaatacaatccttacatttcgtaacgtgttattacatttctcaatacatttcgtaaattttaagtgtatttacatgttttctatgatgtattataggaatacatctatttcacatgcaggattccaaatgatatattactacgatggattccaaatgtccaacatgctatataatttattgacaataatgattctctattatttctttttgtgtgaatttaaattatcttattatcattgct

SEQ ID NO: 8747 - DNA, 1857 bp, Oryza sativa
  Clone ID: PAT_MRT4530_15228C.1
aatggagagtgcggcggcgagccatgcaggtggccttgtggcgaggcttgggcagctggtgacagcggaattccggctactcagcggcgtccgcggcgaggtcgatcgtctgagggacgaggtggccatcatcaacgccgatctccgccggctctccgaggccgacgagagcgccgtggaccactcggtacgggagtggatgaagcaggcgcgcgagctcgcctacgacgccgaggactgcatcgacctcttcttcttcctccgcatcagcctcgccccgccgcgcgccggtgctctccaccgcgcctgtcgctggtttctcaccatccgcccgcgggcgcggcaccgcctcgccatcgacatccaggacgctcgcgcccgtgccggccgtctcgccatccgcctgcatcagcagccgcggcacgaccgcaacttcgtcgtcgacacggcactgccccgttccgtgtggttcgtcccagcttcgactacgccctccaccgcgcttagcaagctggtcggcgtcgacgaccaggtgcagcatttgtccgatctgcgtgacgtgagtctcaaggtgttctgcatcgtggggttcgcggggctcgggaagacgacgcttgccatggaggtttgcaggagcctggaggaggagtttgcctgccaggcaatggtgccggtgtctcaggtgttcgacacaactaataaattgcaaaacttacttaaccaggtacctcattgtgattgacgatgtatggtccatatcggcttgggaagcgatactgtcaagactgccagataacaagtgcaacagtagaatcattgtgaccactcggatagagcatgttgccagggcctgccgctcagctagccttgaggaagagtactacattcatcgagttaagccgctccaattcgaagatgccaagaaattgttcatcaatgcagtatttggccctcaacaagattgcccagaacatctgaaagatataatgcacaagatattaacaagatgcagtgggctaccgttggctattttctgcattgtcaggcttttggcaggctacagatcaccggagggcgccgtagagatgtggacgagagtttgcaactcaactggctctctgatggagaacaatcccacactgaacggcatgagacatataataacactgagctacaaccacctgcctcatcatctcagggcttgcatgatgtatctcagtctcttcccagaggattatgttgttgacaagcgtaggttgttgtacagatggattgccgaaggcttagtttccgagcaacgagggctgacacccatggaggttgcagaatcttactttgccgagctggtgaataggcacatgattcagccatcctgcactgaaaccttgggcacgttgatgggatgtagagtacacgacatgatgttggatattattgtgtgcaaggccttagagtccaactttgtcagcttcgtaggaggccaatgccgagatccatcatatggtagtgttcgtcgtctggccatccagagcgatgacctagggtctagcattgagaacacaaacttgaggcacgtcaggtcattgaccacttttcgcccccaaggtcatcgaaagctcctagattgtcttgctgaattcactttactgagggtgctcgacctacaggactgtaaggacttgcagaacaaacatatgaagcatgtttgccagctatttctactcagattcttgtccttgaatggaacagatatcacaaaattgcctagccagatgaataagctgcaacatttgcaggcactttggttaataagcacgctgcttgtcaaggtcccagaatccttggtcgatctagaga

SEQ ID NO: 8748 - DNA, 528 bp, Oryza sativa
  unsure (1)..(528): unsure at all n locations
  Clone ID: PAT_MRT4530_15229C.1
tttgagtagctaaaaaaccgaaaatgatacatctcagctcgtacaaaatatgattggatatgaaaacatgagatgcatggtagggtactaaagaaattatatatctcaagtgatcagattatcagtcaatttaactagatataaaaaaattacaaaataaagcgaccataaatcaaaaatgaactttagatcagatgatttgaatctgattcagtcagaacatgagataacccgagaccaaatgatcagaaacttgactcgaattgaggccatacagaacatatatatgaccggatccaactcgacccaacccgacccgaccggacctgtgacccactaaaaggtcatacttgttaacctgaaatccgacctatgagtcgataaaaatcagttattgctaactcggaacccgacccgacccattaccncgaaaattctttccggtttgacccgatctgatccggaactgacctaattttattgccacgtctagctgtacccccctctccatatcatattctctgccct

SEQ ID NO: 8749 - DNA, 738 bp, Oryza sativa
  Clone ID: PAT_MRT4530_1522C.1
atggtgaactaccgcaccggtgggagccattgggtgcttgacagtggatgcactcaacacatgatagggctatgttcaccacatttgagaagtgacaatggttccgagtttaagaataccaatatcgaggactattgtgatgatcttggtattaaacacgaactttccgctacctactcacctcaacaaaatggtgtagtggtgaggaaaaatcgtacattgattgagatggcaaggactatgcttgatgaatatagtgtttccgattccttttgggtggaagccataaacaccgcttgccatgcaaccaataggctttatttgcatcgtctcttgaaaaagacttcctatgagctaattgttgggaggaagcctaatattacctattttcaagtttttggttgcaagtgttatatttaccgaaagggtgatagtctaaccaaatttgaaagtcggtgtgatgaagggttttttctaggttatgcctcaaatagcaaggtataccgggtctacaacaagaacaaaggtattgtggaagaaaccgccgatgttcaatttgatgagactaatggctcccaagagggacatgagaatttggatgatgtaggtgatgaaggcttgatgagagctatgaagaacatgtccattggagatgtcaagcctattgaagtggaagacaagccatccacctccactcaagatgagccgtctacttccgctatgccaagtcaagcttga

SEQ ID NO: 8750 - DNA, 1644 bp, Oryza sativa
  Clone ID: PAT_MRT4530_15230C.1
atgttcaaggccttgttcttgacggtggatgaggaggagcccttgcagttggagacagggacagaccaagaacccaaggaacaagaaccaaaccctagtttgggaacccacaaaacccctcaaaaccctaccactacactcccccccttccatccatggcctgattccctccgcctcgccgccgccggaggcggtcaaacgatgctactacccctccccccgcgccgccgcctcctcctcctcatctaccctcgccgccgccccgccgccgccgcgttctccaccctccctacgccgcccgccgctgccgccccaatctcccaccgcctccgcctcctccgctccctccagtccgtccccgccgaccgcctcctctcccacccgctcccctccaccgcccacgcctgcctcgccgcccacctcctcgcccgcgaccgcctctacgcccactcccgccgcgtcctctcccgcctcgtcgccctccgccggccccacctcgccgcctccctcgtcgacctcctccaccgcgccgcgctcgcgctgggcccccgccgcagcgcgctcgcctccgtggtcgacacgctcctctccgtcctcgccgacagggggctcctcgacgacgccgtccgcgccgtcgcccgcgtccgggagctccgggtgccgcccaacacccgcacctgcaaccacatcctcctccgcctcgcccgcgaccgcagcggccgcctcgtccggcggctcttcgagcagctgcccgcgcccaacgtgttcacgttcaacatcgtgatcgatttcctctgcaaggaaggggagctcgcggaggcgaggtcgctgttctcgaggatgaaggagatgggctgcttgccagatgttgtaacattcaattctttgattgatgggtatgggaaatgcggggagctggatgaggtggagcagctggtggaagagatgaggaggtcggggtgtaaagccgatgttgtgacatacaacgcgttgatcaattgcttttgcaaattcgggaggatggagacggcgtacggttactttgctgcgatgaagagggagggggtgatggcaaatgtagtgacttttagcacctttgtcgatgcgttctgcaaggagggtttggtgcgagaggcgatgaagctgtttgcgcagatgagggtgaggggggctgtgttgaggatgatggagaaggctggtgtcagagccaacgaattgctttacactacactaattcatgggcacttcatgaataagaacagtgagaaagcacttggtttgctaagtgagatgaagaataaaggattggaacttgatatttcactctatggtgccctcattcaggggctttgtaatgtgcacaaattggatgaggctaagagtttgttaactaaaatggacgagtctggtctggaacccaattatatcatatatacaactatgatggatgcttgttttaaatctggaaaggtgccagaagccattgccatgctgcagaagattctagattctgggttccagcctaatgcttacactgctttggttgatggtttatgcaagaatggttgtttgaacgaggctgtgcagttgtttaatgaaatggttcacaaagacagtgataccgcaactgatggtaaaacctga

SEQ ID NO: 8751 - DNA, 239 bp, Oryza sativa
  Clone ID: PAT_MRT4530_15231C.1
aaggttaaattccaattaatcattaaagcttacggttgcccaaaaggaaacggtttcttaaaactaacttttattccggcctcgagggtcctttaaaccagacccaggtagacttcagccccccaattcctggacaaacaaaggctgggaacaaccaggcccttcggcagctcaaccaaactggttgtttactgaccaccacggaggcggagcaccagggggaggggggactccttctg

SEQ ID NO: 8752 - DNA, 989 bp, Oryza sativa
  unsure (1)..(989): unsure at all n locations
  Clone ID: PAT_MRT4530_15232C.1
nggggggggggttggggctngccttncaaacatncntnggccccccnanantcntttatntccactttgataaccacagntgtngggtaccccnnngaaaaaaaactctnatctcattattctaccgcgcccaccananncntcttangcncggcgaacggttggnaangcccggaggggnnaannccntccccacnnntcgcngannngngnggnggcgggcngaggccngcagccacggnngntgtggcgnggtntctngcncggcggcggaganaactgcccgannagacctgcctgnntcngganggggagctgcggagtggntggcntnagctgttttttttttttttnttgngnagagagngngaaaagagaggggcgaanggagcangaggaangtagccggtccggaaaagagacgagagagaggggaagagtgtgggacgncgctnggannnctncgnngnngtgtngncgtcngcaggnnanagagtcgngctagngagngancgngccnncccgagtgngatangngggngagnttcacnacgntccngtgcgncgngngngannggnnagagagantcgngagnagnagncgttggnacagtgnggtngtgntgcncngatagagagtgnggcanncgagagaatccnncnngatacagacgngggntgcggaanagggagtagnnagacngnnctctcttcgtagtnngatctgtcaaggctngtcttggggtatagangntaggncagtcnanagtgtcggnancgcnatnagagaggaacnantngggnngggngatgcnntngnnnanaaccnnnaataccaaagccggtgngtcggnctnccggnacanagaaaaantggggggagnatncgggcgggtnaaannagagaaagcanngngngggncntccgggaangagnggggngcgctngnctacntgggagcaaggngaggtncggagngggnggncgn

SEQ ID NO: 8753 - DNA, 321 bp, Oryza sativa
  Clone ID: PAT_MRT4530_15233C.1
gttggtgttttttttttttttttttttttttttgtcaaagaaggggaaatcagcggatatattacaacgtcccaaccaaaccaatgcactaaactcaggtcaagacaccgtctaaggtgatttttttaatcaggggcactataataacgacgtggggggggtggcataaaaggcacaccaaaaccaaaacaccagcagcgtgtgctggccccacactccaaggaaacgggagggatgcacaacgctgcagcggtagatgctgcgctctgggctgaaccgtggtaatatgtcgatagggagactggggaggccacccggctt

SEQ ID NO: 8754 - DNA, 729 bp, Oryza sativa
  Clone ID: PAT_MRT4530_15234C.1
agggagctaaatatggcactacaggaaaagcctgtcagggcaaggtgcctcaacactgacattcaacccgaccgagtaagtgtgggacccatataaagatcacctatcagggccctatcttcctccatcacaccctctctctaccaccgatcaacaccaccacccccaaaaacctcccccaaaccacagatgctctactgcatcattgctccgaccgccgctcccaccttagcaagcagcggccacaacagcgatatatgcatccaagtccacctccctcccatagaaaagtagcagcgtgtgcgggaccacgccttcaatggcatcagggaggtgcataagtgggtgtgccgctttatcaccctccactccctcctcttctacaaggccaccctcaccgcactcgccagcagtggaggcgaggttgtgtccatgctgttctcccacctcgcgtccctcgatgtcggctacttccttctacaccacctacatacgtatcacctattcctccaccccgttcactacgtcctccatgccctcctcaccctgcacgccacgtcagcactacgccttgaggctgatgtcattgcctcctagttgcacgtgtccatcccacgcatccgaaagctgctcctcgcgcccaccgcgccaccgccttttcctcgagtacatatgcctcctgcccatgtatgtcagccttcccaacgacttcgcacccccgatgctgca

SEQ ID NO: 8755 - DNA, 345 bp, Oryza sativa
  Clone ID: PAT_MRT4530_15235C.1
atgaggaccagcagcctcgtcctgttcgccgccgtcgccgtcttcggcgctgcctgcacggcggcggccggcgacgaatcctggaagacgatcgacgcgaacgaccggcacgtccaggacgtcgccctgtgggcggtggcggagacagactgggcgtcggcgacgggcggcctcacgctcaacacggtggacggcgccgagaagaggtttgaggccggcgtgaactactaccgcctcaccctcgaggcgtcgagccgcgtcgtcgccaagtacctcaggttccaggcggtggtgtacgaggagggcgacgagcacaagctcgtctccttcgtccccatccactga

SEQ ID NO: 8756 - DNA, 254 bp, Oryza sativa
  Clone ID: PAT_MRT4530_15236C.1
gcagagcatcactagaaacatggctgagctcgtggccaaattagatagaccagtctgtagaggaaatgccaaactggcacactgtataccacacatgcgagacacgacacactcactggacggacactgaccacctacaagggctttcgagcccagttcagcgacaatcatttgcaccgaatgcccagactgttcaaattgtatgcgagttatcacttgagcaaaccacaggtacagacatcgcttgcaatgcc

SEQ ID NO: 8757 - DNA, 567 bp, Oryza sativa
  Clone ID: PAT_MRT4530_15237C.1
atgggaatggactggtacgcgtggctgtcggcggcgaggctggaccaggcggtggcgtacgagtacgcgctggtgttctcgcgcaacgagctggaggccgacgacctcgcctacttcgaccacgagttcctccacagcatgggcgtctccgtcgcaaagcaccgcctcgagatcctcaagctggcgcgccggagccgccgccgcgcggcgctgtcgtcgcgccttgtcgccgccgtcgaccgcgtcgccaggtacgtgcgcgcgctcgtcgtcgtcgtcgtccagggccgggaggacgagtcgtcctcggcgctcgtgctcgtgccgagccagcagctgcagcccgacgtcgacaagacgccgaggaggagcaggtccaagcccaagtcgaccaaggaggtcgccgccgccgccgccgctcccaccacaccgaaagccatgcggtcgccggtgctggccatcggcggcagggccgcctcgacggtgcacgccgtgaaggacggcgagaaaggcggtgaggacatggtcaggtgggaccgcctgttccaggacctcaagcccaactga

SEQ ID NO: 8758 - DNA, 843 bp, Oryza sativa
  Clone ID: PAT_MRT4530_15238C.1
atggaccacaagcaccatgatggccattcttccattaagcacaagctcacacaagtcactgctcctcctctctcacggccaccttttgatgtcaattctcaaattggcgctcatgtgcctggatggccttttggcaaaaagctggaggggctcaactgcttccagagaacgggaaaagctagtagcaaaaaggacaagacggccgcacttgagagagaacgtcgtcgaagatacgagcgcttctctctaaccaaagataccaagagacgaggacgacgagagtaccaaaacctcgtttgcgctgcttttgttatgtatcaacttgttatgttacgtgcaagtcgatccaatcatccgcttcttgtagggactaatggactatgttggtgtgagaagcaacagtacgtcttgctcttgcatctctctgcaagcatcaccgtcggcttcgccaaagtcgttttgatgttagccgattgtgggttagatggcgatattgctagagattatccgattcctactctgttcccgaatcgatctccgcctccgactccacttcgatctaatcttcttttccgatgccgatgttaccaaatttggttgttaacaagtactgtggaagtagatgaattcgatgataccgacaagatcgtagtcgatttattcgatgagatttcccggcggcttggctccgcgtaccccggctttgtaaactatggcggacggcgcgcgggcgacgactggaagggtcgggtgactcgggtcggctgcttcaactttgaggtgcggagacggtttctgaccgcgttgcatctggacggcgaatgtatcccacacgagtcatct

SEQ ID NO: 8759 - DNA, 207 bp, Oryza sativa
  Clone ID: PAT_MRT4530_15239C.1
atggcgagcctgctccaggagggcatctgtagggtccgcggcatccccggccgccggtgtaagacccgccgggggtcgtcggcggcgtgcagcagcaggggggcagggcactggaggccggagcaagcaaagccgtctactcgtgactcgtcgagcaggaggctggaaggagagggacccgactccggtgcgtcgtcgctgccgtga

SEQ ID NO: 8760 - DNA, 832 bp, Oryza sativa
  Clone ID: PAT_MRT4530_1523C.1
atggaagagggcgaggacggcggccaagggcggcggccatggcgatgctcaccggcgcacggcgtggagcgggttccggcggcggaatccgacgggagaggggtggacggggtggccggcacgacggcgaacgcgacggcgtcgacgacacggctcggcacggcggctagaggggagagggagctcggacgtggccggcgggagagaggggaagtgggcgcggggaacgcgggcgcgagggcgacgtgggcgacgtggcccgggagacgtgggagcggggcgcggcggctccggccggaggaaggggacgggcccgacaggcttgggaaagaacttcagggtgtgacagtcaccattgccattgaccgcgctcctgtcatggcctcgcccgccgggcacggccacactcaccacatccccaaccgcgcacggcaccctaaaataaatgagacaagagacaaggaatttttcaccgaggttcggaaactcgccggtttcctaatccccgttgaggcgagcccaactccaccgctcaaccacgaagccaccgcacgcccccttcgtcaaggggtgggcaaggtggtgaactccaaaccactcacaaccggcgccgggcctcctccacaatctcctcggagaggtcaccgggcaacacctccacaagcgcagtgtagcggccggtcagaccgtccacggctcggtcagaccgccatgggctcggtctgaccggctgcggctctggcggctctggatcgccaagacgagacctcctttgccttgcgccatccaacttgaggtcaatgcttgagccaagatcaacacttgtgaccat

SEQ ID NO: 8761 - DNA, 1660 bp, Oryza sativa
  Clone ID: PAT_MRT4530_15240C.1
tgatcctcctcctcctcgcgccgccataaatcctcgtctcccgtaccaactaaacccccttctctctccgctggggttctcgccgccgccgccgccgccgacgatctcgtctcgcaccgcctctctctcggtatctgagatttggatcgggcgcgaggccggcggctccagtcggcatggcgcttgtgttgcattgcggaagtggcaacaaaaatgcctttaaggcacttattgctgcagagtacactggagtcaaggtcgagctgaccaagaattttgagatgggtgtctcaaacaagacccctgagtttctcaagatgaacccccttgggaagattcctgttctggagactcctgaaggtgctgtttttgagagcaatgctatcgcgcgctatgttgctcgcttgaaggacaacagctctctttgtggttcttctcttatcgactattctcacattgaacaatggatggacttctcagcaacagaggttgatgccaatattggaaggtggttgtacccaaggcttggttttggcccttatgttcctgtgcttgaggaatttgctattacttcattgaagaggtcattgggtgctctgaacacacaccttgcttcaaacacataccttgttgggcattcagttactctagctgatattgtgatgacatgcaacctatattatgggtttgttcggatcttgatcaagagtttcacctccgagttccctcatgttgagcggtacttctggacaatggttaaccagcccaacttcaagaaggtcattggtgatttcaagcaagcagagtctgtgcctcccgttcagaaaaaggctgctccccctaaggaatcaaaagcaaaggaggccaagaaggaggctccgaaggaggcccctaaaccaaaggttgaggcttcagaggaagaggaggcaccaaagccaaagccaaagaatcctcttgatctactgccaccaagcaagatgattcttgatgagtggaagaggctatactcaaacacaaaaaccaacttccgtgaaattgccattaaaggtttctgggacatgtatgacccagagggttactctctgtggttctgtgactacaagtacaacgatgagaacaccgtatcgtttgtgacgatgaacaaggtcggtgggttcctgcagcggatggatctgtgccgcaagtatgcttttggcaagatgctggtcattggctccacaccgcccttcaaggtcaagggactctggctcttccgtggtcaggacatccccaagttcgtcatggatgaggtctacgacatggagctctatgagtggaccaaggttgacctctctgatgaggcccagaaagagcgtgtcaatgccatgattgaggaccaggagccgttcgagggcgaggacttgctggatgcaaaatgcttcaagtgagcagcacaatgtttagaagcaaaatcatcagttgcaaaagtactatttaggacttgaattcggagttaaaacagttgcctttttggtggagttttgttacttgctgtttatttgacctggtataccttttgaactggttgatttttgtgcaatgtctcagattttgggtaaggggggggggggggggggggggggggggtggggggggtgggggggtgggggggggggggggt

SEQ ID NO: 8762 - DNA, 911 bp, Oryza sativa
  unsure (1)..(911): unsure at all n locations
  Clone ID: PAT_MRT4530_15241C.1
ttttttttttttttttttttttttttgatgaaaccaaacattatatccaaaaatcaacatcgtcgttcgttttaaaaacggagggagtataagggtggggcactgtaaagtaaaaaatcttgtttggcttacagtacatccgatgcaaatagcagtatagagaaaatatttatacattcccgttatctcctgcagcgtttctaagttganactgcctgttaanagttaaagactgacatctttgngtcgngctcacctcatctgggcatgcctgttagttganactgacatagggacatcttggatttctctctttttctagcaaaacagtcaattgtttcattgctcatctgaggcaatttgtcaactaccaacaccttgagagaattcaacctaaggtcaagaaggcaaatgtacatacgaatagacaagtgcctaaaatttgtcgattgactgatcacatcgggtaaaagccaccaccctaccaatgagccaggtttaacatggttgggagtatatgtgatgattctgtgcatgctaacatctttgcccgagggaatagcgaaggttaatctctgggcagtatcaagctgtacatcaaaatcgggaggctacttcctgatcttcatcagagtatcagaccttaagtttaaacgttcttcttctcgttgttaaagcaagtatgataagtgcgatggttattgtgaccccaagaccaaatagtacaaccttccaaggagagcaactccaggaactgcagaccatttctatccagcccttctgatctgtcaattgcttgtgttgtatgaccgtggactgctgaatttttagcataagatgttcttgtgtaaatatcttcttagcatgctcatatagttccatgaaaaggctgtttagtcagatcgattgct

SEQ ID NO: 8763 - DNA, 462 bp, Oryza sativa
  Clone ID: PAT_MRT4530_15242C.1
atgtttggagcactgggatggccaaagaacaagaatcacctcaccgcgaggacgaagaagaagaagaagatgaagatgaagccttcgccgtctctgctccaccaccaccgccaccaccgccgccgccgccgccgccgcggcctcctctacatcgcccggccggtgccccgccacctccttcttcttcctcctgctcgcattgctctcactcttttccgtactggaagaagtggaggtgaagaaaaagaaactcacaaaaaggaaaagaactgtggatgcggcaatcaatcgaatcaatcacactcgcgccaccaggagcagcagcagcagatttcgctttgggtttgggaggggatcgtggtgggatatgcgatgattgctcagctttgggcggcgcggcacactggagactggactactgctagtgttgattctgattctctgcatggatcatctgtgtag

SEQ ID NO: 8764 - DNA, 2393 bp, Oryza sativa
  Clone ID: PAT_MRT4530_15243C.1
ttcgaagaaattggttacaacttccaacttcccaaccccgggccaggacccttgccacctccaaagggggacaactttttttttttttttttttaggaaatgcccaattgcaattgaatgttattgaataaattttaaacttcaaatctaggtttaaacaaaagggaaaaagaaactccaggtctacaaccatcgcctttctggtaaagtaccatgtaccaccctatagtataaattccacctgtatgttggatcttggaaggtgtaacatgccttataaccaaccactcggtctaaagaggcttatccgctttcctcgcaggcggaagcacgcaaaattaagtgcccagtcctgtctttttacagatagggcacagattttttataaccagccattgtttgatgcatgcggtgtggaagtcatgcccacagtctagtctgcccatgtcctcaccttcggcatattcttcctggcaaatacagcatggttcaacaccagttagaggttcttcaatcggtatgctcacatatttccattgcttcaaaccagtcctaattttatcctcactaagtccagtgtttacatacccaatgcgttcaccaagtgccaacaattcctcatatgacatattatccacatcaagccgcatgtcacgatgtctgtcaattaaactggcacgccttgcaaaaagtgcacgttcaaaattaggatcctcaaaccttccacctcttccctgacgaatttgttcaacaacattgcgaagatgcacaagttgattggcagactctgagactgtcctaattccgtctcttgaagcagcaatgctttgcataaaagactgcaggtccaagtaattcgagttttgcctatctacagagtgaggaacagccctgacataatgctgctgattggcacgagagctggatccaggttgatggcttcgaatctcatgtgatgtggatgaatgcccacgttgctgctgtgatgtaatgcttgaacctctggactgaggaacgctagcagcctgcaaggatctcctaacaatatcaaccgaaccccttgagcttgaagtaggctgggatgcatttaacccagcaatctgttgagctcctatatttacagcagttcgaattgtggagctggaattttgttggttgcttctgcctcccggcatagatagcaattctgccgagtcagaaggaaacagagaagaacctaacagaaggggctcaggaaaattgcctctcaccgagctcctgttgggatcttgtgaagataactggtttgttgtatcagcagaactaggaaaaatccctattctcgaaccaaaattgccacttgatggagcacggtgcaaattttgtgagaattgagtgacagcaggcacataaggccgactaagagaacttgttgaagagctcgatgctctaggttgtactggaataaacaaagactgttgctgagtaggctgataaacagaacacctgagacttccttcaggcaagagattggacgatgattgatcatactcattagggcttgttctcatccgggtattcctcagaaatctctcacgctcatgatcaccatatagtgaataatgatcagacaacatagcatttgcagacatattggtattctggtttagctgttccacaggagagtatgaaaaaacatggtttgtaggggcaggtgcagttaaaccagaagtgctttcatgactggatggagaaggttccagtataatattatttcgctgattattacgtgaactaccattggcagaagactctgcaagactcccatcaatattctttctcttgcaagatgaacgatgcccaccaaacaggttaacttcttggcctgtcattccatcagaaaagcttgcaacctgtgaaggatttcctgtagcactggaagaatttgtatggcgcagaacatgctcaggaatggaaaggcccctgttgagaggaaaagcgtttatccctggttgtccattactctgaatcatatcaacatcctcagaatcaaactgatcagcctgattaagattaaggtctaagtttaagctctgtgaaggcaatgaactactgccttcatgtcttctccctccaataattaagggagctcggatagacaaagcaggagcaaaatgttcccttttggcctcaaaaagactatcatgatcagctacacagcccatcgagctagatccagctgaatcccataagttcaagcttgtattttgctgaccaatcacgcttccatttggcatttccacctcatgactaccaagtaaataatgtgggtaatcatcatcctctagagtatttggaagtaaattctgttcatctgcggtggggttgctgggcagtaaattctgctgatccat

SEQ ID NO: 8765 - DNA, 1446 bp, Oryza sativa
  Clone ID: PAT_MRT4530_15244C.1
ttcttcttctccaaaaaaatactagtgtaatgtgtgatttgtgagagatgatggagctgtgtaggattcgaaccttccagaagagcctactgaggcccctcctcctcctccagcatgccccttgtagaaccctccaaaccctagggcggtccccttcgccctcggtgttccggcccccccgccgccgccccccgctcctcctcctcctcctccgctcctccttcgcctccgtctctccgggtccggcccccgggagcgggacaggcgaatgccccccgcccccgcccgcgcccttgccgcccgacgagctcgcctccgacgacgacgcctactaccacgagcacattctcgaggccacgcaggaggaccaaagtcgcctcgttccagtcaaggcctacttcccctgcaccagcatcaacctcaagagcctccagtcccagaattccttcaatgtcatcccccccacttcgcgtgctaccaactacgtcgtcctcaggtactacgatgtcaagggagacccagagggttttaaggctggcatcatagatgaaagtcattgccactatatggtggtgttccaatatgggtccattgtgctgtttaatgtttctgatcatgaagcggatggatacctgaaaattgttgagaagcatgcatcaggcttacttccagagatgagaaaagatgattatgctgttgttgagaagcctaccttggagacatggatgcagggtggacttgacttcatcatactcagggacctaagtatcgatgggattcgtacaattggaagtgtccttggtcagagtattgcccttgactattatatccggcaagtagatggaatggtagctgagttcacggatataaatcgtggaatggaaaagactggtaccttcactatggaaaggaaaaagcttttccagttggtaggaaaggctaactctaacctggcagatgttattctcaagcttgggctttttgaaaggtcagacattgcttggaagaacgcaaactatgctcagatttgggaataccttcgagatgaatatgagttaacccaaagatttgggaaccttgattttaagttgaaatttgttgagcacaacattcgttttcttcaagagatccttcagaacaggaagtctgattttctggaatggcttatcataattttgattagtgtggagatcctgatatctgtttacaacattgttcaggagcaaatgtagctgactattgtgggaatcccttgctggggctgaaacctcgtcagaacccctgtggcccgaaccccgaatgacacgttctgtcttgtggatttttcaatggatcaagtaagacccttgtataaaaaaaaaaaaaaaaacaaaaaaaaaaaaaaaaaaaaaaaaaaaactcgagactagttctctctctctctctccctcgtgccgattcctgcag

SEQ ID NO: 8766 - DNA, 714 bp, Oryza sativa
  Clone ID: PAT_MRT4530_15245C.1
ggccgccccttttttttttttttttttgattcaaatcatgtttattcatttaatgcaccattactatcaacgaccattaatccctagccaattaacttaattacaactaactacagcttaagcgttcatgatgagagcagcaccaccaaacagcgcaccgagcgcaatggcagcagtagcctgagtagcaccttcagttgaagtggagggagacagaccagtggcctgagcagtaccctcggggacaccggaggtgaagggaacgtcgctaacagagctggcgccagagaaggcagcctcttgtgtgctagcagtagggttggcagtagcagagggcttgtcagggttgagaacaccatcgataacgtggacaacaccgttggcgatgaggacatcagggacaatgaccttggcctcgttgacaaagacagtgccgttgtagatagcaatgttgagctttgtgccatcggaagcagtgagggtaccgttcttgaggtcgctgctgtagccaacagtgccgttgacaacatggtaggcaagaatatcggcgacgtcagactcgctggcattggcgagaacagagccaatcttggcgaacgcactgttgttgggaacaaagacagtgatgttcttctcagcggtaaggttagtaacaaccttggcttctgtaagggcgccagcagcggcgggaaagggtggcggcgatggcccgtg

SEQ ID NO: 8767 - DNA, 1560 bp, Oryza sativa
  unsure (1)..(1560): unsure at all n locations
  Clone ID: PAT_MRT4530_15246C.1
ctacgttttgtattttttttgtatnaccacnccgnngccgcnnnnnnnnnnnnnnnnnnnnnnnnnnnttnatnnnncccccccnnnnnnnnnnnccnnnctccctttnnnngctcgcccccctctacctactccgccggttctcctcgcctcttatatgcccccactctatattccaattggcgggttcacgtgtttatgagtaccacttactagcttgtttaggttggttcactactcttttgtagactatctccttttatcttttattcctatctgagcttgttgtgtccccctcttcactttcccccccgcacttatattccatcctcgtatttttctctctcttttttcttctccccactgctttttttttcccctccccctttccttttctctttccgtacatttatttttgtctttgtcctcgctctactttttttttgcttctctactagactttactattttttattcgtctactcctctcaccacttactaatatttgttattcgtggattttttttgctcactacctcttaatgctatttgtcttttatacccacatatccatatctaattatttttattctccatcctctcttttctctcccgctcgatgcncgcctcgtcaatatcaattatttatctttatctattaattatattcgccattatttcgttctgcattttcctctcccttactcctctttccgtcttgttcccgtcttctttgtctcctcacttttcttctttctgatataatcatttatattatttttgtattgtcagcctttctttcttccttattttttgttatttgccactttctgcactgattcataatagtctttgcgtttgatttatttctccgtcgctctatcgtatatcttttctcctatcctacttatattgtctgctccgttctgtcctgttctactttcctactcttcttcgatcttatatttataatggctattttactcattctattcttttattttgtcttattgcttctattttctgtttttcctgtcttgtattttcttgttatttattccacacaccactctcacttgttctcttctctctttctattttccaccattctctgtcgttcttgttgtctagttgttgttcttatctctgcttgtctttgtttttgtttatccttcttcagttcacattcattccctacttccatataattcttatatcttgtctgtctattttactttccgcgtcgttatttctctcctactgttatgttctcatgatcatataattatttattgcttctttttttcgcatcgttcttcctggatttgtattttctctncatgttctatctctattatatattctcttatccttgctgtttatcgattcncaagctgttacgcgtcacctgcgtctgtttgcgtcccgtcctctctctatgatcattcatccatgcatctatntcgtgcattatctttcttatttgtccgttgtgtatttctgtgcttcttctagctatttactctatgtctacgactgttacatgtcgtatcacatctn

SEQ ID NO: 8768 - DNA, 269 bp, Oryza sativa
  Clone ID: PAT_MRT4530_15247C.1
gagaaaaaccaaggatctgcaacattctacgagtgctgtaatctccggcgatacagcagaagaatcattcagtcatcgcgtgctggtacatatgcgaggaggaaactgacggtctacctagagcctggttcagaatcgctcaaagcgagaagtatgagatgacattgacacacgtgtaccatgtacaccgatgtgacattttctaaggcagatgcgatcaggcagtttgcaaacaccacagcatgtgggatatacagcagggagacatg

SEQ ID NO: 8769 - DNA, 948 bp, Oryza sativa
  unsure (1)..(948): unsure at all n locations
  Clone ID: PAT_MRT4530_15248C.1
tactacgactacacgaccttgaactaccttcgacaactctacccgggggactcagcccttgaacacccctacgcggacaacacgcgaacgctntccaactatagcccccggaacaccacacacacctcccgggganctacaacacacacaccacancgctcctcctgggnanacgccctncaccctctgaancncaccacccctacctgcgcgcacaacaccacctancttnaccgcncgggaccttctgcggtgctttgaccaactgccctaacgcctgacgcgancttttacgcggcncatttcaacccgancaccgctaaccacnccgcccacanacgcaagcgggcctaaccaccgaaacgcacccacacaaacttggaaactccanacacgaanggggaacaaacactccactaacactgactgnaccgaacctgnggcccttcacactctgcttggaacaccccgaccctcttgaaccaacacaccacgccaaagaacccanaagacaccacacggccaccacacgnactccaacttacctncaacacacacgattttcacacctaaccacggtggnacacccgaaccacgggcacacanacactttcttttccttagcaatcgggacacacgngnactctggggaacgcgaacgaacacctctttttggggcacccgaactccacacggggttgaacgaacataccaccattttgnacaaactccctacattcgttgactngacttccataacacaccccaccgctgccccgcganncgggactacaacacacgntggttttcaaaataacgatttcaaagaacaacgatttttcccccccccaacttcccccttttaaaaacccccctccaatttcccccacaaatttgtacgcacggcctaaccccagaagtttaaaaccctaactacccacgacattt

SEQ ID NO: 8770 - DNA, 167 bp, Oryza sativa
  Clone ID: PAT_MRT4530_15249C.1
tttctcttagggtgtccatcctacaatcaggggagatttcagggagtttttacttggctggggggagccttttaccactttgtgatgatccccaccaaattaagtataaaagaagaatcctttttgccatatggaagcaagaatccaaagatatggactcccatgtt

SEQ ID NO: 8771 - DNA, 372 bp, Oryza sativa
  Clone ID: PAT_MRT4530_1524C.1
ggagggagtgccttcctttccaaggagccgaagccgacatcccgcctgccgccagtggctgcccgcttacacgtacgtttgtaggtgccctgtataggctgcaactttttctttgacgacctatgtcgacgggtgatacccgtagaccggatatagagggtattagggtacgttggtacaagcattagctctcgatgacttggctcctcgtaggctctggcttcgtaggctgtataggttgtgttggctctgagatttgatcccttaaaccctccccggggggtcccttttatatcgcagatctggaggtctccacgtagaactcggagatacagaccctatacgatacgtcaacgacccaattctgcccga

SEQ ID NO: 8772 - DNA, 213 bp, Oryza sativa
  Clone ID: PAT_MRT4530_15250C.1
atggagccatggcctgatggagcacttttcccatcctcaaggaggtaccataagatacgagcgtgctacgtgagaggggcgttgtacatgctgctggtgatggtgatggggtctgcgtgcacctactcctgctgctaccgctccaggctgcgccagcaatacgagctccaggagaagccctgcggcgacagctgccatgcctgtgtccactag

SEQ ID NO: 8773 - DNA, 1020 bp, Oryza sativa
  Clone ID: PAT_MRT4530_15251C.1
atggccatccccaaggctctgctctttgccatcctcagctgcctctgcctctgcagcgctgttctagcagctcgcgagcagagcgaccacgcagccatggtggcgaggcacgagaggtggatggaacagtatgggcgggtgtacaaggatgctactgagaaggcacgtcgatttgagatattcaaagccaacgtcgcattcatcgagtcgttcaatgcaggcaaccacaagttttggctcggcgttaaccagttcgctgacctcaccaactatgagttccgggcgacgaagaccaacaagggattcattcctagcacggttagggttcctaccacattcaggtatgagaatgttagcattgacacgcttccagcaaccgtggactggagaaccaagggcgctgtcacacccatcaaggaccaaggccagtgtggttgttgctgggcattttcggccgtggcagccatggagggtattgtcaagttgagcacgggcaagcttatctccctctctgagcaagagcttgttgactgcgatgttcatggcgaggatcagggctgcgagggagggctcatggatgatgccttcaaattcatcatcaagaatggtggcctcaccactgagtctaagtacccatacacagcggcagacggcaagtgcaatggtggatccaacagcgccgcaacaatcaagggctacgaggatgtgccagctaacaatgaggccgcactcatgaaggccgtggcaaaccaacctgtttctgttgccgtggatggaggcgacatgacattccagttctactctggtggcgtgatgaccggctcatgcggcactgacttagaccatgggattgtagccattggctatggcaaggacggtgatggcacacaatattggttgctgaagaactcctggggcacaacatggggtgagaatggcttcctgagaatggagaaagacatttccgacaagaggggcatgtgtgggcttgccatggagccttcatacccaactgcgtaa

SEQ ID NO: 8774 - DNA, 1253 bp, Oryza sativa
  Clone ID: PAT_MRT4530_15252C.1
ctagtggatcccccgggctgaggcgaaaccgctcaacgctgctccattcccctccttcgttcccccaacgaaattgagacggaggtagtactaaaaatattgagaatttgagataagagggtggaaatctctcccgtctcgttcgtctcctccgcttcgctcctttgcgccaagacgcgtcgcggggctgaacagggagagaggggcggcgatctccatttgccgagcagagcagagcagcggaggggatcctggttggaaatgacgcacatgtttccatatgatggtgcctcgtccagctcaacctctctgagtagtcagaagagcgagactgatgatgacaggatgattgcaatggttctttcggaagaatatgctaagttagatggtgctatggccaagcggctctcgaatttaacatctattcctcacgtcccccgaataaacacatactttccgacatacagtgatgccactatggaccatcatcgccttctcgataggctaaatgtttatggcttgtatgaagtgagagtttctggcgatggcaattgtcagttccgtgcactatcagaccagctatatcgatcacccgattatcacaagcatgttcgaaaggaaatagtgaagcagctcaaggcatgtaactctttgtatgaaggttatgttccaatgaaatataaacattattgcaagaagatgaaaaaatctggtgaatggggcgaccatgtcacattgcaagctgctgctgataagtttgctgcaaaaatatgccttctaacatcattcagagacacatgttttgttgaaattgttccacagtatcaggcaccacagagagaaatttggctaagtttctggtcggaagttcactataactcgctatatgatgctcgagatctccctagcaaatacaagcctaggaagaagcactggttattgttttagtaaccacgcgggagctttgctttggacatggattttattgcttggccttttggcccctcctgatagttggagcttggaaccctgaagagtggaatcctctgtggttctcttccttgaagcgctgaatgggtttgccggatgcactcctcaccacagtacatacagcattagttatactataatactgagagaatttgagattgcttccttgtgaatatatacccatagggaaattactgacatccatgttgattgtaaaccatatttgttcattggtatattctgtatacattttataggctgct

SEQ ID NO: 8775 - DNA, 216 bp, Oryza sativa
  Clone ID: PAT_MRT4530_15253C.1
gtcgactctagaggatccccacattggtcatcgccgaggctttctgttgtgtcgccgctgttgccacctgctccccgcccgccatgtacagggttcgctaccacggccaactacttcggccaccttgctggctgggtggctgccgccgccaccgctgctgccgtcttccggccactgccacctaggcaggtcgctgtcgtcgcctggaccgggtag

SEQ ID NO: 8776 - DNA, 331 bp, Oryza sativa
  Clone ID: PAT_MRT4530_15254C.1
agccatggcaccatggatccgtgtagccaagtacaatggatgcataacgttggcatggggttagctccacaagccatggttgcaggtcgcaagcacaatggcagctcctgcaagcaagcaatgttgcatgcaagctgaccaagggcatggatgcctcagtgccactgtggcaccaagttgccaagatggatgcagagcatggcaaacaagttatttggtgctgggactcggcaagcaagcaagatggatggaagatggcgatgcaagatgccatacatggtggcaaacatggcccctgtgcaaactgtgccaactgctgcttgcctgtggt

SEQ ID NO: 8777 - DNA, 1053 bp, Oryza sativa
  Clone ID: PAT_MRT4530_15255C.1
atggcgtcgaggagcatatcaagctgcacaactgagacggcaaaaggcatccacaggttcgagatcttcagttacagcatgatgaacaccgaagccgaagacgactccatccggtccggcgtcttcaacggctacatcggcgtctacctcgagctgatcagcaagaacggcgagccatgggcactcgtcgacgtgaatctgatcaaccagctgcaacccgggcaacctcgtcagctgttcaccaagaccgatgtgcctaccccgttcagatcttcaagctttcaggagtctaccttggggtctctcaagtgcatgaagaggagcgatattgagagcactccagggttcatcgtcaatgactgcatcgtgatcgaatgcaatgttactgtcatctatgagccaaaagtgtctaaaaccagggcattgtgtgacgctgaaactagttcggcattgcgcgagatcgaggtgcctcctatggagatatcgtcggatttcgccaagatgttgaaggacggtgtaggagcagatgtgacattcagagttggagaagacacattccgtgcccacagggcggtgctagctgcgaggtctccagtatttcatgctcagctctgtggaccgatgaaggagaagaaggagacacaaatgcaggagataaccatccaagacatgcagccatctgtcttcgaggctttcctctatttcatctacaccgattgtgttccaagaatggatgatcttggcaatggtgagaagatgcatttgatgatgcatttgcttaaagccggtgaccggtatggattggagaggctcaggatcatgtgcgagagatttctagctacgaacctcgacacggagcatgtatctgcgatactgggtctagctgacttgctagatctcaagaagctcaaggaagcttgcatggagttcatggtcccatctgagagaatggatgccgtggctgcaagtcaagggtaccagcagctgaagagagcatttccctctctggcgtttgaagtgtgggagaggaggagccgtgttcgcaggaattaa

SEQ ID NO: 8778 - DNA, 674 bp, Oryza sativa
  Clone ID: PAT_MRT4530_15256C.1
ttaggcaccatcccttagccgctgttggatctcgccttctccttcgccgccaccgtgcctagggcattcccgcgccgacaccgacttcgtctctcgccgtcgctcggtggtcctcgccgcctccgccgcagacgccgccgccgcactttgtggagagagccgtcggtgcctctttctctctagatttctatggagctgaatctcgggctctgtctctctttgctcgggacgagggtggacgcgggcgccgccgcccgatgacgacgctcgcttctgacacgaacgggcggccttgcctgggactggccgtgcgggcggatcactttgggttgcctgggaccatggtgcgcccgggtcctcgcgcaactgtcgagtgcgccgggcttggcgttggggctgatgggcgcgtgttggcacttctcgggccgggatggttggggggcggcccgggggccttaggtctcgtcggttgaccggtccccccgcgaacggggggggcgggggcgcgggggtgcgcgttgcggcgtcttctgggtttggtgtggtttgaggctcggggctggggtgcgccgggcctcgaggggggcccggggggtgcggccgtcgccgcggggggcccacggggttctcgggaggtcgggaggggggacgggaggccgggggggcgggggggg

SEQ ID NO: 8779 - DNA, 1345 bp, Oryza sativa
  Clone ID: PAT_MRT4530_15257C.1
atggcgtcgaggagcatatcaagctgcacaactgagacggcaaaaggcatccacaggttcgagatcttcagttacagcatgatgaacaccgaagccgaagacgactccatccggtccggcgtcttcaacgtaggaggattcgattgggcgttgctttactaccctgacggcatcgacgacgacagcaagggctacatcggcgtctacctcgagctgatcagcaagaacggcgagccatgggcactcgtcgacgtgaatctgatcaaccagctgcaacccgggcaacctcgtcagctgttcaccaagaccgatgtgcctaccccgttcagatcttcaagctttcaggagtctaccttggggtctctcaagtgcatgaagaggagcgatattgagagcactccagggttcatcgtcaatgactgcatcgtgatcgaatgcaatgttactgtcatctatgagccaaaagtgtctaaaaccagggcattgtgtgacgctgaaactagttcggcattgcgcgagatcgaggtgcctcctatggagatatcgtcggatttcgccaagatgttgaaggacggtgtaggagcagatgtgacattcagagttggagaagacacattccgtgcccacagggcggtgctagctgcgaggtctccagtatttcatgctcagctctgtggaccgatgaaggagaagaaggagacacaaatgcaggagataaccatccaagacatgcagccatctgtcttcgaggctttcctctatttcatctacaccgattgtgttccaagaatggatgatcttggcaatggtgagaagatgcatttgatgatgcatttgcttaaggccggtgaccggtatggattggagaggctcaggatcatgtgcgagagatttctagctacgaacctcgacacggagcatgtatctgcgatactgggtctagctgacttgctagatctcaagaagctcaaggaagcttgcatggagttcatggtcccatctgagagaatggatgccgtggctgcaagtcaagggtaccagcagctgaagagagcatttccctctctggcgtttgaagtgtgggagaggaggagccgtgttcgcaggaattaattaacatcttcttgattcagaagatatatgtgcgcgatgtctggagatttcctttttggttatgtttgttttggtacatttgatgatctgacgaatgttctctcaacaatgtgatgactgatacggtgcacgcgctggttgcaccttaatgtaatgtggctatctggatcatgccaatggttttacctttagaatcgagttgttttttacaaaaaaaaaaaaaaaacggtcc

SEQ ID NO: 8780 - DNA, 867 bp, Oryza sativa
  Clone ID: PAT_MRT4530_15258C.1
atggggctgacatgctttgctcctccttgcgatcctgacggcggcaacggtgaatggagacgatggctaaagcggcagctaattagctcccatgcatgtcggccgtcacagctactgtcattcccgtgctctaggttcattgtcaccatggccgacgccctccccggtgtccccaccacccatcgctgccaccgacagatccatgcacaagggaggggaggcagcgggatccacgtagagggggagatcccggcccaccagagccatgcgcgaggcagggggagagctcgctggatctgcccctcccatcgctgccaccgtcagattaggcatgctctccccaccgccgccgccacaagcattgttcctcctcccagccgtcaacgcatgccaccagatccatgcacaagggatagcaggtggaaaaatccatgcgagagggggaagagcatgacggatcctctatttccggcagatccggcgggctctccccgctgccactggaatcgtcgttaccccaaccgatcgtcgagcgcatcaccagaaccatgcgtgggggaggggaggtggcgagatcctcgtggaagggggagagcccgtcggatctaccctccactcatcgttgttgtagtcatcattccccctcgtcgccatcaagtgcacctctggatccatgcagaggggaggggaggcggcgtgatccacgcgggagggaaagagcctgccaaatctgcaccttccctcgttgctgccggtggatccagcggactcttcctgccgccgctgtcgcattggtcatcaccactgcccgtcgtcgacacgtgccaccttggctgcaagagagcctaccaccaccttccgaagtga

SEQ ID NO: 8781 - DNA, 460 bp, Oryza sativa
  Clone ID: PAT_MRT4530_15259C.1
cccccccccccccccccccccccccccccccccccccccccccccccccccccccccccccccccccccccccctctttggcccatcatgcatactggatgccctttattttataaaaattttgaaggcctttcccccaaaaaactagggggagccccttttcctaaaaaaaattttgaaaaaatcccagggggggaaggggcccaaaaaaagggctaaatatggattttgcccctttttatgcatgtttaaactttttaaggctttcacccaactaactaaattttataaaagtctaaaaaaataataggaccgccgctgtggggctttttatctggacccctccctcatatttttatagcgggacccttatttgcctgaaagatattgggggcaaataaaggcaactggggaaagctaaccttagcagcccaaccttttgaaacccaattttcagctt

SEQ ID NO: 8782 - DNA, 4503 bp, Oryza sativa
  Clone ID: PAT_MRT4530_1525C.1
tcaagaatccaatgtacccactctagtgtgcaatcggcccatggaagcattcaagtctccaacatccgtgcgcaagccacgaatatcgtcatgcaaagtttcatgcccggtagacaagcgttgaatgctttcacttagggtattaatatccccaagtaccgggttgaagtactcgttgggttgcattccaaaataagcatattgtggatggaagaaagcatttggatcatacccaggaggaggaggaggtgctgagcttgagctagctccaggatgagaggagggcaccgccctaggagcacggggagctccaagctgaaggtggggcttgtactgcttgtgcttcttcaaattttgcccaacagccccaagcttgtcttgaatcaacctcatgatgtaaggggcataatagattccctgagtgaaggtccccttggagatggcaatctcttgcatcatgagagacacaatgtcgaactgacagccaatcctattaaccacactgcggatagtcctcaggccggcaaccttcccgtgtgtgtaccgcactccatcttcataaaactgagagagatagtctatggagagcggattatgggtgtgctcctcatgcaagtcatctccaaagtccaagcgaatattgaggagccgccggaattgcctcctggagatagaacactgaagggtgtcggacatccacttcatctcactatagtctctagccacccactctgtagcatagaactgccggatcaaatcttcattgtagtcttgtttgagagtcacaatccggtcaatgccaacagtcttgaagagatcctgtaagccctcaaactctgaagtctcattgatatctctatcatctccacttgccttctcactagccccttcaacatgggcctcaacctcttcatcactttgagcgtactcatctccgctcgattccttaggctcactcacgggatccggagtgggtacacgacgaccatggcgagtgcggggaggcatcactccctcatcaaggtcgaaatgcccgttggttgccataggtgtcttgatgggctttgcatcctccaagccaaacctcttgagtagatccttgatgtacttggtttggctcacgaacgtcccatccttgagttgcttgatttgaagtccaaggaagaagctcaactctccaatcatggacatctcaaattccctcattagtagaccgaatatgatgtcatcaacataaatttgacacacaaagaaatcatcaccaatgatttttgtgaaaagagtggtgtcaacttttccaatttttaaaatccttgccttgtttctcactaccaacccgttctcatcttgtttgttcctaaagacccactttgtccctatgacattgtggtctctaggtctttcaaccaaagtccacaccttgtttcttgcaaagttgttgagctcttcatgcatagcattcatccaatccggatcacaaaaagcttcatctacatgttttggctcaagacaagaaacaaacgagtaatgtttacaaatcgaagcgacacgagatcgagtttgaacacccttactaatgtcacccaacacttggtcaattgggtgatccttggaaagagcaatgtgtatccttggtggcataggtggatcttgtctcttctcctcctccacttcaacttgagcttgacttggcgtagcggaagtagatggctcatcttgagtggaggtggatggcttgtcttccacttcaataggcttgacatctccaatagacatgttcttcatagctctcatcaagccttcatcacctacatcatccaaattcttgtgcccctcttgggagccattagtttcatcaaattgaacatcggcggtttcttccacaatacctttgttcttattgtagacccggtatgccttgctatttgaggcataaccatattcatcaagcatagtccttgccatctcaattaatgtacgatttttcctctccactacaccattttgttgaggtgagtaggtagcggaaagttcatgtttaataccaagatcatcacaatagtcctcgatatttgtattcttaaacttggaaccattggcacttctaattttcacaagggtgcaattaaattcattttgggccctttttgcaaactttttgaaaagctcggcaacaatagacttgtcatgcaaaaagaacacccaagtatagcgagaataatcatcaacaatcacaagacaatgactattaccaccaatactcttataggttgttgggccaaacaaatccatatgcaagagctccaatggtctagatgtggacatgatactcttagtaggatgagaagatgcaacttgcttgccggcttgacaagcactacaaagcttatctttctcaaactttacatctttcaagcccacaactaaatcacgttttgaaagtttactcaattgattcatgccaacataggctagcctcctatgccaaagccaacccaatgaagtttttgcaactaaacaagttttcaaatttgcttcactagaattgaaatcaaccaaataaagatttccatatctaaaacccttgaacacacaagacttgtcaagaaggctagaaacaataacctcttgcgggaagaaagcacatgacaagccaagatcacaaatttgagcaaccgaaagcaaattgaaatttagagatttaacaagagagacattatcaattgacaaatcattggagatagcaattttacctaacccaattaccttttctttgctattgtctccaaaagtcactttctcttgttcattccctccttcaaatgtggtgaacattgccctatcaccggtcatgtgttgagtgcatccactatcaagcacccaatggcttccaccggtacggtagttcaccaccgagtataggggaacccacatatctagcaacaatgctaccatcatgagccttccattactcttgacaaaatgagtggcacggtgagaaggtttcttacccttctttggaatgaatccaagtccctccttgttaaggatgcaccgttgctcactcaaaatcttgtcaagagtgttcttacccttgaagcacctctccaaactcttgttgagcttggccacttgctccttaagctcattgttctcaacaacaagtgaggcatcacaaatagaaacacaagagctagagctagagctaggcacatccacaagatcatcacaagaggtagaaatgctaaatgatgcaacatgagcaatatgacaagtagcactatcatcaagcaaatcacaagatatgccaacatcaatgagagctccatgttgagtagtggaaaggaggttgtcatgagcttccttaagcttctcatgagaaatggtgagtctctcatgagaggtctttagctcctcatacaagacctccaaagaagcatggagctcctcaatctccttttcactataagcatggagctcctcaaacatactcacaagctcatcataggaaacatcatcacactcatcatcactctcactatcactaagagatgttaccttagaggagccctttgccatcagacaaagtggagcgaagagtgatggagcctccttgatggcaacaacggccatcttcttcttcttggagcttgcatcatcaccaccttcttcctcggacccggatgaggcggagctctcctcatttgaatcccattccctgatgaatgcctcaatcttcttgccttccttcttgagcttcttcatgagcttgtagcctccactctttttcttggatgacttgtctctctcctttctcctttccaagagatcattgaaccttctagcaagaagggcaatctcttcctctaagtcctcattggcttcattcaccttgcccttgcccttgtcttcaacttcgacttggagagcaatgcacttcttggaaggtgaggcttcctccatctccttcttcttcaacttatacatgtcattggtgttgatctttcccaagaggcttgcgggtgtcattcttgacatgtcggagttgatgagcatggtaacaagggtctcatacttctccggtagagccctaagcatcttttgggcaacctcaagattggtgtagtttgccccaagccccttgagatcattcacaatgacattgagcctcccatacatgtcattcacactctcatgaggcaacatggagaatgtctcatattggatcttgaggaaatgaagcttgacatccttgtactcgcttgtgccctcatggatctccgccaacttgttccaaatctcatatgcggtctcaaggttgctcactctatcgaactcctcttggctcaaagagttgaacaaagcattcatagcatgggcattgagttggagattacggtgatcaatagctttgaggtgagtagacattttaattttccaagtggagtggtttgtgccattaaacatgggagccttctctacatggttcacctcgtccgacat

SEQ ID NO: 8783 - DNA, 516 bp, Oryza sativa
  Clone ID: PAT_MRT4530_15260C.1
atgggcggtgcggcgacggagcgaagcggcgcggcggccagcggtgaatggagcgacggcgggtgcggagcggcggcggcggcagcaggccacggggcgggcggagcggcgacggacagcgcatggccagcggcgggcgacggcgcgcgcggcgggcgacggcgcgcgcggcgggcgacggcgcgcgcggcggcgcgcgagacgcgtggggtcgatggtgacgtcgggccgcgcgaggaggcggcggagcaagtggagcttctcgtcctcaccaccaccaccaccaccaccagaagcagcggagccgccatggcacttgcggagctccgacgaggggagggtgtcggtgatatggccgacaaggggagcgcttgcgcaagagagatatggccgccgccaccccaggcgcctcgcgcgccgtcgcccgccgccggccatgcgctgtccgtcgccgcgagggaggaggcgagctcgtcggggcggccggcaggagatgaggcagcgcacgccggctga

SEQ ID NO: 8784 - DNA, 1480 bp, Oryza sativa
  Clone ID: PAT_MRT4530_15261C.1
ccacgcgtccgattgaacgggatgtggagctggagttcacacaggaggagctgaatgctgccccaatgctcgacgatgattctgagccacccaaaccggttgaatacctggtgagccatgggcagtctcagcaggagcagtgcgataccatttgcaacttgaatgtgatcagtagctcaactgggttgggaggcctacatttggttctattcagaattgaaggcggacacaagctgcctccaaccacactgtctcctggggacatggtctgtgtaagaacatgtaatagccgtggtgaaggagcaacttcttgcatgcaaggctttgtttataatctaggggaggatggttgcagcataactctggctctggaatcccgccatggtgatcctacattctccaggctgttcgggaaaagtgtgcgcattgaccgtatacaaggattggctgatgctcttacatatgagcgcaatcttgaagcattgattattcttcaaaggaatggtttacagaaaagcaatgcatccattggcgtagtagccactttatttggggacaacaaggatgttatgaagatggagcagaatcacctgactgactggggtgaatcaagtgcacctgatccgaggatatcagagaggtatgcactagatgcctcccagttaaaggctctctcattaggcttgaacaagaagaggcctgttctaattatccagggtcctcctggcacgggcaatacagtcttgctcacagagctcattgtacgtgctgtccaacagggtgagaacgtccttgtgacagctcctagcaatgcggcagttgataacatggttgaaaggttgtcaaacactggcttgaacattgtgcgagttggaaaccctgctcggatatcaccatctgttgcttcaaagtccttggcggagattgtgaacagaaggcttgagcagttcgcgaaggagcttgagagaaagagaagcgatttaagaaaggacctgagctactgcatagaggatgattctttagctgctggcattcgtcaactgctgaagcaactgggaagggatctggaaaagaaagagaaggaaatgattagggaagtactctctgaggcacaggttgtgctttctactaacacaggagcagccgatccacttatcaggagaacatgttgttttgacttggtaatcatagatgaagcagggcaagcaatagaaccctcctgctggattcccatattgcagggaaagcgttgcattctcgctggtgatcattgccagcttgcaccagtaattttgtcaagaaaggtcttagatggagggcttggtaaatctttgttggaaagagcttcgtcattgcacaatggattactgacaacaaggttgacagtgcagcacagaatgaatgactcaatagctagttgggcatctaaagagatgtatcatggactgctcaaaacttctcattctggtgcttcacaaac
